United States Patent Application Publication US 2014/0325702 A1 - sequence listing, part 12

SEQ ID NO: 11055 - DNA, 4852 bp, Heterodera glycines
cttttcgaccaatgcccagctctttcagtactttctcctcctcctcttttgttaacgatttcacactttcgttcaccggcgtctcctcctcgaagtccaaaagtttttcatcgtcgcagtccatttgatcaaaggccatttggttttctataatgaattcggttttttcgggcaaatgcgacacattttcaataaatgaatcgacaaaagatgatgaaaaaggtggaataattttacagaatgaaatgcgaacagaattcagtaaagtggtgttgtaatttttcggagtttcgttgaaatttaagatttcatttgtaagtgtgtagtgtgtttccgatgtaatagcctagtgagtttaatgctttcgggccaaaaacgaaatcgtaaggaaaggaattattcgttacaacacaatttatttcacattcgaaatttccccttctcattggaacattaagcactccaattattgggatttttccaccagtaaaagaagcaacttcaaaagacaattttgaatttcctttgtttgggcaaaaaccccattttagcaaatccacgcctttttcgttggcgattttgtgtaaaaatttggggtttgctgcatttatttctgctgccgaatcgattagaccgatcgccttcattccgacaatattcacttccgtcgttggactttcagaacattcagcgttggcgggattttgagatggaaattcgtttgaatgtaaaatcaaagaattaaaaaatttttcataagttggaatttctccgtgtcccacgtgattaagggaaacggttttcgaatccgaattttcaggtattacttctttcaccatgatcatattcgattccttgttttgagctcttttgtttgactgaaacagaggggttctgtttgcacccgtggcttcgaaattttgagtgttttgacttgtgggaatataatttctgttttgaaaatcaaaatttcgattggaaggaaagttttggttttcctgtcggaatgcttcgtttctgaaaccactctgtcggtttggcctgaaattattttgcgctctcatcccaaagtttggaaaattccttgcaaaacgttgtccgtaatttgggttttgaaattggacagtacggttttgttgtgggccgggttgttgaaattgaacaggaattcccactgattcgtttctttcccggttttttcatcctcaataagactcaaacggttggccatcatcaaaagctcatcaaaagtttggtttgctttggtctggcattccaaaaatctggctaaattcacatcgtttatgtttgaaatgaagtgcttttttgacacctcatccaactggttttcgtccagaccaatgtatgagcaattaaccaaacgttgaattcgctcaccaaactttataatgtcttcatttggttttcttttaccattctgcgtcaattcggaaaatgcgtttgcctctttgtagtctgtctctctcaaaatggacattatttcggtttttagaatgccaaatgtcgcctcatttccaaatttgttcagcgcaatatgatacgctttcaaagcttttcctttcaactttgtctgcagcaactctttttgcttttctggtctccactctccggcacacatttgaacatttaggaagaaatccttaattttgtcccgaccttccgttccgtataggttcggaatttctcggagcgtatttgcgtattggtttgacagagtaactttatgtaattccattacaatatcaggaatttgattttgttggaaattttgctgagggacaaactcgaaattttgaacgttcggaaagtgattgggttgtggtgccaaattttcaaaatttggattcggtcgctgttgataatttggttgattgatattccgaaccggatgaaaattttgaaaattgggtccatttccaaaatctcttgtattctgaattgggtgattcaccccaatttctcgaccataatttggatttggaaagttttggttttgctcaccaaacatttcttcatatccgaaattatgagcatgccgaaccggttgtgctcttaattcccgattttgttcaaaatttattgcggaaaactgatggttgttcgtcatttgtgagttgacgaaaattcgagggttttggcggcgatgaaattgcatattttgtccatgaatctcattaccaaatcggttcgcatcaggattccgattttggttttgctcgaaattttgttgtcccccattgtatgaaatgtgtggtgaaccattttgaggggttgaatgagcccggggatttccgaaactttggacagcattttggttgggaggtcggaacattgcaagctgcatttgttcttcgacattttgttgcattcccacttgctgagggatactgttttcgaaatttcgcggaaatggatttgggttttgcacattgtccaaaatgttttgaggggccaaattcaaaccattgttttgttcagtgccatttcgtcgactgtggcgagaatgcgacgattcctcttgttccatataatttatcggccggcgcactcggaaattatatctttgctgaaaaccggttgactccatacatttctaaactttgaaatgaaaaggagaaagaaaaaattcaaaacaaaaatcctccacaattggtgttgaccaaatttccaatgtcgcttgcacacaatcggtttgcaattcggtgtcgaaaggttggattttacgtcgcttttgcaggagcgccacgttggagaaaaggcgtattttcggggagggactttgggatttgctggggtttgggttgagattttggggtcaaggaaagatttacttaattttcaacaccactttactgacaaggaattagagaataaggcaaattgcaattaggaactcaaataacagtaccaattaagcctttgggcgtttgttgttgttgaatgaaagtccacggggaaaagcaccaaattttgtagttttattacaataattcaaaagcacaaaatatataaaacttgagataacacgaagacaaagacaaccaccaaaaggaaaattaaatgaaggatgcaaaaatattttaaattaacgcgaaaaacaatcgttgcaaaacaataaaataaggataaatcattatttatcctacgaaaatggccgctttaataggggggggggcgtaccgttttaatagaggatttctttaaaaaatgcccaaatatgcacataaaatatgcacaaaataccaaaatacacacaaatatgcatataaatcgcgaactaggcataaatatgcaaaatatgcatatggaaatacgtcctagaagcttcaaaacaagctaaaacatgtttttcgtgcgtttcagacctccaacagtccaggaaaaaaatatgcatgtgcatataattctacaccctatcaatgtcatacatgtgttatttgtatcattacaaggcttagtctgttcaagacttaaaattttatgagtttaaacaaaattagacgggttcttgttataaattttaatgatatataacaatttacatatttattttgttttatttttttgaaatccctccctcttgcccaaacttcatgtcaccaaacgaagatgtgcggtaggtttcggaacgaaacttgcccctccaagttcagttctgaggaccaaagaaatacatgaaaaggggtgaggattcaaaaaaaattttatgaaatgaggagggggggggggggggtcggtggcaaacactcgaagggttccacaaaaaaaaatgcaattaggaattcaaatgcgcaattctgagttttctaaaaatttgagaatttttggaatttttagcagtttttgcaccaattttggcactttttgcgatttttagcataaattttataggttttagcaatataagtcttggacacttaaattaaaatttgacaaagtaaatattttattgttcttggtttttcaacattacccttaactcaaaaacaccgaattaattaaattctaagagattaaataaacttggcgagacttaagtttgttatttcgtgaaatttgattcatcacccaaaaaaaatctgagccaaagaaattaccaattttaaataaacaaacattcatctcattacactcactttcaatgggacacaaaaaattaagataaaaattttttgcttggggtaaacaaatccgaacacagatgattttataaaaagaggacttccatcaaataaaaaaattcttttcattgaataaatgtgaagaataaacctagacccatttttttatatactcagctgtttttaaaattttcttgtcaaattatttattatcagttattttttaattttaatttttatttgcgaattaaggtaaaatttgcatgaagaataagccgtctacaaaatcagttactttttaaaatgaataaaaaacgaaaatagagaacaagctataaaacatttttatcgttctgttaaaaaagttttctcattaaaatcatttctttggtttttaattaaactaaaaaaataaaaagaatgtaaaattaaaaaaaaacttaaaacatgacaaattgtcaaatttcatatttttaaaattgatactaatttacccaaacccgagacccggaattccgccctaaaacttcgaatttggttacaccttgcttggtttcttccattaaatttgtgttcattttcatgtgaatttactcccccaaaagttattttctcgaaaaatcttacacccccacaaattaaaaaaaagcaaaaagtatcccaagccgaggtcagtagcccctttgaatgctcttcctattgactctaga

SEQ ID NO: 11056 - DNA, 3867 bp, Heterodera glycines
  unsure (1)..(3867): unsure at all n locations
cgacgatttgcacagtgagtggggagaaattggtttgctaagtgatgagttaagattagaaaacggttcnaatcnggattttatacacccataaaaaaaatacgcttcccacatttgtgcctgtgcccttctatttttttttcaatttttattaacatcatgtaccatattaaaattaaaaaagttaaaaaagtcttaatctactttcactttaaaatagagtttatttgaattagcagatgccagtcacttttcacaaccgactccggcgaatgcgatggctgccagtgccagcgcgggttacgatattccgcagcgtttgaaaacgctccacaatttggtaagtttgtctgctattctctgttcttgactatttaactgttaattaggtcattcaatacgctgcccaggggcgttacgaagttgccgttccgttgtgcaagcaggccctggaggacctggagaagaacaacggccacgaccaccccgacgttgccaccatgctgaacattctcgcattggtttatcggtttgtcccgcggttctttctgtacgctatgtttcccattcagtgaccagcgcaagtacaaagaggctgccgccctcctcaacgaggccttggccattcgcgagcgatgcctcggcgaggaccacccggcggttgccgcaactctgaacaatttggccgtcctttatgggaagaggggcaagtacaaagaggcggagccactttgcaagagagcgttggaaatccgagagaaagttttgggcaacgaccatcccgacgtggccaaacagctgaacaacctggccttgatttgtcaaaaccaggcaattatcaacaactgaatcacccattcattgtccatttttagggaatgtacgatgaagttgaaaaatattatcgtcgagcgctggaaatttacgagtcgaaattgggaccggacgattcgaatgtggcgaagacaaagaacaatctttcgtcggcatttctgaagcaaggcaaatacaaggtaaacagtcaaaagtgggaaaagggcgagcagtctcttaattttgcaaattttggtgatttgttaaattaaggaggcggaaatgttgtacaaacaaattctgacacgggcgcacgaacgacagtacggccgagtgaccgatgagaacaaaccgatttggatgatagcggaagaccgggaggacagtaaacaagcggacagcggaatttaccacgagaatttgcaagtgtcgatgaaagttgacaagtgagtgatgcaataagacacgtgaatgttttgacgcttccctcagaattcggtcccaaaattagatcctaaaatatgttctttattgcaaaactcctttttaagtccaactgtgacgacaactttgaagaacctcggcgctctttatcggcgccaggggaaatatcaggcggcagatacgctggacgatgctgcacttcgtgcgaagaaacaggtaacgataaataattaactctgtgggtggaacagtcgtaaaaaacaaatatgattgttgtcgtcaggggctttaataatgttgttgttgcacacagcaaagacaacaacccaaagcaacacagccctatcccgaagacaatttttatttcaaattaataaggcgaagacaaaatcaatagggaaaactgccgattgcataaaactaacaactaactaacacaaaatcacaaccaaaaatgacacaaaatcaaataacaaaacgtcaaaatctattttaaatctaaatattatcacagaacaatatcctaaatagtgccgatgactcttctcaccaaaaaaaagtataattggaaaacgtttttctattcagaatgaattatcataaaatgaaaatgcaattgttgaatcctatgcataagcctgatcggtctttttgctcgattaagagttgggtacatgccttaattcttaattagcatctttttactattaaaagtcgataaaaatgctttagtcggtgggtgaaatccgacaggaagaccgattcagtaaattgttggctctgaaggagttttccgattcgtgaggtgaggacggaatgaatggattgaataatgcgctgttgtgttttgtgttgctgctttgtttttgcttttgtcggtcccttgttggtccgtgtttttctccttttttgagggtttctccgaaaggccatcggtccttccataaagcgaatgtcattaatttgccatttgtgtttgtctgtcgcttttagcctgggcctcacccgtcagtccagcaaagtggcgccgccggcgatgacgatgcccaactgctggccgggggcgatcaaatgagccagtcgctaattacttctgtgtctatgaccccgtcccaatcgtcgaacaaattgaagaatcgtctgctgaatgtgctcggtttctccggagaaggcgctggtggggcaccacaacagtgactgacgacgacggattgataaggaactgatggacggacggacggagggcgagtggagggacggagtgactgacatttgtgtaacgatggactgaggcactcttattgagcttcgattctttattttctttacatattatcgttttctttgttttacttccattttcttcccttttttgccttccaatctctcgacggggtctctctttctctctcttcatcattctctccctaccagaatttaatcaaactttctttttgatggatattgtttttcttttatgtatgactgtaaatctatttttctttttctttgtgttgtgctgttttcgttattagactttttcaaaatgactttggcattttcagttctcttctgtcttccctttcgatcgtcaacttttaaatgaagcattctgtggttatggctaagaccgcccaaattgctcgaataaaacgaaaatccttcaatagcatttgtgtggtttcttctgacttgataaaaatgaaagtgtggtggtggtcccatttaatctggcggcggcacttttccctaattcaatttgcggccattccatgccaagggcttttcctccttaagccatatgaccacgctcccttcccttacagtttttcaaattgggcatttttattacgacaatgttttcgttcgtttcccttcccattattgtgtaaatcattccattacatagtcaaagagagaattgcttttggcatttcatttaatgggttgatgaatgatgccacggttattcttctgacagaaaaccccaaattcgctaacatcgcgatgaaagtgccctcctccgccgatggtttcctttccctccctttccgtctgtccatttttctgcttttgtttgtcgctgctttgccaaactttggtctttgtaagcccgagcacagtccgtatgaaactgttctcatcgatgaccccgccgagaaatccgcgggcatttattttcggatcagtcaaagaggtcagtctcaacagatgaaaagggaggaggttaagtcggtcggtaggaaaggccaggggacggacccatggactttcccttgtgaatttggctttatttgggccaaagctttttcctcaatgagttcgtcgacatttcaattcacccgcctttccaaaaatcaaaattaatgcggcataaatatgcataatttaaaacacaaaagtcatcgtatttgggttttgcccccgggcgccttcgcaatgccccaattttatttttgaattcgtttacattttgtcatgactaacaacaattaggcgtcgattatctggcggaattggcttccgacggtctccctagcattttggtgagttcgtccgaaatccgtacgattgctcccccccccccccccaaagcatcggatggttctg

SEQ ID NO: 11057 - DNA, 1612 bp, Heterodera glycines
  unsure (1)..(1612): unsure at all n locations
cccccccccccccccccccccctccatctttttagtctcgcgcgcnttgtcgatggaatgcgtcgtttgcttggaggcgatgtgagtgcgtgtccggcgcaagacaagtgcacaaattgtgtcccgcacgaggacagcttcgtgtcgcggtcggtcggccttctcccccggcacaaaccaatgctctttctctccaaattcacagattaaaccncacttcnggcattctcgcttgtacagtgacgtgctgttaacaggcgtggacttcaaggtgtacaagggcggtatggacggcattatggcgggtgccattcgaaaaatggtctcttttctcatcccacgcgctatttggcccaaaatccagcaaaggcttcgtttggtcgtcaattacaaaggcatgccgacaattccttttgcccaatctttgctgttctgaatgctctccgcaggtgtccaaatcccgcgtctctgctccgtcgagttcaatcacctccacttggattatattgcccacgcggcaattatcagcggggattttgacgtcgatttgcccctttttatccgttccttcaaggaatttatggacgagaagcaaagacggacaaaaacgcgcagagaattgctcactcagttcagatacctttgaaagaatgagggacaaaacaaaagagaaaaacggggcgaaagaaacgaaaaacttttggaaaacgaaaggccaaatgcattttcaaaagaaaaaaccacaaaaaagaattttggcagttttttaatcaattaaactaaatttattgtatggaaaacataacaaatgccattttttgtatttggtacgataaaaaaggaagtgaaatgaaagagaagtgatatgtggagggttgttctgctgttctcattgtcagtatgagcctcggaccggctgactgtgctgtaaaatcactctccgttgggttgtgctaaatgctcataatttgaccaaattcggcaatgaatgagtggcaaatgccaaactcacaggtcgcgtcgcataaacacaacaacggcgtcgatgacaaagagaagggcacaaaggaagtaaaaggccttgggggcgaaagagattagcagaggcaattagcaaatggggggtcattatcgactcaacgcactgctgccacggcccatcccttgacgatgaaaccaacttcgcagccttaaaaagccgaattaatggacgacagaccagaaagcgatcaataagttcagcttccgcctgctctgacccggcagtccgacgcatccgctgactaaattaagccaagccataaaattaatggatgatcccaaatacaaacatgtgccggcgccgatttgtcggatgaaagttggcatgtgatctttgtgagaagaatggcaccaaaaaaaacaaaaaagcataacctaccaaatcctgtggcgtaccaagtctaaacgtgggggggggggaaacgtaagtacgacgaaccctaaaaaagcaatgccatttgagtgtatatactgacttcaaatgcgccaaagacaaggaaagcaatcactccgacgccagaggcaatgatttgctgaaagaaaagttggagatttaaaaccgtaatgaaaa

SEQ ID NO: 11058 - DNA, 1305 bp, Heterodera glycines
gtaataattacgtttgcgatttttaggcaaatgcctaagatttttgcgcacttaatacgtgtaaataagcatgaaaaacgcattttccgcttggtttggggtgtctacgatgattttataatgcctaactttgcctatttcggggttttcgtgcctaaggtgcctattttaagatttttgaaaaaatctttaacaaaaatgcaataaaaacggaaaatacacccctaagaaatggcccgaaacatttttcggaaaatacacccctaagaattgaaaatttttcacaaaaattgatccacaaaatttaatatttttctcttaaaaaaatatttggtttttaaatttgtctttattcgaaaaaagttttaaataatttcatttacttttgaaaattttaaaattttatatgttttgctacctaaaaagcgttaataaaaaaaaattttgcctatttttatgcctatttggtgcctatttcgtgatttttttttctgcctttttagttgcctatttcgcgattttgtgtgcctaaaaatcgcatccctagtaatttgtcaatttgattccattccaagagcatggaacgccttgaggcggtggtgcacgaacggaacgacgcctttttgcagttggagacgggcgacagcgcgtcgcccccgaaaaggacggtcacttccttcatgggattcacctacgagtgagaaatgcttaaaaaccaaattaatatatggcattttttcctcaaaaacctttaaatttgttaaatattatattttgagttttcctgttttgaaggcgtgcaactgcatttcgtaaaaaccgccaaagggttctaaacaaaaaatatgtaacaaataaaaattcataacttggcccaagttaaaccaaattaatatttcatggtatcttttaatagctatgggtgtattctttcagaatataatattacaaaatttttatcttaagtataaaaaaagttataaatcattgaacattctaggttttttgctttggtcaagcatatataattttataaacacaatgttttaaatctataaaatgcaattgagccaaattaatttatgtattcgatagctctaagaattctctatttacctttaaaatttcagaaaatttaattgaatttcaaaaaagttctgtacaaaaaattctgaatgaaatattaatttagttgaacttgggccaagttatgaatttttatttgttacatcttttttgttcagcacccattgggcggttacgaaacgcgcatgggtggcggtttttacgaaatgcactagcacc

SEQ ID NO: 11059 - DNA, 2398 bp, Heterodera glycines
ctttttgcacttggagacgggcgacagcgcgtcgcccctttaacggacggtcacttccttcatgggcttcacctacgagtgagaaaaattttaaaaaatggcattttaattttccatatataaaatatccattttttgaagcctatgaatgtgtgaaataatcatattttgagtttccaacaaacaaacaaatgcacatttccttctgattgtatgccaaattttttggccataactttttttaaacatgccaaattggcattattcgaaagcatttcaaaaagtctattaatcaattaaaaaatcaggtatttgaaccaaccttataactttttagagttatttaatggctttccactcgcttaaaaatagcttctatttatatatggagctttaaaattatgccacttaattaaaatttatgtaattttttgtaaaaagttttggcccggaaaccttgcttttccctcctaaatgtactccctctaattgcatttgtcatcagtgaatacgcaactgaacattatcttccggccgaggccaccggggagaagcagtacgagcagccaatgctggacgaccaggcccatctgatgcaagtgttgtggcgagagaaggagcagctgaagaaggaggtggcactgatggacgagtatttgtacatggacccggagcgggacgaacgcaacgatatgatgtgagaaggtcggggggggggcggcacaaaagccaattccaatttgctctctctgttgttcatccttttcttgttagctgatcactgatcacccatttgggtgttattttttctgatcacttctcccaattcatccgcacagtttgacacgtccaaagcgtcgctactacgaccgggtggaggacttgccgcagaatgttgttgcccggtggcgcaaggagcgcgaacagttccaaccaccgaccgacccatatgctggaaaagaggacgaagaatgagcacggagcggataggatgatgattaatgatcatgaagatggtgttgaacaacatataattaatgaatgcaaatgataaaaataaatatgccacaaaatttaatttttcaaattgttcaattgatggacaagttaattcttatccattttatttttgttcatttccgatgtatttttcgttttgttaattttaaaatatgtaggaaggatgaatgaggagcaaaaagctaagatgtcttgcccattctgcgcttatttattcagaaaaagagagagaattcaaatccgggccctaaaacagataccattttctcaactcagaaatggctatcattatcaattattgaacattggcatccttttgattgtatttttacagttaaataccgtatcccatttctaccctaccatatttttggttggcattcttttacttgttttttaaagttagatactgtatcccatttataccctaccatattttctggggccgattttgttggtttttttctagacaaaattgattgtgacttcaactagttcaaaaaccgtattttgcttttgccccctcactatacattaatgtcctccacaattgctcccgtttcttccgccgatggcaccgctgggagtgccgccgccgtcgccagcgctgggccctcctccgtcgagccgatgccgccggtggagcagctgatggagggcattgaggagaagtgcccgccctcgttggaccagcgactgaacgccatggacgaggtggacatgcgcatcgacgacctgctcaccgtggtggccgaagtgatggccggtctggacaaggacaagccggtgggtgccgggagaagcaaaagcggcgaggacggcacagttgcccaattgtcctggcacaaaaagcgtcatctaccaattctcttggctctgcctggaaaagttgaaattcctctaaattttcaaggaatttcctctttttctccctctcacttattttcagtcctttctcctcttattgcctctaatgaattgttgctttgttaccgtggtcaatttgctcaaaatgaaccatttgcatttattttttgattaaattcgttgtgaccagagcagatcataacccaaaacaagcatataaaatttaattgagaatgatcaagaattatgccgtcatgtgcttatgtacgataatttggcatcattctttgattttaaaaatttgatcagcgtgagtgattgattgatcaatttatgaaattagtgtggcccggttaatttaaaattttatataaaattaattcgaatgctcatacttctcgaccattgatcactgatcattagggccgctacttttagtgatttaactattttttctgctcaattgttttgaagaaaggagctcaaaaacgcatttctgcgttaaattttt

SEQ ID NO: 11060 - DNA, 3334 bp, Heterodera glycines
cccgattgagtagtgatcaacaaaattttaacaaaaaaagaccaaattttctctttatatgctcgaaatcttccttttttcactttaatcatctgattctaattcattcgttggcgccagtaaaagtgcgtccaatttggcattttatacaaggcatcccaggccccaaaaattttcagaaatcgaattccgaggctcaattttaacctaaaaaatttgacaattttagtggtgcgcttttcaaaaacttttggaaacttggggcgggaatgaggtccggcggtgaagacaggcgccgtcgagaaaatttttgaaaatgagtataatttgttaagagaattttgtccaaaaattgtcaaattttgtgattttcaagccaattattggtaaaaaaaaaatttggagttttgggaggccggcggtgccgataggcgccgccgaaagtttttcggaattttaggaatttttaattaattttattaagaaaattgtacaaatttaaaaattttcaagagtccccaattccccgagttagtgtcggggggtcgggggataaaaagtcggaggtagggggctcggggagcaaccctattataaacccccaaaataggtgctaaaaatggaaacgagataaatattttaaaaatcaaaaatgtagtcaagtaaataaataaataaattttgaatatgaatttttgataaaattttccatttctcaggggtgtatttttagttttattgcatttttgttaataatttttttcaaaatagcagaaaatattttacaaaaaattcttcaaaatgaaaaagagcacaaaaaaagcaataaatttattattattacaggttatatcgctccaatttgattcggtttttataaaagtcggtcggttgtttcggttttttgattatttcggtcggtcggtttcggttaaaaacccgaaaaaaaccgaaaaagtcaaaaatttctcggtcggtttttttcggccaaaaaccgaaaccgaaaaataccgaaaaaaaccgaaaaaaaaccgaccggtccgatctctatttgtatccatattttctcattaagaaatgcaattttttctaagcataaacaatatagtaatcccttaaacattatattgttagtctatgaccgtaataattattaaattgataaatctaattttgatttcaccgtttgtgttggcgatctgttgtcgtgccactgttccgcctgtttttgcaagcatttgtgatgatgagcagtacccgcaggtcaacggacattgcgcagccatcaaactgacccattttgggtcagtacagcgatgggcatttgtaggacagtccgatggacggcccggcacattcaaatcacggcatccggaatttactttaggtagatcaagagtaaaatcttaagcagtactggaacggactccggcgtgtttttatggatccatgatcagggctgcacgcaattgcggattgcggattgcggattacggaaattgcggggtttttggacccccgtaattgcggattgcgggttgcggatttttgggatttatccgcaattttgatccgtaatttgactattggattatttttcgagacgatttcttgtaagattattttttataaaatgaatttttttctatttttatttaaagaaaatatgtacatttgtttaaattcttatttctttagcaatttaaaaatgtcaaacttaaagaaaatcttgcaaaacttttgtttcttcatcacaatttgcttttaaccggtttctcaattgaatgattttgcttttataaatttgctttttaatatgcttttaaattgctttaaaagatttataggattttttaaaataaaatttaaaattattaaaaaaaaaatttttttaattgcggattgcggattacggaaattacggaaattgcggggtttttggacacccgtaattgcggattgcggatttccgcaactgagaaaatcgccgcaattgcggattgcggatttccgtaattgtaaatccacttgcgtgcagccctggtcggaatggcttgggtttaaaattttgtataaaaaaaaatgccttggcataacgtctaccagtctattcaattaaaaaattttcagttaaaactgcttggagttttcttgtctacaaatcctttattctaatgatagattcttcctacatatgcctagctaacggtctctgaccagtagggaagtgccgagagtctcctcggttcttccatttctgatcacctcactgatcaaatgaagttttttgctttcaaatttggcagcaaaatattttggcataacgtctatcaatcttcaaaatgcaaaatttttcaaaacttccaactgatcacctctgatcagaaaatgaatgtttttttgatcgatcgcttttcccaacctgtttcagctcaatgcattgcttctgctcgtcccaatgggacaaataatcggcacgttggacactgagcgccaacggttggtgcactccttcgtcatggatttgctgcgcaatttccacgcatcgtttgatgtacgggtcgcccttgaaaatttcaaaattttcgattttttccgaaaacttaatagaaaatggcaaaattttgaattttttggcataaaaccgctataaatttctgctttttcgctccggcattgaaatttttgaaaaataagctggagaaaaagaattttttggccctaagcagggttcttcttccctccgaaattttttaattttgctacgggcctgattaggacagtataccgtaatccgtacactgtaccttgatcacgtctttgtacgtctcgagcaggaactcgtggtcacaggagatgcggaagtacagttcgttcagtgtttcctgcacctcaaatgcttttgtgtacagactgagcgggaacggcgagggcattagtgccaacggcggtgtcgtcgcaatgtccgattcgaatttgtgctccacggtgcgcgcacaaagccctgagggggggggggatttcaggcttacggtattccctccgttatagccacgtccaaacaactagagcccctgagggcttttaaaactgtgaaaatggctaattatgtatacaaaaatggcattgcaactgccaaaataaaaattaaacctattgaataaaaaatgcaatggcttgaggcttcttcatcaagttttttgcattaaaaatagaaaattataaattaaaacaattcagaaactatactcaaattttgattttctaaaatcgcaaaaaatttataagaatacaaaattgggctaaaaaatgccaaaaaatataaaatgaggta

SEQ ID NO: 11061 - DNA, 525 bp, Heterodera glycines
aaaatacatttccgttttcaaaatggaatgctttttcttattgattttataataattattaaattattcataattttatttgtgaatttaaaattaaattattatattgtttagaaataccaatttgataattcttttaattaattaattaattaggaaaattccgttaattgattagagtggggggttccgtacccatcggtcgccggaccccaaaaagtcctaaaagtccgtccacctcctgctgtgggtacacaagcccagcggggacataagattttctgccatttccacgctaatacggtggggatgtgacgtaggggggaagttggccccctccgcagttgtgttgacaaaattgttgactctcgtctcaattgtgagtcccaaattttttggttttattatttttttataatggaactctcaatttgttgatggaccagtaatgataaatgcgcgattattagataaaattatttaaataatatgatttgattaattagttaaaatttatcaaaatca

SEQ ID NO: 11062 - DNA, 762 bp, Heterodera glycines
aaatgcgtttgaatttcacaacttttaccatcacatgcaacttgtgtttttatttttaacggcgagagggcgttgtgaaaaaactcagatactgtatccatttgcaatgtggacaacgcttttctatacaagaaactgggtttaaggtcatacagcgaccgccgtcgcctttatagaaagtggccataaaatcagttagtttaaagtgagaacagcaatttaatatcatattagagcgtcagatccgaaacttagtttccaaacaggtggaggaactctaatatataacatggtgggattacatacgcccctgaaagtttggttccgaagtcccacaggcacttgggtacccttcctttgtcaggggaaatccctaaaaaacaggtctagcaaaaaggtgcgtttaatcccataactctaggcagataatttgtagttttacccttagaatttttatatttctttaatttctctaattccgaaaatattttattgacaaaaatagtatacatcactattggaagccatttgaaacaactggatcactttccctttttatagtttaaaaaacgcatttctaaggggtccacctcgtttcggcgccagcccagtttttggactataacttttttctttttccaccaaatctaacattgttggtatcattagagagcccttccgatgctctattattttgcataattccaaaaaatttgatcaattttgaacaatagttatggccaaaagtacacatgcggcctg

SEQ ID NO: 11063 - DNA, 3651 bp, Heterodera glycines
tttcccactcacagctcggaatgttcccttgtaaggaattcaaaaagtgtgtgttctgacttggtttataaatgaaatcgtcacaaatacaaaaattataatacactcggctagtcaatcgtcgtcttttttcacattcttccgtttttctcatgcggttgtgactagttttgtttccgtgtccccctcttcacacacgcaccggttcaacttcaccaatggaatgtcgttgatgccacagttcaaagcgttttcagtcgttttcggagcttctggcgttgaacatcctccgccacagtcctccgtttcctcttcgccggtgcacgagtcggacgtgtacatgctggacgtgatgctcgaccgcgactcttcgtcctcctcgctgtacttccgcttcgtgccgctcttcttcttctctccaattgctaacaattcaatgctttgtttgatgcctccaattggcacaatcagtcgattctgctggaaaacattcagtattctcaacaggctgtccatgcccagcaaatatccatcgtcagtgctcgagtaaggttggtcgtccaaaaaaccgttaaaagtcgaatgagcaaagtcgatcattttgacagtaaccccttcgttggctttgcttttgtgcccgctgccgtcaaaggcaattagcaatgagctggagaagaagcgaaacccttccgcgttgagcagtgttttacgcaatttcaacaattcctttaaaattaaatgacgaaaataaaagacgattgtgtgtttatgcacttgcctcaataatacgcattgtccttgctcttgcagcaactttgaaaaagtgaaagagcgcattatgaactgcattctgtccatgcgtcgcccttcgtatttattcataaaacttaaatagttacaatgattgatataaataagtaattagaataattagaaataaggcaacatccgtcgaaaaaaagatttaaaattcccccgccacgcattactcacatatattctcccacttctcgatcaaacaattgcatccgaccaatcggacgccaatttctgaacttgtcgactgtcggcatttttgcgtttgcgttagtcgtttttgtgcgcttgcgtcgtcgccgtgctgacgagtgcctgaagcagaaataaaatgacagaaaatggcaaaatggcgaacccattttcaggtcgatcacacagggccggttgtatctgctgaccaaatcctcgaggagtatgaagcttctgtcgtgtcctttcagcaatttctgtacaatctgaaagcattttccgttgcattgttttttctaatcccaaaatcccacaaactttgctttgacattgccacgcccaattatttgcggtcaccgatttctccgcttccactcgaccgctttttacacgaaatgtcattgaatgcttccttttgccattcgcatttatagaggctgtagcaatacttttttgaaatgaacagccaattgaggtgggcaaatcagcgacattttccggtgggtgtcggtggcaattgacaatttgctctgtgctcatcattaaagtcccatcttcaacattttgattcaaacactgcactttgattttaccttaaaacatattaagaaattaggtgttaaagtgttaaatacttactgcacagttttgcagtgaatggtgccaacttcgcatccattcgagaataaaattcaaactctcggtgattgaaaggtttgcacacatggcccaagattgaaagaagtcccttaggaggaagcatagtgaaaattgaaataggcatttcaattggaatatttttacttacaaaatggccaccaacttgatgaggaaatccgaaaacttccatgttaacaagaaaaatagaggacacggctgaaaaaaaagaagtaatgtcgaaaaaatcgaggagacaaataaatgtacaaaacaatccaaaaagagtaaaaagatgtgtgtattttaaaaatatgaacaattcaaacagacagcgccagatgtgctgataaaatgagacggacgtgaataatattggtcggaaggggggagggattgactgaattaatttttgtgtttgtatttgtacatagtaagtcactaatgtgtatgtatagtgagacaccacaccacaatcagttgatttggagagagaaagcggcgcagcaaagggaggaatcatttattaattgcacgacaaaagaggggaaaatgtacgtggggaggggggaaagggaggggtgattgtatcgcaaaaaaacaggtcgaattaatgagaaccattgcaaatcggaaaggcaggcaaatgagcaatttccctaaaaatggacaaatgcagacgacagatatttttgaagcgggtcacaaggaatcggtcagttcattaattatgaaaatcaatttagatttttattgtaatgaaagaaaagaattgtatcctaaattgaatctgaccggaaatgaaattgccttattgttacataggtcgttccttaaataaaaataaaacatgtgtttgtatgagacgaatttcatttcaggaaagtgattgacaatgaaaaatgtgtgggtggggtgacatttgtgacacagaacaacggctttctcaatttttatctaaaaataaaaacagcggatcgaatttcactccacgtactgtaatgaccggatgattgtttctggatgatgatgagtgacgagagtgaagaataaaaaggagtaattgagaaaagaaaggcatgtgaggaattcacagacaattcacagcaaaaaggcattgtctgtttggtggtcacatttcactctcttggagaatgaaagtcataagttcaatgccttggggcttaacaaaagctaagaaaaggaacggacgggcgtatggccatggcaaaacattggaatggcagagaagagggaaggacggagggagggcattggctggttactcactcgctctcttattccttcgtcaccctttttctatttgatggaggcggcagtctctctgctgttcttcgacaatcgataagctcagcaaaatttgagagagtaaaaatgcactgaacttttgaagttttcggctaataatgtaataaaaagcgtgcgctcattctccactaaatggtcagctctttgcgcagttcgcagcttgaagttttggttgagcgtcgcgaatggcaccgcgtcaacgtgtcactcgaggagaccgcgttggtcctttctccgctcggcgatggttttgtcgatttaggcgcgacttcgatagaattgactggtacgaacaattaattaaagttaattaggtaattaaccaagcaaaattaatggataaatcgttttgtgtattccttcgcagatgcactcgcccccaatattggaacatggaatccaaatcccgagaaacgttttgtgcgcattctcaagcaggagaaccaggggttggggataagcattcagggaggcgcggaggggggacgacccattgtgatcaggtgtgttgtgttttcgggaaccgcccagttcggcgccgaccctttcggcgccgttgctaataacttttctcattatcaaccaaattaaatattttcggttccattcgatagctcttaacgttctctattagcctgcaaaatttcaaaaaacttt

SEQ ID NO: 11064 - DNA, 3036 bp, Heterodera glycines
tttccggcctatgccatcgtcgccatcgctttgaacgtgccgaaaagtggtggcggcaaattttgtcagttaatcaacgaatttgccaatggcaagcagtgccaaatgtggcggcatttcctttgacgctaaaatttgaatttgtaaacaataagctatggataatactcacttttgaaaattttagtaataaaacagtcatttgatatttaatttaaatattttcttaattcaatttaattacttttcaaattttccttttaatttataatagaaattttttgaaattttattaattaataaacttgtattatttaatagatttataattctgttaattgttttttcaaattttccatttttgattcaataattttttttaatttttattttatccaatccgtgcactttcaattgttttattattgttcaaacaccaaacaaaagcagcacactttaagtggtttgtaaaattgagttaaaaaacacagacaaaaaatacaaagctacaaaaaacgtgtgaaatttggtattgcaaaaaaagcacgcaaaaagtgaatattacaacggtgtatttcggcattttttcattgtgttttccgtcaaatccacattgagtaatgacgtgacaattcatccgcagcagcagcaacgtttggcaaaagtggcccaacaaatggtgccgacgccataggcgtgtgctcacgtttttgacggatctgcaaaaattgcgtgttaattgaaattagccacactaattgggtttaattgatgcacattaccgcagtggccggatatgagccaccagtgcggggcaatgcgaccacattattgggagttcctccgcttaaaaaaaaataaaaatttgttgagtcattaaaaagtaattaatttttaaatataaattttaatacttttttttaaatttatttaacggataaaaaataaggataaatgacgctagcaatgaaaacttgtttctgaggtttataaatctgacatctattttaaccaatttcgacttcctgacctagatttaacaaaaaatttaaacgaaaaatttgagttttcggttattgttcgagttcgggttcgggatcagaaaattgatcaaatttggtgtaagattcctgatcaggcaccctaaaaaccctctagaacaggttttcacgaatttttatataaaaaaataatttggtaaatcaaaaggaataaaattcaaaatacccactttccaaagagcgccgaataaacttaaaaaacacaatgacacttaaaaattaattaccctccatttgaatttgatgaagattggtcctgttggtaatttgttgcttcggactaaaataaattaaaaataatttatattataaattttaatttttcaaattgcctgatccttattcaacacttgatccacatttttgaccgttccatatgctaacaaataccttaaatataattgaattgtttttttaattttttttatcaaaaaataatttaaaaacaaatggtttttgcaatatttccaattaattttaaagaacctttgtaatgtaaaatatttatttagtatttaagtaattagatctaaaattattgaattttttaaaattaaatttaaaatttactttccgccctttccattttctgttctgctgttatcaggggggatggatgggccccgggggcgggggattcatcggcgtttaccgatcgacgacgaaaacggctgcgacgaagcattggccattccctcgtcctccgtccccccagcatacataaatttcatctttttttgaataaaaagcaaaaaatagtctgtttttcatacagaaaacataggggggggggggcattaaatgaagtattttcgtgttaaaaatgtgtttctcttttctcattgaattaaaagccgcagaaaaaataactaaaaacttaaaaatccccaccctactcatcaatttcaattattttttgagccgtgggcggtcaaaaatccatgagtaggactaattcaaacagtgtcagtctgtttagttgttattcttcttcatttttcatatctttgatgaacctaatcaatgttaagatttttaatgattataaataaaaaaaatcaatgtttatctttaagtagtgattttttgaaatttttcacttcgttattttcgtcgttgggtttttagtaatcttattgatattagtgaaattgaaatgaaaaatattatttttgctgagcggcgcaaatgtccatttttgctaggcggagcaaatgtccatttttgctaggcggagcaaatgtccatttttgctgagcggcgcaaatgtccatttttactaggcggagcaaatgtcgcggcgcaaatggagcgacgcaagtgtcgactttgctgagcggcgcaaatgtccatttttgctgagcggcgcaaatgtccatttttgctgagcggcgcaaatgtccatttttgctaggcggagcaaatgtcgcggcgcaaatggagcggcgcaagtgtcgcatcacggttttatccacccacaaagtaaattattgatcagtgaaatattgatgaatataaacaatgagagtaatatgcataaaatgatgacgctatgcaggtacaaaattgattcatatacacatttgtgattgcatatcaggtaaaatattgatgttattttccttaaataagaattcacataaataaagagcaataagcactgaaaccccactatttctaattcaaaatctttattaaaatttataataattaggggtataatttgtatgcttatgattaggaagctgattcttaaacaggggcgtccctattttggcatttcggtcctatttcggcatttttgagaaacttatcaaaaatgctatacaaaatgcactcatcaggaatggacttcgaaaatttttaaaaaatctggaaagtaataaaaattttcaagatttttggacaaaaaaaaacaaattatcacatttttatctatttaaaaagttgaagtttttggcgctaattaatgata

SEQ ID NO: 11065 - DNA, 1223 bp, Heterodera glycines
  unsure (1)..(1223): unsure at all n locations
cgtttaaatgtaaaggggcgttgctttcattcatcagctacatcattagggatgccaaaaatatggatataaaatcgcaaaatatggccataaaatatggaccaaaaatcgcgaaatatggacataaaatggcaaaatctcaaaatatggacataaatggcaaaaatgtcaaaatatggacataaatttttcaaaattgagtgcaaaatttcttcaaatttattggttgaaattgcatatgagatacatttccaaattttttgactcggtaaggcgctttgacaaagacggctttcgttttggcaattagtcggtcaacattcggaaattggtctcgaattttttcggcaattctgtgcaatcattttagaagaaaaaaaacatgaaagctaaaatttatcaatttttttagcgtaaaatcaacaacaaaagcgaaattttcgcttttgtgcttatttttgacataaatttattaatttttaagaaaatttaaatttattcaatattctcgtgaaatttcggcgaaaaaatgattttttgaaaaatttttcggtttttgggctcaaaaaggctaatttagctgctgggggccgttctaatggaaatttttttgaaaaatgccaaaatatggaaaaatatgggcataaatcgcgaaatatggaaaaatatggatatggaaacccatcctagaagcttcaaaccaagctaaaaacatgtttttcgtgcgtttcaggccctcaacagtccaggaaaaaaatatggatatccatatgattggcatccctatacatcatccattccactcaacgcgtcaacggtccgtttgtggccagcaagccaaacatggtcataaattgagtgctggttggagaatttgcacgcgtcgcgcaggtggtcaatcagtgcgccgcggggctcaatttgaacacgaagacgtgcagcaggggcgacgacggcaccgcccgacgtggcgccatgttgtgaagtgccaaaaaagcgacgctattcaattgggggggnggggagggagtgggtagattatggtgcaaaggacagcacagagaggagctacagtatagagctgacatcgcaattgtcatgcgttttgtgctcgcaagatctaagcaagcttacgtcattgtcgacagcttcccgtgagcccagatttatgaatcaccaatgtcctgatttgtacagtccaaaattcgaacttgaacaaatgc

SEQ ID NO: 11066 - DNA, 1291 bp, Heterodera glycines
attggactataactcgtcaatttaagtgggggattttgggctctaatggaactgaaaattgcaaaaattagatggggtgcgtccctttgtaaggaattccctcgtcgtctaacccgccccttttcatgcactatttcagggtctaaaaaatgaaaaaaaacaaatgatttttttgttaaaaatcatagaaacttttcagcttttaaattttaaacccgcacgattccgcgattcgaaaacgaacgaaaattttgacttgaaaatttcaaacatttgcctccaccttcttttaagtcccacccgagggcgagacagttccaaaatttgggtgccacataaatgtggatgtaatagtaccttaattggactatcactagtcaatttaggtgggggattttgggctctaatggaactgaaaattgcaaaaattagatggggtgcgtccctttgtaaggaattccctcgtcgtctaacccgccccttttcatgcactatttcagggtctaaaaaatgaaaaaaaaacaaatgattttttttgttaaaaatcatagaaacttttcggcttttaaattttaaacccgcacgattccgcgagcgattcgaaaacgaacgaaaattttgacttgaaaatttcaaacatttgcctccaccttcttttaagtcccacccgagggcgagacagttccaaaatttggatgccacataaatgtggatgtaatagtaccttaattggactatcactagtcaatttaggtgggggattttgggctctaatggaactgaaaattgcaaaaattagatggggtgcgtccctttgtaaggaattccctcgtcgtctaacccgccccttttcatgcactatttcagggtctaaaaaatgaaaaaaaaaacaaatgatttttttgttaaaaatcatagaaacttttcagcttttaaattttaaacccgcacgattccgcgattcaaaaccgtgaaaaaaagcgagaaaactattgcattatatttaagaacgaaaattttgacttgaaaatttcaaacatttgcctccaccttcttttaagtcccacccgagggcgagacagttacaaaatttgggtgccacataaatgtggatgtaatagtaccttaattggactatcaccagtcaatttaggtgggggattttgggctctaatggaactgaaaattgcaaaaattagatggggtgcgtccctttgtaaggaattccctcgtcgtctaacccgccccttttcatgcactatttcagggtctaaaaaatgaaaaaaaaaca

SEQ ID NO: 11067 - DNA, 4039 bp, Heterodera glycines
tttcaaagtatgaaattcagtttttgaattagtataacccgcccgattcccggcattaccggtcggtagcccaccaatttcgtattagaaatatcactcaaaattgggttattttacgttacagctaaaaatttatttataaaaattgcaaattttaatttcgcgagaacggatggtcggtcattgctgcaatttttgagggtttgagttttattcacaatttattgcgtgtgagaaagatggtagaaaagatagactaaaaagttacccaatttttaaaaaagtttgtgagatggtcgactgactcaccgggtcaaaacggctgtcacggaaggcactgaaaaagcgagaaacaaagaattattcgtattttcattcattttatagtatagaccggacggacttaaccatattaaatcaaaaatcatctacaaccgtcgctagggccatttttgggccgggaatcttggtattatattatagccgcggcagagacatcttttaaaaattagttaataaacctgcccatttttcaaattttgccaaaataacttttttgtccctcataaatcagtccgctccctaaacacagcgccgccggtttaacctgatttgagcgtattcgttgagcccctcatgaagcggcaagttccgactgaacgtgccgatgcatccgcgcaactgtcgcgcgtggccctttttccatgtgacaaaaagcgggaaacattcgttgggaatggtcggcggacatttgggcgacggccgtttgttcagacgggcaagtatctgtgcagcaaattgcagacattacacatcaatgttcggtgtaaaattcgaaaattttgatgaaaaacagccaaaatttcgaaagatcgagtttgatttcgtgaattatgaaaatttctctgggcgatggtaaagttttgtggttcttcgaaaaataaaattaaaaatttaaataagccgcggccaagcgggctcgaaccccggaccccgtctcatatgaccacaactatgtagttgatacataagtaaattcaaaaaatcatagaaaattaaatatttgacttctccaggccttttatagcttattcgaaagctctttttgttctctacaacatttgtgtatgagttttttacgcccgattaattttcttaaaattttttgaaaaagtcaggtacttgatgaataatcatagataaaatcaatgattttgcaaaatctgagctcagattcgtgatcagcgtatttttttagcgtagaaaaggcacttccaaaatttttaattctatttttcgaagaaaccacaatactttaccattgccttcctttctcgtctctgcgaattttataggccaattgcgcataattaaggctatcaaatgatatcaagaatgttcaattttgcctgttctaaattgagttatgaacaattaaaatatccgattttttttttggcattttcaactatttttttactctcatttttcaccaaattttcccatgcccccgtaccacgtcaaaacaataaacggccaattccatggaacagacgctctcatttttggtggtgtccaaatcaatggcgccactggtgaagcaaatgttcgggcaagccatggcgccaatttttagtgttttgttgaattgcctccaaaattgtaaaagttggacaagtttgttcctgcaactaacaggctgaaaatagaaattcaaatttattttttaattaaatttttttttataataatggtaacaaattagagttcggcctggtctccaacatggaatccaggtccaggcttttttcaaaatgccgagctcttttgaaaacccgaaaatttaaggactgatttggagattgaactacaaaagacaaaaaaaaattatattggcgatctattttataattcaaatataaaacaaagactaaatttgcattttctttgacgagtcactgccttttcgcttgttttgcatggattaaaaagctctttgaaaagaatattttaaatgatcaaattgcgattttggcaaattttttgggatttttaatgaagtttgaaaattttgattttttttcaagatccaaggacgtccttggcatccaagtaagaatcccagcccgtgtttaaactgaagagttaattgaataagggaagaacattaaaaaaacaataaaattggtttataacagatatacaatagaacacatgcaaatatagggaatattaaaaattttattaaaataaaattattaaaacaatttttgcatcatttaaccgaacattagtattattattattattatttatttttccatcttatggccatggcgaagatttccttctcatcattgtcagctgtgtcctcctcatccattttttgtcgtttttcctgcgcaaaagcgccgtcttttttgctgccgatggcatggcacaacaatggaattgccctccggcggacaccgtcgtactttcgggcactgctacagtttcctcctcatctgccaatgtcattaccgtcgtgctgttgctcatactgtagtggtgatgcttttgtcgtcgtccgcttttgccgccgtcgccgtcaatttcggcaaaatgttcttgacaataatgatgccccgtgatgatcgtggtcgtcccgtcatagtagtcagttttggtgccattgccatccccgccgctggtgatggcccaacatgcgaagccaccccggtggatgatggacacgtaatagaaaagggcaaagccagccaaggacagtgccaacgcgacgaacacggcacaggaggcgaccagaagctgaacgatgaacgaaattttttggtcaagaaatgtgcaacatagaacagggaagatattgcgtctatgccgatcagggatgccggtcatgacccaatgtcgaaaacccggctttttcccgaccagatcgaattttttcttggcccgcaacagccctaatgcccatgttattgggacccatccgagtcagagttgggtccacgaatgccaccggcggagaggcgcctggaagtggaggtccgcagtttcgaaatgcggcttcttttaggccaaataaattgcgccttgtacaaaatcaaaatacgttccgaatcgcgtgccgcccggcccctcagggcgtggcaaccaaacaatgatggcaacaaagtgttcaacagtcggaagcactcaccaagaatgattggctcatcgtctgttgttgccgatgctgctgtgccgtggtggcgaaatgttcgcttcgccgccaccactgtggtaagtcatcgtcgccaccatcatcatgatcagcatcagcagcaatgccaagccctcctctctgatcactgttgccattgtcttgtcctccgatcagttcatcaattgaaccgtcattttctccgatcagcccttcataggcattttctgctgatccttctacatcatcgagcagcgtgtcatcaatctcacgacgatattttggcaacctataaggacaatgtctcatttagaaagcgttaatccgttcatataattttctattaatcgaaaacaaaaaagtaccaaaaaaaagttttaaaaaaatcgtattttccacccaaaatatttccaaaaatctatgggaaatctgaaccggtattgtccattatactctgatttagtgtgcctttctccctacccgtgccgctgctgttcatgttgttgctgttgcattgtcattagcagccgcaaattgtgccgccaccgttggtgccgttgttgcccctcaagcattgggccgtcaatgtcgaaaaagtattgttgctggtgccgttgttgttgcttttcggctgattgttgttctacaggaactgctctaacttgatgacggtgatggtgacgagcagaagcaaaagcaacaaaattgagcagcactccggtgaaaattgttgcggccaaaataaaacggcaaatcatttgggggcccatcaaaaagatttttgccatatgtaatttgctaaattgattttaaaaaaattatttgtaacaaaatgac

SEQ ID NO: 11068 - DNA, 2466 bp, Heterodera glycines
gtcgccacttatgcagaaagacgccgagtcaatgtcgcggacaacgggcacaatgtggtcaatgacgtcggcagcgttcatcgatcggccgacagactaaaatattttttggaaattgttttgtaaaaaataaattcgacctgaaaggtccgtagcgatgcgttgcgcaccaaaagcgaagcggcctcagccccgtccagcaaatgctcggaggaataaatgtcggcatctgaggctttccttgcccaaaatacgaagtgccgtcgcgccgctgagaatgtcgccttggccaccgcaacggcgcatcgaagtttccgcttggacaattcgcgtttgggcggcggaaccgttggagattatgtcaatctctcctaaagtgccaatgacaattgttattgaatacaaactcatatttttcggttgcgtttctgtgccaccgaccctttctcatcacagtcacttccaaatgctttgccaattgttccgccatttcgcattgaattttcaatttgtcagtttcctctcccttctgctggttagggaacatttgggtataaagccgaacaaattcttaagaaatatgcattttgtttgctttgcttttggggtgcgttttgcctctgtggtttggcgtaatgatcactttgtctgtgcaccctttgaacagttgcgaacattctttgacgaagaacagaccgtccgcgtcaatgaccaaacaaagcttaaaaagcaaagaaaatgatgattgtatctcaataattagatggatttagattggaggggaattacattttgtttgctcctgacgaaatttacgacgtccgccagcaaattttgtgtgtgtttctgtcggccaagccccggcccgaacaccagcgcgtccaaccgctcaatgctgtgtctattcgtggcgaaatcggcgctggggtaaacctattaaggagggcaattagcaaacccaaccccaattagttaactagtcataatgaaaacccacgatcagttccggactgtaacttttgatcaccggagcagcgtcggaatgggcgtaaacaaaggccaaatcggcaccgattttcattggggtgatcgaagcgaaataaggcgcacctaacggggaaaagccataaaaatgcattcatttctctgcaatatgccaccggtgtagtcgggcgaaccgccgatcactccgattttgccacagtcgcccttgcgaaggtgtttgttcggcttcttcgccccgcacaatttctttgggcttcgctttcgaacagcaaaagcgaatgatcgccctgcaaatggcccttcgaattcgccggtcgttgcatacgtattcattgtaatcaactcgtccgctgttgatcaaaaaaaaaaaatttgaaactttggccccaaaatggaaaagaagctggagaaaaaatgaatggccgcctaatacaaactttgcggataatctcttacattgtaatccgaaacatattgctgtgtctgtcataaaaccaaacattcatttaaaagcaagcaaataaatgtattacaaaagcatttctgagagaaaatgatggcatcaaatcaaattccaattgtgtgatcaattgtgacgctgttcaaattgtcgtcccaaaattcgtcgtattccaatgtaaccgccgccgccttttcactaattgggcatcgctttaacagccaataaaaagcaggacttggcactttgccaagagtcagcttttccttggttcgttcgttcaccgcttcaaatggttcaattgatgtatgcactgcaaacagaattttgtagctgacagaagtggtggcacgggcaaatgcctaaacaaaaaggaatcgaaattcaaaggcaatcagtagggctcggaattatatggaaatccatattttttcatggactgttagaggcctgaaacgcacgaaaaacatatttttagcttggtctgaagcttctagaatggagtttctatatccatatttttccaaaaaaaaacccctattagaacggtgcccccccatcagctaaattggctgtttttaccccaaaaaccggtagaaaatggaaattttcagtttttgttcggttttctctatacattgctttttttcttctaaaacggttattatactttgttcagcgattttagatgtatttcatttaatgaattgaagaaaattaaaaaatttaaccctcagttcggcaaacttatgtccatatttatgccattttttgtccatatttttccgagccatagtaatcagtcaatttttatgaaaatatgaccacacacacctccttgaaactgttgacccaattgacgtttctttcttcttcctccaaatcttcgcaaaacaatcgtttcggttgtccatttttgctcggcgtgtgcacccatttggacaacgcttggccaacagttgcatttggtccaccaaatcatcaccaatcgcatcggggaa

SEQ ID NO: 11069 - DNA, 2947 bp, Heterodera glycines
tccggttaatgatttctcatgggtaacatgacaacataaccttcggtttcatttcaagataagaaaaggtcatttaaacttaaatgtacaagcaatctgcttcggcagcactgtcaagaaaatcggaatattggtcaatagaaacacgttaaattaatatactatctttttctctagctaattgagaaaaagcattttcgccttatatttgttttcaacttttacataatgaggaatttcctgcggcgaattatttaatttttttattacaacttttcgctattcaaaaataaaagtttcaaggcccacaattttttatagtgcattgtcgcttatttttttcgcttagaaaagcttctcgtcaaggtcatccaattcggctgcaaaaaaaatcaattaataaagcttcaaaaatattttcaaaaataatcattttatttttaaagaaaaataaataaaaacattaatattgtggagtggactcgaccctcctccttctttccgtttacttcttacaaaaaacttttttgccacacacggcacctttttgataaaggagttcattttcgggactctgtgtaaatggtcattcgtcattgttcagaataaataattttttttaatgagttaaactttgacggaagcaaacggacttagaattagaaaattataaactcagtgttttgaaatgtgttgttagaattccaatgtgaaaagagcggtgaagcattgagaaaaaggcaaactcatagcagaatggactttggtccatcagtcatgcaagttacttttaaaatgaatgccttaaaacctaagaggtttttgtaatttaagtttttattgaacatttgacaagccaattataacgaagccgtaactgattgttgagcgtaatttatccaaaatggatcaaaactttaatttgaaattatagaccccatttttattagtgatatacaaagtctcacgaaatcattttgcaattattttttcttgtttacaaaaaaataatttgaattatttaaaaaactattgacaaaaaataattaatttttgatttatttactctaatatatacatttttagccagcacttattcagcaattaaacgccttaaaatccgtgcctataaaaccaatttttttttctcaacatttcataatcatgacattattcacctatcggatataaaataaaagttttgttctggtcattccatgtgattaaaaaaattaacccaatcactgtctgtttgacaccgattataatattttcagtcaaaatctaatcatttatgatcattattctcatgactttggtcaatcagtcacgttttgatgcttattttttaaaaattaattcaactcaaaagtaactcaatcaaagtttgaggacaaacttaaaggaagggtggacgtgtaaggcgcaatttatcatatccgttcaatctctttctcacaccatttatccccgcttttccccatctttattccgttccataagtccaactatttaatcgggagcattctctcgataaggagtcagttgagcgggcagttgatcggcgagcgagagccgagagcagaacgcggcggaattattattaatgtaattggccaatatttatattattattttactccttctcgcccatccccgcacgcgtattagatctaataggcgcccatgggattacaaatttggggaggtcatttatccagggcccggattttggcttattccttttttcccccaaatccaatccccattttcactcgtcccttcctcatattctgggctggacatcagcaccttcactcaatacagaaaccaattaatcttcttcaattttttccccttctcagctaaaagctaccactttcaaaaatttttttgaaattttactatcgaaattggccaaaagcggagcaaaagaaatgagaatacgttagaaaaaaaaagaaataataaacgtacagaatttctgaagacatttgcaggaacaaaatgaccggaaatagacgaatgaatgaatggaatgaggcggaggaggagaaacaagggcattttatactaaaatattagagtagcgccccgagttgtagcatgtttttgcgtcaaaaagtcacaaatttttgccaatttggggtcacattttcaaaaaaggaaaaaatttttggaaattttaatgttatatggtaaaaaatgttcaaaatttttattcgatatacttgaaaaatgtcgaatgatttttgagatggtgaattggaatttggtgatatggaatttgttggtgcagtgaatgaattctgtcgttggaccaatcactgaattttctgtgtcgacgtgtaaaaaagtggggaaaagccaccaacagaagaaaaagcggacgaacgaccacacattttgtagcagagattgtggacaccgataaatgacaaaagtaatttattcatttattttaacattttggccaaatcatcacaaattaattcgtcgacaaatttccaccactttttcatcggataatttggcgtaaaatgtgaatgaatacataattaattatttattgcataattaataattgtacgtctttgtgatgataaaacaaaatgataaaattgaataaatgatgctgtgataagataaagcatagaaaaagtgtatcgtcttcattagcgtaagcgccgccgccggggtcattttaactggactgactgatcaggattgtgattgtcttaaaaaatgatcaatcattactcagctgataaagccacaattatccgtttagttggttttgagcaaagttagggctagttttttgttgaaaattttcatttgatggcttttttataacggctcagcacccggcggaggctgcctttgatgccgtcgttgctcattttgttgttgcccttctctggcaaccgaggaggacgaagtggac

SEQ ID NO: 11070 - DNA, 2981 bp, Heterodera glycines
cccttttcggcgccgaaattttttctttccttaaaaatcattttaggcaaaactccatcctcaaacccaagccccacaagtcttgagataaaagaattattttataattaaattttccgaaattactattcaaaaatcataaacaattactgccctctgtttacacaaaaaggtccaaatatgttgaagctgtcacttaattatttagttacaatacaacactatttattgcaaaaagccgacaaaaacgaaaatatttgtttaaaaatccattgtttacttgttaatggatgcctccctccctcagaaaggcgtgggatgggacaacttttctcgaaaagtgtacgcccattaaaccataaaaaaaattaatttttttttaaatttagattttcaaaaaattaaaaaaaaaatgggcaacgaaggttcaaaacaaaatcagcagcagcatcaacatagtgccaacaacaacagtggcattagcagcagtgccaacaaagtgggcaaaaaggtgtcccgtcggatgtccatgggcgctggcattccgcccaaaacaccgacaatccgcgtcggtggttccaccggctttcttgacgtgaataatggtaaatccaaaaaataaaataaaattattattattaatttaatttatgtgataagccggcgaattaaaatattcatctgtataagattttttttttttgaatttttagcatagtcctaccaattttggcgtttttcatcctattttgccatttttctcaagattttggttccttattttggcatttttctcaagattttggttccttattttggcatttttctcaagattttggttccctattttggcattttttgcccctataacctgatccttagtaatatttatttaaaaaaatgtatgccatatagacgagcaagtccaaaaataaaatttcaaatgaaattcagaaaattgtgagactacagcgggcgatggtgacagtccccgcctctcactgtcaattgatcagctgtcagcacgttcccgatccggcagccaagcgtcgggaagccaatcgcctaacaaaatgccacaaaagcaacgccgatgctcattgattgtcaaataccgtcagctaatccaggtgtgaaattaatacccccccccaaaaaaatgccgtttttttcacgcaaaaatatgcctaattttggcacacacaaatttaattgaatggtttaattaagggttgcttcaacaacccgcatgaaaacattggcgtccgcattctgaagcgctcagcagagaagcgcaaagattttggccgcttttacatcagcattggggcggaacactgtgcacgcattgcggacatactaaagcaactgttgaagaaatcagtggccaacatttacggtggtgatgaagaggtacggtagggagagagagggacaaatactctgggaacagagcaatactacggtagtgggcgaattacaggaaaatcatatggtatggattaaaatggaggtaaattattctacaatatgattacgaaaggggtacggtagggagaaagggacaaaaacgataagaaatttctctaaaattacagtatacagtgagataatcagtaatttgaaactgagctatggtaatcacaatgttgatactgtaatactaataataaaaaaaacaaattatagcttcaaagcctggcaaatgagttcggtgcccgttttgttgacttgcgcttgctgggtttcaaggcggatttctttgccgttctggccgattcgaccaccatggaatgtgtactgctcgacgccgctgtccatccagcaaacgttacactgaatgctttctcacagttcatcacaatggtcaggaaatagaatatttaatcatttttcggcttaattagggtcgtgagactgattgtaaatgctcccccgaaatttttattttttaacaataatggaagaaacattctaatcttgctgggataaaggtattagaaatagtttaaatatgttactgttttaaaattaaattccgaatgtacgattcaaaaatgaagtcgagatttagggatgggcggaataggtttatctagaaataaaaacatttttcaatttttaaattataaatatgacatttttagctgttctctgctgtccgtgacggtttctacactgaaatgcgccgactgcggcgtaccagcaacagttttaccatcaacccgaacgcaccaaacacaatgatgaagaaattgtcggttgatgacaatatgaaggtggttaattcattaattaattcttttttgattaattttattttgaagaaatattttaggtcagccgagccttgcaaggtgcccgatcaatcagtccaagtccggaactggagacatgccaaaaatgtaagtgaatgtttttatttaatgaataagacctgaaaaaagtgaggcgattagaactatgaaaaattttgaaatttaaacacaaattaattaacctatctaattctgtgattaattaaaaattaagaagaatttttttatcaaaaaagatttacctagggattgggagggttaaatattactccaatataatcaattaattcattagttacatataattgcacttcattgctttagccgcgcatagctccccaattggccatggaagtcaagaatcaattacggaccgtcaatcccagcagaataacaacaatggcacaaatagtcgcaaaatttcgcccgaatcactgcaggccaaggaggaaattcgtctgctaaccgccgaattcatgggccgtgcaatggtggtcggaggcaaagaatgccagcgggactgatcagtgcagcagagcgatgatcaatttttaaaaaatcatttttttgagacgataatttgatcaaaacggatttaagggcgcgggaatttggaggcaaatgtccattcttggattattcttttttttcttgatgaaatgc

SEQ ID NO: 11071 - DNA, 1480 bp, Heterodera glycines
  unsure (1)..(1480): unsure at all n locations
ttttttcaattttcgaaatcttcataaagaaatgcccaattccttcacaaattctttctgtttgccttggccatataaacttttaaattcatcaaatcgttcaatgaattcgttctttttctgcttataataattattttccatttttttgtttttctttaaattcaattcttttttccatttatatattttttcgcgatttactccaataattttccaattttccactcaattttagttctattttttcgttgatattttcctttttatcttaacttttcttttttggtcgctttttctttactttcttttttgtcccattcttcgccgaatatttgtcaaaatttggtcggattttgcctgattcaattccaaaagcaaagaaaattaataaaaatattaattgacacaaaatcattgaatatttttataaaaaattaatattcgaatttattgcttcaaatgaaactattttcgtttattcgctttttattaactttaattttgttatttattatgttttcttcgatggatttttcgtaattccgaggagcgaaatcaatttttcgctcaggttttaatcaatttctcattcagtttttgataaaaaattttcgtaaaaacatgttttattgataatatgttaataaaattttattgtgacattttttgaaaaataaaaagcgataaaaatatcataaaagtaagtggattttttgtattttaagcatcaaataaatactccaatgaggaaaattgagaaagatgaacatatattttgaaattaaaaaaataaattcaaaaatcagtgtccaaataattgcaaagaaattagaaatttaaatccaaacattggtcattaggaaaaagaaattttcattatttacaaaaatgtgattttttgtggtacaattataaaaactcattaattatatttataatttgtcttgttgatgaaaatgcttttttggtgagacagaaaatgttgaatttaataattttaactttttttcaaagaaatcgcaacttttaagccaaaggatattgttgacaaaattgtaatttgaatttaacactgccttacaaatatatcaataccgaaagaatttatcgcttgaaaagcaaaacatagaaataaaagaaaacaaaaatgggtggttatacaaatatactacagtaataggaaagtgtttacagaaataaattagaagaaaacagtggaataatgccaaaaaattaggcgttgtcaccgaattggcattgtgcgaggacggagaagggcactacaaaaagtcggtgattcggccatgtcggaatttaaggcccactgtcgcggatgaagattggtaaaccgggggtcggggagggacggggagaagcacaaaaaaatcaaacggggacagaccttagcgaaacagaaatttgtcatgcgccctaaattgtttgtgctttcatcgaattntccaaatttaaatttttt

SEQ ID NO: 11072 - DNA, 1645 bp, Heterodera glycines
cagttcaacttccatgaccaatgtgatgaaatcggcatgaaattgttgtacaaacattttcactatggccaaattggcatttttgctattccccgcagaattttggccaacattttggtcttcacaataatggaatggcctcgcttaatgagtataaaaactgtgaattgtctttgttgaatttgcagttttgctttttgtcatttggaaggcacaaaaaaatgcatttctttgactttttgttctaactcagttaaattgcccttcaattcaccatcacattctaaagcagttttttaaatttaagaattaattaattgttaatattgaaaaattacaaaaaaaacaattatctaatgtaaatttttaatttaaaatgtaaagaaaaaaaatactttcagctttctccgcagaactcttgatttttacgagaatctctttacaagcattcacccattgctcttcaaattgtgctgcaaccacagcggaatgaatgccaatggaaataataatggaatataaataaatgttcatctttcctgaatatagttaaattcattctttaaaaaaagagggcggtttttttctttttttaaattatttaataataaattattaattttagagaaatgatattccatgcatgtttcttatttaaaaagaaattgactatgctgtataaggtaaaatgacatgtcattattgccgtttccatttatggcatatttatgaatgtattcattaatttaaaatataaaacatttgcatgaatatttatgcttcatagaattatgacgtgaaattattgtcatttccattaaaataaaaatatttgcgttaatatgtatgcttctatatttttattgcataggcttatgacgtaaatgacgtggaatcattgccatttccattaaaatataatatttgcgtgaatatgtatgcttctatatttttattgcataggcttatgacgtaaatgacgtggaatcattgccatttccattaaaatataatatttgcgtgaatatgtatgcttctatatttttattacataggcttatgacgtaaatgacgtggaatcattgccatttccattaaaatataatatttgcgggaatatgtatgcttctatattttattgcataggcctatgatataaaatgaagtggtatcatggtgattagaagagttacaaacaatgattagaagaggtacaaaagtgattagaagaggtacaacagtgaaaaagtgatacaaaagtgattagaagaggtacaagtgattagaagaggtacaactttgattagaagaggtacaacagtgattagaagaggtacaagtgattagaagaggtacaacagtgattagaataggtataactgtgattagaagaggtacaacagtgattagaagaggtacaagtgattagaagaggtacaactgtgattagaagaggtacaacagtgattaaaagaggtacaagtgattagaagaggtacaactgtgattagaagaggtacaacagtgattagaagaggtacaagtgattagaagaggtacaactgtgattagaagaggtacaacagtgattagaagaggtacaagagagtagaagaggtacaactgtgataagaagaaggtacaa

SEQ ID NO: 11073 - DNA, 2511 bp, Heterodera glycines
agtctaaaaagtaatcaaaatataaaagttgaccaaataacgacccgagtgaagtaacaaatctattatcaaatataaaacaatttaatcattatattcatatatttattatcgctttcaaaagttatacacaatgtaaaaatatctaaattattgccatagtaattgttaacctcaagatgtgtgcttatcttccaagtcagcaactaataaaagataaacataacaatttcgaatataaataatttacttcacatttattaaattccacaaaaccttaagtcggaattattaaagttttaaaaaagttctagtcaaataattttgactcaaaacttattgaaaatttatactataacttttttacgattttataaaaaaaatttgaatctgatagaatcttcattcaaacttaaatattttttggttatttttttcaatgtggacatacgataaataataaatattaatattgatacattttgaaaatattcaaaaaacctatgatgcctaataaatattcggtaatttgaattttttcaacaaaatttataattattatattgcatcattaatgaatagctattacattctttgaaaattttgaaaaatttacaataatttttcaagagtgaagtttattcgcactaaatttttaaaaagaattttttattgaagcgattactttaaatatttaattatttaaaaagtaagttttatttataaaaaagcagaaatttatggaaaattgggttctttttcttttttttcaaacatctttcaaaatgcaccgaccaaattctttaattttctttaaaaaattggttctaaataacaaatttgtatgcactgggattttatttaattttttatataaggaattttaaaaagttaaaaaattttgattttttaagtgccctacagcaatacgcgattacgcggcaataattacgttaaaattaaacgagtaataattttaaaactaaaaaacttaaaattaaaaagcattaaattaattaataaaatttttgttataatatttatgaaataaatattataagagagtatcagtagttgtcagcatgatcacggaatatgagcaaaactccttttcagaagtttttaatagggttgcgtccccgaccccgaaccccgacccttaaccctgactcggggttaaatatacacccctaagaatggcattttcgtgagagaaaaggcaaaaaaattatacaaatttgaatttttttaaccattttgccaaatttttattaaataaagtaatttgcttttgttcattcatatgtagtagtgatgtagtggttagtgcgttaacactaaacactacttttgtcaagagttctacctggttgacttcttttttaatttatttttttttgtgattaatagggttttctaaacaaaaatacccataaaaataacgcgccgcaaaaaaatgattttaaaaacaaaaaacttttcgggaacaagggtccggcagtgtctataagcgcggccgcgaaaaatttttgaaaattagagaattaggatgcaattttttaactgattttcaccaaaaataaccaattttttcgactttaagcaaaatttttttaaggaaaaataggttttgtgggtccggcccggaggaaaaatttgaaattttgacaatttttacagattttcattgaaaattgttcatttaaaaatgccttatcgttttaattaattctatacaaaaatatttatgataaaaagaaataaaaaagtacataaaattattattatgaataataaaaaattttaagctaaaataatttaaaaaatttgactttatgctataaggcaaaaattgaaaacccccgaaccccgaccccgaacgattttgtcgaccccgacccgaaccccgacgcttccaaccccgacaaccccgaaccccgacttttccaaccccgacggtcggggacgcaaccctagttcaaagtgttgtcactagggaatagaattacatggaaatccatatttttttcctggactgtgggaggcctgaaacgcatgaaaaacatgtttttagcttggtttgaagcttctaggaaggatttctatatccatattttccatatttttccatatttcgcgatttatgtccatatttccatatttttccatattttggcattttggtccatattttatgtccatattttggcatttttcaaaaaaacctctattagaacggcccccagcagctaaattagcctttttgagcccaaaacccgaaaaatttttcaaaaaatcattttttcgccaaaatttctcgagaatattgaataaatataaattttcttaaaaattaataaattatgtcaaaaataagcaaaaaagcgaaaatttcgcttttgttgttgattttgcgctaaaaaattaataaagtttagcttttatgttttttttcttttaaaatgatccaaaatggttgccgaaaaaattcgagaccaatttccgaatgtt

SEQ ID NO: 11074 - DNA, 1543 bp, Heterodera glycines
attttaaaattattattgtttttaatttaaaaagtttccatagagaaatcccgggggaaatatgaaattgaattacggaaaagtgtatgcgtatttttatctaaattgcaaatgccctgtttttcattattttaattattattatttgctcaaaaagaaaaaaggccaagtgagaaaatttcgaaaataaatgtaaataatacaaaaaataaataattttagatttttgtttttccagtcacaaccttgaaaacgacggccactgccaaacctacgcgtcctctgctccttctccaaaatttttcgctgccgctcctgtttctttacgcaaactctcctattcaaaaaagttgtctttttataataatgcatttcctactatcaagaacaattggttcttgtggcttatccgtattgacttaatccgactcccgaacccggattcgaacataaaaatcaaaattcgtttttcaaaaaaatcacattttatacacaaaatcgcttcacaatgccacgatgacgactcgtataacctaaaaatgccacggccaagacagcacaatcaaaaaaatgccacgaccaagaccttataaaaatgacatgttttgctgtgcgagtcatcgtgacattgtgaagcgattttgtgtataaaatgtgatttttttttgaaaacgaattttgattttttttttttgttcgaatccggattcgggagtcggattaagtcaaaatggatgccaaaattgattttcccggccctaaaaaccgccaaaacattttaatactaaaattttttttttgaaaatctgcgtacagataacccacaagtaccgaaaaattttgaagaatatttaaaaataaataaaaaatgatacaaaaaatgtgtttgttattcatgggttgaagaaaaatcaatagatagtgcaaattgtttatatttgaatccataatctgattatattagtgataaagcaaataatataattttatattatagaattttttattaatcatatttggtttattattaaatatttttatatttttgaaaacttcaattttaaggtttacttttttattattatattaaaaattgaataatggttataaatagggaagtaaaaaatttagcttattatcagatagtgatattgacccaactgatgctttttcttaaaattgctgtcgtattttaatggatttttcgatgaaattaaatagtatttcgaattgtaattcgatgtcaatgaattgttttcgtttaattttttatgtgctgtttatatagataatacagattgtctgaaccaggcaatattttaaaatttgaccaaaaacaaataattaatatccactttaatggcaaattaaaaataaacggccgtgttttctttaaaaaataatttataaagatatgcataaaaattgtaaataaaattaatgcaaatgaaaaaaggcccaaaagattttcatgcgagaaatgaaatgcagaaagcctcgaatttttagaaaaaagaaaaatttaggaaaatggagacgaaat

SEQ ID NO: 11075 - DNA, 626 bp, Heterodera glycines
aagcacacgttctgatagaataatatttgcgaagaagctattctaaaggaaatgtacctcatttgcaactgcaaaaagtgaataaaaaatttttttgctcatttttggatgaaaattatgtcattatttgtcactagttcggactttttgtcactattttggtatttttcctcactattttagctaactatttcgagatttttcgtaactaaaagttgcgaccctattaactattcatcatttgtctcatattttcctcatagttcgaattcattttcttcaactgttcttcaaatgatgtcacaattgtactcaacgattgctgagcaacggcagaaaaagggaagccctgctgatcacgactaaaaagttgagttttcgactttttgttcgaatttggtttcaagacaggaattggtcgaaatggatgccggattagtgatcagcgaatcagaaaatcctagaaacaatttttcgttggtgatttttgaaagcaaaaaacattttttttcaaaaagtgatatatgtaccaactagtgtcgataagcgacgccggggaaaacttagaaaattagagtgcaatttatgaacagattttgtccaaaaatacgaacaattttttgcga

SEQ ID NO: 11076 - DNA, 1379 bp, Heterodera glycines
aataatacccctggggagaagggagtgggaaacatgatttcaaaattttcaattttttctagtctaatctactcaaaacggttcagaattcaataaaaataacattcacggtgcgaaaaatggggtttgacaagtttattagggaaaaaagactttacaaaataatacccctgggagaagggagtgggaaacatgatttcaaaattttcaattttttctagtctaatctactcaaaccggttcagaattcaataaaaataacattcacggtgcgaaaaatggggtttgacatgtttattggggaaaaaaagactttacaaaataatacccctgggagaagggagtgggaaacatgatttcaaaattttcaattttttctagtctaatctactcaaaccggttcagaattcaataaaaataacattcacggtgcgaaaaatggggtttgaaaagtttattggggaaaaaaagactttacaaaataatacccctgggagaagggagtgggaaacatgatttcaaaattttcaatgttttctagtctaatctactcaaatcggttcagaattcaataaaaataacattcacggtgcgaaaaatggggtttgacaagtttattggggaaaaaaagactttacaaaataatacccctgggagaagggagtgggaaacatgatttcaaaattttctgttggagaagagcaaagtacattttctcatggtcacttatcgattgacatttgtccattccctcctccgttcctcccacatcacatttgttatttaaaggcgtggactcttccccccctcgttcacttcttctcctgtcttcacttttattattttattcattctccatccatccattcgccattttattattttattgttatttgactcttcgtaaataaattattttatttgttggtctttctcactcggacaaaagacacaacaaatttggcgcagtcagcagtcgtcttcaaccaaacagaagacacccggactgcacagcaacaaaaccaatagaccctaggcgggtgaggtctgcaaattctgcagtttttcgccatcgacaaaaccaatagtccctaggcgggtgaggtctgcatatattgcagttaattcgccgaaaaaccaaaagacctgagaaaggttgcggttccgcaatacgcggtttttcaactttggactctcaaattcggcaccggcaaacacttcggcatgagcgcggaccaaattaagcaactcctcgaggccatgcgtgtgcaatcggatgccattcaacagctaatgggccaagcaccacaaaacgccacgagtcttaaccacgcaaatttggcgagttccatcgacggccgaatttcaaaattcaatta

SEQ ID NO: 11077 - DNA, 1493 bp, Heterodera glycines
gtaaggagttcggaataaagcacacttttacgccgccattccatcctcaatccaacggacaagtcgaacgtttcgttgacactttcaaaagggcgatgatgaagtgcaaaggcgacaagaacagccttgaaaaagtgctgctctcctacagatcaacaccaaattctgccatcgacggatattcgccagatcaattgttccttggacggaaactgcgcaccaaattggcacttgtccacccaaaaggacaaattgatcagtcggaaaaatttgaaaaaggtaagttcaaacagcatcaaaaggactactctgccaaaatggcacagcaattcgatcggaatcatggcacaaaagctattgagttcctcccaacggatcccgtcctgctcttgaattatcgtcttggaaaaagccattggcttccgggcacgattgtggaaaggctcaacaattcgcctacataccgtgtccacgttccaacactcggccgaattgtccatcggcatgccaaccagcttcggcgccgattggattttgaggacaattcaaattgggaaccccccattcaggaacaaatggccattgagccaaatcaaaggacaccgccacgccaacacgcagccatcgatcagcgaactccacctgttgttgatcaggctaggcaaaaggctaaaagcccaattggcgtccgacgttcccaacgcgtgccgaagccggtcaaacgcttcacgccaggttgaaactgaggatgtttcaatctcgagaagggaggtgttggagaagagcaaagtacattttctcatggtcacttatcgattgacatttgtccattccctcctccgttcctcccacatcacatttgttatttaaaggcgtggactcttcccccctcgttcacttcttctcctgtcttcacttttattattttattcattctccatccatccattcgccattttattattttattgttatttgactcttcgtaaataaattattttatttgttggtctttctcactcggacaaaagacacaacattttcaattttttctagtctaatctactcaaaacggttcagaattcaataaaaataacattcacggtgcgaaaaatggggtatgaaaagtttattggggaaaaaaagactttacaaaataatacccctgggagaagggagtgggaaacatgatttcaaaattttcaattttttctagtctaatctactcaaaacggttcagaattcaataaaaataacattcacggtgcgaaaaatggggtttgacaagtttattggggaaaaaaagactttacaaaataatacccctgggagaagggagtgggaaacatgatttcaaaattttcaattttttctagtctaatctactcaaaacggttcagaattcaataaaaataacattcacggtgcgaaaaatggggtttgaaaagtttaaggggaaaaaaagactttacaaaataatacccctgggagaa

SEQ ID NO: 11078 - DNA, 4994 bp, Heterodera glycines
  unsure (1)..(4994): unsure at all n locations
attggccaacttggcgagactcgcaacaacgacttgaacatttctggcgacgatggcaccgggaatacctcatgaccttgcgagagagggccggctggcatcatcctcaacgacgagtgaatgcacccggggcaccggaagtcggggacgtcgtgcttgtggaagacaaattccaccctcgcaacttatgggccatggggcgaatcgaggagctcagaggttcagacggtcacacccgcagcgtgctgatcagaatggcaaatggaaggatttgggggagacccgtaagcaaaatttgccccctggagagaagtccagaaatgggggaagcaccggaccaacgggtcgaagcagtacaggaagaggaactcggtgcggttgctgggacagaagccgaaggtcagcccggggaggacaacaatgctccccgtggcttgagtggcagtgagggagaaaaaactgtggaggctgaagaagtcgcgcaagacgaagcagaggaagggcccattccaccgagtttcgttcaaaacgaagtcgggagcacctctcccgcgtcgcaaacaaatgagcagatacgggaaaccgtgaaccaaaagacggaagcggagaaagctgactcaccggagggatcgaacagcatgcgagaagttgaaccacgaaggtcgcggagagtccgacgaactcgagaagtatggtcaccggaccgatgtgccacgaaaaggagggggattggtggccccctggtcagcttggccatgatgatcatgttggtctacccgactctgacatcagggtgtcagccgactatccgacccgaaattgttggacaacagtcacaggaattgccaacaacgatgttgccgtgccatatgcggtgtacggaacgtggagtgaaagtgctgagcgggcagcgactcgaaaaaatggaaatttgttgccctgatggatgctgggcaattgtgcccatttcgacggagatcagctacgagctaccaactgaactgctcgtccacgattaccattgcagtggtcaatgctggagggggtctggccccccttataacatcacacagcgatgtccagcgagagcagaatgcgatctgatcaattgctccttctgttgggagcagctggccaacccgacgtgcaacccgcgatgggcatcctcgctcttcgggtttggagctgcaattttgctcgccatcatcagctgcttctgctcaatttttgggcggtttttgtcaggagccaagctgctctcaaaagccgtggcatggggagttcgttaccccatcgggctgatcaattgggcaaccggacgcgattttcggaaaccgaccacggagcaaatcgaacggaaagtgaggaaaggagcgagaaaggcacgaacggaaatacgggagctgcagcagcaactgcaattgggaagacgggctcgggcgatggccagagcgtggcaaaatcccgacgggactcgaaaagcctttcccgcaaaggcagtggcagccctcatcccattgctgctcatcatcgatccggccttcctccaattttcaccatataatccatcgacatctcgcatataatcatccaccaatttttgaccattttatcatcatcatcaccaataaacattttgtcggaaaagtgttgaaagggtcagagggcaaaaaaggggggaaaattcgctcgggaacgaagtgaccaaggggagccaaagccccgagaatcgaagcgggggacaatcccccgcagagcagcagcaaacaaggacgggagccagttcccggcggttgacgcagttcgcggccggaagtccaactcttctcccgaacctcaaccgggagcgccggcagctcttcaaaaagtcggtggtgccgttacagcaacaacagccaaccccatcttgtttgtcctccccaccccctccccagttcactcccttgggcacggacccaacggcagcagtagcagtttcaggaaattgagtgaattgggcccgagggacgggagagaaactcccgcgcacagaccccctagccgtcagcgccggccgagttttctttgccacaattatatttaccccaaaattgagccaaatgcgtacagaaactgatacatggtcaacgcgaacaaataaccaccaatgttaatggacaaaatgataaccagtgaccgtagcagtcgtgtgttcgtctgttgggttactgtaaaaataatttgaatatttggcacaaaataaaatgccaaaattaccgccatttttgcatctgatgatcacaaaaattgacacataacagcaagtgctacccaatgaaataatgaatgtgccggcgaagaatttataaccaacggggcccagcaaagattcggccacaacaccggtggtcggactaaaataaatttggaaattataaataaaattaatttttaatttaaattgcgtcatactttcccgcattttcgaatgcataatcgaccacaaaatattgaattaatgcaccgtanattacacaaatgaaaagcagaccgagcaaataggagaatttgtatttgataaaaatggaggagtgtctaaaaaatcaaattattaattagagttaattagtatttgtggatataattcgatcaaacatttttttaaattaatttctatacttatgtggcgaaatgacagcaaaaaggcgatcaaaagcagcacaaatattgccattaagccacaattcaaagcaaaaatcattggctaaaaattaaaaaattaaatcaaaataaaaaaaatatttaaaattaaatttaccgtcataattaagtcagcagtgagcaaactgacaaaatttatgcccgaatgacaacaaccaggaaaaaagtgtgcccaatttggtggaccaattcacaaagacaaatcagtgccatcagaaaattgacggagccgcggagggaactgaaaaatagaaattgaaattcaattcaattatgataattaaaataaaaatgctaatggcatttgcctcgatttgaccgtgaccaccaaaactgtgccgtgcatcacaatgccaacaaacgcaaccaaatacagcgcaacggccggcacaatcaaatcggcggacggaccgacaaaacggtaggccaaataaggctgaaaacattaatttaagtcgaaaatttaataatgtttaaaaggaatgaattattttgtattcacttaaatatttattttataatttaaattctttttttaatatttattttaccgcattgtctgagctggtgttaattgagggcatttttttggtcaaattttgtgataattggttaaatttcaatgtgtttaaactgaacttaaacatttcttttatagcatttttccgattcgaaatgtttaaaaatcccacgtttaatgagcgaattaatttttcatcaaattcaaaactttcatttcttaaattgtctcaataaatttttaaaaatatttgatgtacttctaacatcaataccattccaaaacaggcattctattgtactgattttcaattttattattttctgtgctttagtattaattgtgaattttaagtagaagcggaaattgtttctttctttttttttttggtttaatgggaaaatttaaatattgtattcgctgagaaaacttaaataaacgataattttcactgttaaaagtcttattttcaaatattttcccattccaatataaacgggggccaataaactttcaattttcccatgcactttttgtcagtataattaatctaaaagttggcatccaatttttgtgccaatttcttttctcgaattattaattaattctcatgagattctttaaaccggggtcatatgccatttggcagcttgcgaaaattttgataacttcgctcaaaatggaacactttaaaaatttttttgaaattttacaataaaatagaaaaatttagagctatcgaatgatataaggaagtaagtaaatgacgtctcttccacagccaacggagagagacacaaaaaataggaaaaccaactcaatgatcggttgggcagaccacataatttcgtctcaaataagctaggcgagatgtccagtaggcgaaatgtcagattttggcttagtaggcgaaacgtccgattttgccttagtaggcgaaatttcatacagccgccacgaatcatggaacgtttgtttctaacgatgcatttcatgtgccaaatatgccgtgccggaatcctgcacggtaagacttgggtttaacgggggtaaaccaaaaacatgtttaatggttcttaaatggcgtatatttaataggctaatcaatttttggcataaaataggcgacttcttggcgaaatgaccgaaaaaattgagaaatgagggcacttataagtagagaccggcgcgggacgggatcccgcgcgggattttgcgggatcccagtctgcaatcccgcatttttggaaaatgcgggatttgcgggattgcgggatttgcgggattaatcccgcgggatcccgtcccgcaaagaattttgagttctaatcccgcagcgggatccgcaaagggaattttgtttgacggcggcgccaattccctatccgaccccgccctgaattccgagccccgaccctgaacaatttggtcagccgcgaataatgttgttcaagactctcggtctcgagtctcgactcgagaaaggtgtcgggtttttggagtttcggtctcggtcttaagtcttgaggtcaaatcggtctcggtcttcggggtcacaacactattatgaaggactagtgtggtcccatttcttttcaagtttcccggcaaatcttttcctagtgtgggggttggcactttcacttcccccactaataacttttgtgggaaagaacaggcataagaatcatcatcactagggatgggtatttaccgtcaaatgacgtttcttttgctgactttatatggccttatgattgaagctgcgaacatg

SEQ ID NO: 11079 - DNA, 1147 bp, Heterodera glycines
aatttgactatttttcttttcaaaaccacttttttgcggtgcaattttcaaaaaactagaaccagggggtccggcggtccttatcagggatggcattccgaggccccaaaaattttcggaaatcggatttccaaccccaaaaacgtcggaactcggaaatttttcaaaaaatatacaatataataaaaaaatttctaaatattttaataggctaaattttttaattcttaaccaagtaaaaggtatttcacaaatgtttttagtatattcgcttgaaaaaattattcaagtattttatcaaaatcttttttttatcatttttcattattttagaacatttgaaaattttagccaagtattaattggatatttggctagtggttcaactatatattacccatggagaacagtgagtataaattcgtatttttcatttgttttggatggggtaatgaggataaataaaagattcaaaataatgaccctgtatattgcttacaattctgaaaaaagggcgggaatgaatacggatattgattagaaaattttagcgatattcaagaatttttaaatgcatctggccagttttaaaatttcttacattctaattcgttttgtgcgggaagcttaaaaataatccctctttctgataattaccgttttcgtcaactggagcaaaacattgcgtgctattttttattttcgagaaatgtttcttgtgaaattctgcatttaaaaaagaaatgttatttaatttcatatgccaagaaaagggcggttaggactgtataaaactggtaataaaacagagaataaattaaaattccagaattctgaaagtatggtctgtaatgtgactctttctgagcagatgttcatgttgtttattaaaattttgaactattttaaagggtgaagttatatacctagaaaatgtaataatcgtatgttatatactgcagaaatgttaggcctagccgaaaaaagaatgaaaattttagccaagtattaattggatatttggctagtggttcaactatatattacccttggagaatagtgagtataaattcgtatttttcatttgttttggatggggtaatgaggataaataaaagattcaaaataatgaccctgtatattgctt

SEQ ID NO: 11080 - DNA, 2177 bp, Heterodera glycines
  unsure (1)..(2177): unsure at all n locations
ttatttactctaaaaataaattcttcaaaagaataaccgttaattgaaaaaagtcagtaataaaaaaggaaattttatataaaaactttttaaagtatagtgcaaaaattcaatttgtgaataaaaaatgaaataaaaatgcttttttgactaattacggaaaagaataacattgaaaaaattttataacaatattaataaaaatcaataatggttgataaaatttctatttttaggcgttattttattgtaaaaaatgtacgaaactaagtttttttaaatttttttatagcgaatatactataaattaaatctgtacaattttttattataaatatttaatttatatatttgcaaaggaaattatattcacaggaaacagttgaagtgaatagaaaatcctttgtgctaaaattctgaaaggagcatatagtggaaatccatataatgagtaaaccctaatttatgaataatattataaaaacaagagtcaaagcaaaaccaatattctttttaagttaagacttaaaatgtaagcaccttttttcggcgcttgtcggcactgccggaacgtctcattctgttttttttaatttggttcaaaaaacaccaaaatcgtttccgaaacctgacataaattcattgatgcaatggataaggaaaccataaatgcatttgtagacagctcatatttctcacgtaaatgaaataattaagataccacttcacctaatctccgtgtgcaaccggactgaatttttcagcacattgtcatttttttcagaaaattttcccatgtttcaagcaattttttggttggccaatgaaaaataacaaatatattggtttttaaaggtttattttattaaaaaaaattattaattcattcttgttacttcagttaaaatagatactcgagtagtaatcaaaactttcgtcagttttaatgtttactgttgcggttagttataattatttataaattattgtatttttaattgtatttagcaatttatagttacttaaattattatagaatttttataataatctagttaattaagtttttttttataatacattctttattgttgcagcttatgtgattctctttttattggaatcatttcctattaaatcaatgcgataatttatatgattcaattttttaattttataaattttttgtgcgataattccgtaaaaaatcatgttatattttcaatttgtttaggtacaactttattttcgaaaagtaatttgattaaaaataaaataattcttggcccatttaaaaaagaatttacttatttgagactgtgtttcagtcgagtcgactttcaattacagacaattttggccacttaaaaacatattgttttgattccattttagtaaaatttaaaccagttgacctccaccgcacaaaaaaaatattaaaattacctaaaataaagctaaactgaaattatttaacgattgcaaacatacctcgttaatcatttttacaaatcttttaaaaatgcaaacaaaattttatataatctaatggataaaaaaactaaaagaaaaaaacctttttctatttgtcgcaggcgcgggagtaaacctagagtaattctaaaatataaattagtttctaaatgggctagataatatataatattgtattaaactgcaaatttcattatgaaatatataaataatgtgaaattaattgtcaatatcaattataatttattattactaatattattcatgtgtgtaaaacaacttaattattcaaactttttttatgagaaaaacataatttgactattttcctaaaaaaatttaaggagtccgagaacgcagaggaccttcgccgatcctgtgaacgtcttgcggccgaattggggcagaaaagaaggaaaacgatgcttgaaggttaatcaaaaaatttaaatttaataacactaattctatggtaattaatattgtaacaaaacatatatctcccaaagcataacaacaattacttgtatcatagtaagaagacgaaaaataaattttagtcaaccaaatggcgcgatataaaaaattaaaatatcattaaaataaaactgaatgatgaataaataatcaaaatatattgaacagaatatgaaaanggtcaataacaaannatttcataattg

SEQ ID NO: 11081 - DNA, 2989 bp, Heterodera glycines
tagtttctaaatgggctagataatatataatattgtattaaactgcaaatttcattatgaaatatataaataatgtgaaattaattgtcaatataaattataatttattattactaatattattcatgtgtgttattaaaacaacttaattattcaaactttttttatgagaaaaacataatttgactattttcctaaaaaaatttaaggagtccgagaacgcagaggaccttcgccgatcctgtgaacgtcttgcggccgaattggggcaagaaaagaaggaaaacgatgcttgaaggttaatcaaaaaatttaaatttaataacactaattatatggtaattaatattgtaacaaaacatatatctcccaaagcataacaacaattacttgtatcatagtaagaagacgaaaaataaattttagtcaaccaaatggcgcgatataaaaaattaaaatatcattaaaataaaactgaatgatgaataaataatcgaaatatattgagacaaatataaaaagggcaataacaaaatttcataattggatcacaacggacttgaataaaatttaattcatgtttaaataaaattagaaatataatctgtgcatgcattaaaaaaatatttaaaaaaataaaatgaaaattggatataaatactttaattaataacgccaaccgttacaattgttttggataaaaaattattattttgattttgataccagcaacaaatgacatttttaattggctataaattcacgaataaattaaataaaatacctaacaattcttttaaaattaagagagagaacttaaattttgtcttatttaatttagtaaaaatgatcgcaactttggcccgatttatccgcgtataaatattagaatttaaaaaattattattacattaaaattttaattacaaaattcaacataattaatgtaattcgttaaatatgaaaatgaaacaatggttatacaaataataaaaaagataatctacagcaattttatagaagcaaaaatataacaataaattaaaataaactttcaaaaatgttcgcctaatgcgttaaagcaattaatttacaggaagaataaattagtaaaaacatttagaaaaaataataaattttaaaggtattaatgaatgaattaaatgacaattaatattaaaattaaatagataattatctaaaaataataatccctttgaaagatatagaaattatttttatatatatgtaaaattaaagaaaactaaactaactaaatgaggagaagtcctggtcattaagatttgaatagaaacttaagtgaaaattagtcttgaatgatacagaatgtaacattatagccgccccgttttttatgagctttaatttactttatatatatatatatgaaattagtaaatcatttaagataacttacgattaataacttaattttttatggcatatgaacaaattcattttaataaataaatttaatacttatattagcttctttcaaaatagggtatttttcaatgtttattcaatggttcttggtttccaccctgagaccttcagaacgagttgaagaacttgcgtagttcatccatgactgatttgagcgcccataaagagaaggagagaagggttaaaggaatgagggagacggagcaaaagcggcgcatctcgacatccggaacaaatgaccagtggaagtgaggatatggcttgaaatggtggccaatttataggcgccatagggatggccagcttagagcaagaagcgagagcgtcagttgttcactttgcgttaaatttaaatttgaatttcccgccaaatgcataaaaggacaagtgtcacaagcgggaaagagagagagtagtgaatgatgtattttatttatttaattttcaattatttatttcatataattttttttaaagtaattttttatattatttttaatttttcatatgatttataaaaatagtatgttgtaattggtatttttttattcgtttcttgagtttttgtaattttaactatgtgaaattcaattatttattcatttctcttataactcttttattagtcttgagttcttgaatcgaaaggtccattgggtcagtactttttaatttatcattatagagttgttttttgaaaaaagtcctatttttgtattttttaccttacaattattttcttctaaaatatttattctagtcttgaaacgggcatgaaaatggcaattgagggtccagtatttaacacatttttgtcttttcagtgaagttataatttcttattcaattgtattatagaaaaaatttggtggatcttctaagctttttttgattcattttttaaaattatctttgtgtttgtttaaataatttgtttattttttattagttaaataataaattgctatcaacgatttaataaggcagatcatcaatttcatatgaatattgtggaataaagaaaataaacgaattttacggattttttctttacttctaacatgtgaagttcaaaatgacaaatcacaacccaaaaaacacaccgagggcagaaatgtttaagccgattaattcaacttttgtttttatttattttttcgtcaaggttttattttatataatttcaaaacggatgttttttttaatgttgtacaattataacattattctattgtattcattgtgacatagttcgaagaaatatttaatgcttgttaaattattattattatgtttggtagttagaattttgattatctaaaattatttgtcaagttgaaataagtgtaaaatttttattaatattcaaaactttatttaatcctagcacatgtattaaagcttaaaaattgaaaagaaactttgaattttaataacttttttttctcgctttctctcaaacgctgaccggtttataatcaagaagcgtacatagaatcggcgcataacaaggtggatgaaa

SEQ ID NO: 11082 - DNA, 2777 bp, Heterodera glycines
ccttttgctgcgttacgcccgcctgttcaagacggcgtcagtgcttgtggccaccagtcaacttgtccaagtgattgggattttgtttcttaaaaatcaataaatgccatattttttgaatttttggttgtgccattgctctcagaaatgccaatttcaaccccgcaagatttgcattccgaaattttgcaaacattattttcttgcgtttcggcaacttttcgattcataaagctcctctgatcactaattactcttgatcagttgggatagagcattttctcatattttaagtttgtaagtgccaaaaaaaattttttttgcttaaatccatagggaaaatagcaaaaattgttaagagttatatttttcttggaaaatgcttaattatacttaggaatttttcaattattcacattccttaattaaggaacaaatttttataaagaaaagagttcggctatttttcttatgcaatatttaaattacatggtttttttacaagaaaacattgaataatttttttaaaaataaattttaatagtttcaatgaaattcgaagccacaaattaaaattaaaatgttaatttaatctaaatagaaaaaaaaattgcatggcaattgtaaaattcaaaaaaaaagataatttggatggcagagaggagatttttatcagtaagcagcagttttattactggaaaacgaacgatgtttctgacttacattttatttcataattttaaaaacaaaataatttatttaaaaagaaaatttaaaaataaaatcattttttaattttcaagtttttagaaagtcaaaatggcgatcagtgcacatttttccgaagaaacagcacagtcgagtttgcacgcacttcaacgacttgaagacgctgtcgcacagtcactgcgcggggcattgtgagtaatttaatttaaaaattaaattaaattttttaaattattttatttattttttaaaacattttaacatttcatttaatatatctaagtgcatttataaattaactaaattatatttatgaaatttatatccttttttcattttataatttttaaaatttttttaattaattttttaaaaattactttaactttttaaatttataatttaatataaatgatatttataaaataatttaaatgaaatttaaatgcttttttactcaattttataattttttaatttttataattacaaataacttttttttttgtttcaataccattttatttttttattttttgagaaaattaatttcataatctttttttgtgcttttttgcaaatttttctctcttttttcatttatcttttttactctttattaattattattattattctttcatctttgcctctcccaatttttgcgttttgctcatttattttgtgattttgttttgtgcccctcattttgctatattttctcatgtcactctttcccacattttatggaccaattagtttgccattagaatagagaccgttcactactcactaattatcatcactcgctaattaataaaagcgatgttaattggctgtgtaaatgatggcagggcagggacgactctctccttaggttctgtttgttgattgttgtccagcagcaattctttcattttttttctatttattcagataaattatttacatgattttattatttttatttatttaatttaaatattttttaatttgccaacaaaaagggaaaatatccctttgataaacccacaaaatttgattttctagagcgctaaaatggcatttgacccgaactcgggtgacaataaatcctattattaaatatcctgtaaaggaacttttttgtcactattcagaaaaatgcttcagggcataattggaaaattatataaaaaagaatttttggcacttttaattattattctttactttagttttttatcatatattttgtcgctattttataagaattttgccattttaagcacttttctaaaaatttgcctgtgaaataactcaaaaaatcataatcaatttttttatcgtgattttttcgtgttttacgaaaaaattgattttataaaatttatttatatatgaaatattggaaagcaggctgtttgtttccttattatgctaatgtattttctgcaaaatttcaaaccacacttgcaataataaaacaaatttacaaaaccaattagccaaaatccgccaaattttcatgcttaaaaatctgcccctccctgctgatcataaatcaaaatacctttgctctaatcccgatgaatcttgaatataattattttatatcactgcattttttatgtataatttatagggctgctaattttatgtaagaaatttgcgaattatgtaaataaaatatgtatgaaatatgtacaaaaaccccaaatatgtactaaaatatgtaaataaaaatttttaaatggtcattttttgaaaaaattctttgtaaaaagtgaaacagaggcataaaatgccataaaaatgaccaaaataggtttagaatcacattttagtattttaaaaattaattttgataagtcattttttgaaaaaaaaattcgattttttagggatacattttcagaaatttttttaaatttttcacaaaaaatttatataattctcaaaaatcctcaaaatatgtaaaaaaatgaaatatgtacgaaaaaattgcgaatatgttaaaaacatgtataaaaatatgtacatatgtaaatatgtataacaaatcccga

SEQ ID NO: 11083 - DNA, 2054 bp, Heterodera glycines
aaactttcatattggtgtagtaatccgagtggagtcgggggcgtttgggcccccgtttttgtgcccccgtttttgggccccaattacagaaaaatgaaaaatcacagtaaaaacaactttttaaatttcagcataaaaatgtaaaagaaacattttaaaaataaattcaacaataattttaacaataaaaaatgtaaaaattaacagaaattcacgggttcattcgatagttgcgagaaattccccggagaaactccaaaataatgtgaaattgattttttgaactcgcatctccaaaattttgtcatcccatcagaactcattttagcgaaggtgtaaaggtggcctttgtaagacaattttactttttgttttttgttgcaattgggttaggcatttctgaaaaatgtgcaaatcagaatgtacagcaaattggttaactattaaaaaataataggatttggaataagtaaaattgtaaaaaatgagcgaatgttaattaaacctaacttatgccaagtggcgagggatccctcaggcttagtttttagaatcttaatttttaaaaaagcacatttttctatttttgggttggggcccaaacgaccccggggcccaaaaacgggggcccaaacgctctggtcccatccgagtgctatcatatgaatatgaaaccaatattatttaattttgtttggaaaagttatgacgtgttttttctctaaaaatctctaacattggcacttttacgaaacgcccatgcatgttccatggaacgacctagcaccatttttcttgatctcgattcttgtgaaaattttctggctttagggttgatcattgcatggcaaaaaaacggcctggcacccttccaaaaattgaaaaattttcaattattttttatatataattcattttcatttaaatttctataggaagggttcgtctgctctccgttctcgcccaataaaacaaataaacaaatttttggcataatgccatcacagccaaaaaaaaaaattgttgttgttcaaatcatttcatgaaatatttgacggagtttcttctgtgtttaatttatgtgtgttcgttcaaccgctgattgaggtaattaagtaattaatatagcttttcgagttgctgttaatttaattgcactgataatttgataagaaaagggcggtgacgaggcgcccaaaaactgataaaaatgtgtggtgatgggcccaccaccaaaaagtcccgagtctcgaggttttgttgtgtgtttccaaattgggacagccctccgccgccggcgtttcgttggtcactgtgtaaggagggaaagggattaatttcaaataaagccccaaattgtgtgtgttaagaaacgccaaaaattttatttttggtcttacaattagaaaatttcgggagtgggtaaatttttcaatttttatacatgcctaggtttgtaaacggttttccccattcctaaaatttttgaaagcctcggaatcccaattcccgaatcaatcaagaatttttagacttttctatgaattttaatgaaccgcagaattcctatttccgaattttttggaggcctcagaatcccgaatcccaattccagtttttttggctaggattatttccatcccctaattttttggacatccgcggcttaactaatctcatccatccctggcctaagtctattacctagaaaaacttcccagttaaaaatttaaatcccttacgggaacccgttctcaattctcgaccccgccctttcccactgatcggaaaatctgaaaaaatgggcacttccctcccgtgttaatcccggattttgcatatttttcccatccaaaaattccgataaaatccattaaaaactgtggaatttgtaccatcaaaacaatacttaatcaatcatcttccattcatattcttcttcatcatcagtccgtcaccatccatccactttattcattcattcattattcattgctcagctttgcttttcccatctttactcatcgccccccccctctataatatttattccc

SEQ ID NO: 11084 - DNA, 1072 bp, Heterodera glycines
tcagaactgtatgatttaaaaattagcgctcaaaatattctattggcgttatgtttatagtacaaaaaattggtttgatttttttgcttgaattccccttaccatggtgcatttatttttatgtttggtgtgtgtgtatgtgttactaaatatcagttcatctgtaccattggctcgttcttataatatggtaactcgccattcgtacagcagatgctttttaaacgatttttgaatttaattcaccttttacattggttttgagttgggcggaacgttgcgattcgggcattatcccgtatggggcggggaggtcggcatcggcaatatactttaacagccattgattctcctttgtctaggcttttcacgctgtttttaatacatccattaaattcaatttaatatacctaaatgaacttttcattcctttttcttttgtctagattagatgtcttcttaaagtattgtctaaaatcgctttatttgcttgtaatagattcttattgtatacaaagagggttctgtttacaatgtaagttgtctttcaaaattaaatcgcattgaaatgacataaaacttattaatgctttagtggaagagggttcgaaatgtcaatcgaagccacttataagaaggtatcacagcttgagcatgtgctccttcgaccggacacctacattggttctgtggaatatacgaaaatggtttaattttaagaatttcgcttttacttcctttttacaggcgtcgtgggtttatgactcagaggatgataagctcgtctttcgcgagatttcttttgttcctggtctgtacaaaattttcgatgaaatccttgtgaatgcagcggacaataaacaaagagatccgaaaatgaacctcataaaagttgacattgacaagtaaatatttcctgaccaattaaactaaacaaataattaagggaaaacaatcgaatttctgtgtggaacaatggcagaggcattcccgttgtcaagcacaaagaagagaaaatgtatgtgccagaaatgatcttcggcacattgcttacttcgtcgaattacaatga

SEQ ID NO: 11085 - DNA, 3175 bp, Heterodera glycines
aaatcaagaagaacagcatcaccgtgaagccgatgcaagtgaagaatcacatgtgggtgttcgtcaattcgttgatcgaaaatccgtcgttcgactcgcaaaccaaagagactttgacactgcaagccaaaagtttcgggtcgaagtgcgatgtgagtgaaaaattcatgaaagaagctgcgaaatgtggagttgtggatttggtgctgaattgggtgactttcaaagaaaatcagcaaaaggacaagacgagcggacgaaagacggcgaaactgaaggtaaattattactgaatccctattattagactgacaattatgtaaatattttccaaatttagggcgttgcaaaattggaggatgccaacgaggctggcacgaaaaactcgaagcggtgcacattgattctcaccgagggagattcggccaaaactttggctgtcgcaggactcggagtgattggtcgagattattatggagtttttcctctccgtggtaaattgctcaatgttcgggaagcgagtcataagcaggttcgaaaatgcatctctattttgctatatttttttcacaatagataatggaaaacgccgaaatttgcaatatgatcaaaatcatcggtctccaatacaaaaagaagtatgactccgagcaggacatcgaatcccttcgttacgggaaaataatgatcatggctgatcaggtgaaagaaattgctgaagtggaaacaaaacaaatgggtcatcatttaggaccaagacgggtcgcacatcaaaggattggtcatcaacttcatccattccaattggccttcacttatcaaacggaatttcgtggaagaattcatcacaccaattgtaaaggcgacaaagggcaaagaggagaaatgcttttattccatcccggaatacattgagtggaggaaaggcacggagaattggaagagttggaagataaaatactacaagggtttgtattcttttgggtttctcaaatatatcattttgctacccttagggttgggtacatccacctctaaggaagccaaggaatacttctcgaatatgttgcgacatcgaattccttttcgctataaggatgacacggatgatggcgccattgaattggctttttcgaaaaagaaaatcgaagagcgcaaagtgtggttgacaagttggatggaagtgcgtttttgatcattttgggtgaaataaaaactgaatttgtcaggagagaaagcagcgtcgtgaacaaggagaacatgacatttacttgtacaataaggacactcgaagtgtcactttcgcggagttcataaacaaggaattggtgttgttttccaatacggacaatgaacgttcaattcccagtttggtcgatggtctaaaacctggccaacgcaaagtgcgtgaaattatttttatccattttttgcaatccaaatgttctctgtttaggtccttttcacctgcttcaaacgtgcggacaaaaaagaagtgaaagtcgctcaattggccggtgctgtcggtgaaatgtccgcttaccatcacggagagcaatcgctaatgagcacaattgtgaacttggcacaaaactttgtcgggtctaacaacataaatcttttgctgcccattggtcagtttggcacgcgacttcagggaggcaaagactcagcttcgccacgttacattttcacgcaactcaagtacttttgaagcttttctgatactaatttaaaatattctaatgtttaagccccgtgaccaaagcgctttttccttcggtcgatgaaaacgttctccgttttctctacgaggagaaccaacgcattgagccagaatggtattgccctgtaattccaactgttcttgtgaatggggctgaaggaatcgggactggatggtcgacgaatgttccgaattacaacccacgggttttggtggccaacatgcgtcgattaattcactctgaacagcttgaaccaatggttgaatatatgtaacaatattataattgcatatgttttccagattccgtggtacaaggggtttaagggtcgcattactcgaatggacgaaactcggtttgagacccgtggtctgataaatatcattgacaatgggagtaacgacttggtggaaattacggaactgcccatcaaaacatggactcagtcttacaaggaacgagttattgagccgatgtatgatggatccgacaagaaaccacaattattgcaagactacaaggagtatcacacggaccaaaatgtgcattttgtatgcaaattgaaacaggacgaacttcgcgaagccgaacagaagggaatttatgatgtgttcagcctgaagtcatcagttaataccagcaacatggtgagtttcttggaattaaaacaatgaatgtttaactcaaaggtcctttttgacgctgccggatgtctaaggaagttcgactcgcccgagcagatttgcctggaattcttcgagtgccgcagggaattgtacaagaagcgcaaacgctacctcgaaggaatgctgcaagcgcaaagcgaccaactcagtgaaaaggcacgcttcatagtgatgaagatcaaaaacgagatacacatcgaaaacaaacggaaatcggctatcgtagagcagctgcagaagcacaagttcagaccggatccggtgaaacggtggaaggacgaacagaagcggaaagagttggagctgtgcggagaggcaaatgtgtcagacgacgaagaggacgtaagaaaacttaattagtaaattcattaaaaccctaactgaacgactggacacaacaggaagacgaacatgcggaccaagcagttgatgaggccttggagaagcgctgctctgattatgactaccttgttgggatggccatctggaaactctccatggaagacaaagacaaacttttggcagaaagtgaatcaaagaagaaggaacttgaagtgttgaagaagaaggaatggtcggatttgtatgaggaggatctcgaagcttttaccaaagcattggatacacaggtattaattcataattgggaaaacatagtcaaagtgttaatttaaggaggaaagggaacggaaagacgccggcggggaaaatcttggcaaagagaagggaggcggtaaaaagaagggcggtgtcgttttagac

SEQ ID NO: 11086 - DNA, 2635 bp, Heterodera glycines
  unsure (1)..(2635): unsure at all n locations
aaaccgaaggcaccgaagagcacagcccgaaggccggagacacgggcagcgaagacgcacgacggccaaccaagaaacgccgggagaagggcccaggaccggggaagcagggagaacaccacaaaggcggcaaagacagggccaaagccgcaagcaaacccaagaaagcgagcgacagcaaccaggggaacggggaaaggagcaccaacgacgaaaacccgnaccgcaggggcgccgaaccccacgccggacagnagcacacaggcacgcgcagccacgaccgagacaccaacaaagaggcaggcgcccacacgcatgccccaagcacgggcccccggcaagcgctccttttccaatggtatgaaccgctgtctcgctttgtccatcttaagcgagtccaactggacaaactgagcagtccctacaccgacctgcaacacccacacaaacccttcaatttggtcttcagatccggcgctgccaattccgatttgcccatggtgtgcctctgttttttccctgaattgtcaatttgtttgccttaaggtgtgcattggcatttctcgggcgctcacttcgcctgtcggcactgcacaagaattgttgcgcgagttgcggaccaatctccaaaaggacaaattcgagctgcaactcgtcgactttaatggcactgacagcacagtcaacaatatgaacgacatgtactccgccgcactgttcggcgactgttcgtcggatgatgaaatcatcggaagttggcaacgaggcggccatgccgtgtccccaaggtcaacgagcagtttccgcaccatttggcgatggcgcgaaaagttggaaaatgtcgtcacattgaaacaattggacaaagaaacgcttttcattgcccatgacaaccaagtgaaattggacaatttatacgaattcattttcatggattgtttatcattaagataattatcactgatttcaacgggacggaaaaaaacactgatctgatgcaaacttccttctctttcgacttcagtctcgagtacgccattcctttgtccgattcggtgctcgcctttcacaaacatggagttctggtaagtgcgtttggtttcatttgtcaatcaggcctggaaaatcaattttacaaattaaagaatgggaattcgaattttttgtcaaactgattttactctaatttatgtcttcaatttccggtagtatcgccttcctctaggcagaaatactatttaaaaatctatgttaggcgcaaaatattattttttcaacacttttagggcaagtcgttgttcactggcgctgtcactcaacacttgaatgaccctaccaagctgtacaaattggttggacaagactcgtaagaacagtttatttaaagcttgactatatacattcaatctggcaatatctggtccgtgaaatcagaagagtctcgtaattaatgaattctgccccaattaactcaaattgtgacaatgtctttaaaaatcagctgtctatacagactcccaaaaacactacggccattgttccaaattacttgcttttctttttaacaccttttattttaaattatatatttctgtttacaatgcccactcaaatgccgttccccgtgtctccatttccgatgtaaatttttgctgtttagcctcgtggtgctgaaggtggccaaatgccggacagctctcagtccaaacgaatgcatttcgaccgatggatttgaagggaatggggggcaatcgtcggtgggtgaagaagtgagcatttgtgtgctgactgggcacgtctcgacgatgacgccgccttaaacaaagaccatcatcatcactttttgtgtcccctgatttgtcattaaattcattgtctctgcttttccgtgccgtcgcttctccgctctttccaattgtctcttttgccactcacttcctcctcttcctcctccattttctcttccgtccgttcttccgtttttcttttattttttctctacctccagtcaaaatcactcatttatttttgttttgcttttgcgttttccctcctcttttggtgcattctttccggtctgcccacttaattcgattctttttttcagcaatttgtgcttttgcttttgacagtctcattaaaatgcctgctaattgtataatctgctgactgtgcgtccttttgaagggactttcatttttaatcatcgcttcgttttgtcaattctctcgtatcttccacatttttgtacttttttcccagataaatgtattcgtcatcccaatgatttgatctcccttaagtcaacaacaatcaaatgattattaatcgtttccgcctatggcttcaaaaataattttgtatattttgtggcccaagtgattttgtactttaaaagtcattcgtccactctttttctctgtaatcccaactctgttcatcttcctacatctctccacgaattggtaaataattgtccaccatttctgtgtcaatacatatttcatattttcctgttctttttttgtgtttgccaagcgagtaaaatgtgaatatttactgaatgaatgaaaaggaaaaggacacaaatcggagacactttccacttcgattggttattttgtgtgcgcaattg

SEQ ID NO: 11087 - DNA, 1213 bp, Heterodera glycines
  unsure (1)..(1213): unsure at all n locations
aaacgagctcctgtaccagaaaagatttgcatgtgtggctcagtggtttttgtaagatagtaaagggacaaagggtggtggttcgagtccgttgtgcaacatgaatattttcatttatttttgtccaaaatattaaaaaatgacgaattttgagaattatttttgaagctttttgccaaccaaattggataatcttggtatcattcgaaagcccttgatggggagaagctttttctaagcaaatgctaagcaatttgatgaattagaaaaaagatatgagcgttcaaaagtttgttttttgaataactttttaatgagccttatttttgcaaaaaccttctatattattcgatgcataaaatttttgtctatcggtatgcaaaatttggtgtaaattgtatgagtagaaaaaaagttatatgtggcgaagtaaattcagtttttctctattaacagagataaagaaatagtacgccaaaaagagagatgtttttttctctgcactctctatttattggttcatgtctcgttttttgaaacggtgtgtactatttcaattttgttttctcaatttggtggcatttttccctttttgcccattttccctttcctttntagcaaatgtctctcctttccgtggttctttccncctctttttgcctttgttctttgctccttttccttctcccctcggctcttttcgctgatggcttttcgtcgtctggccaaagaggtgggctaacaacaacacgagaaaggccagaaacacaacaactcaagaaaagcatattttcatcaatgacaccaaaatgccctcagaaaagctatgccgtcataaatcgaattcggaaatacctttgttctaattttgttcgcaactggacaagcgatcagctgatcagaacaactcttagaattcggaaatgtgtcatacgtacacattttaaaaggggaactgttttagcaccggtgtgtaattccaaaaagtgccctctgtctctttgcctttgttctcgtctcacccccccccccttcagttgttttggcccgggtgatcattttcaaagcatccgaaaagcaggggacgattgcttctcaacctgtaaattaaatgtttaattttcgccaattcttccacaaatccccgtccaacagttgggcactgtggacatatggcgagaccgttcccnngggaagacaacggttatttcag

SEQ ID NO: 11088 - DNA, 1539 bp, Heterodera glycines
gctcatcagagggtattcgtaagagggaatctctccgatcggagaaaggaagcggcgaatgctttgtcgacgcgcagaacgaaagaaagaaaatggagggaagcgatttgtaactccgttcgtccgcccaatcaaagcaaagggcggcgaatggacaacggacggactaacggacccctcagccccccccccccccctccgaaggtcgtcgttgtcccccgcgcccataacacggtccgttaattgtttccagctactttaaaaaagacaaattggaggtggcaacggtgccaaattcattcccttttatattgggtcaaagagggaaaatgaaacggacagacagcgaatgactttatttacaaaaataattcatgccaataaatgtgaatttggctgatccccgactgattgctctctctctgctcataaatctgatcagcagctgttgtctgtcttccctttccttagcaattcgctcgcctccctttccttcgcgtcctccggcaaaaacgcattgagcgcctccagcaaagtgcgcgcggtcagtccccaaatgcggaacttttccggacaattgaccagcgaagaattgcacaaaagtcgcggtttggtcgagtggaaaatgggcattcggaagaaaaacggcattttgtcatcggatggttttccagaaaatctaacggagtttggttcaattaatggttttgtttctgttgatcgtttgtctgttctgtcagcaccgaaatgtggtgtagtgaattcgggcgagcaaatccgaaacggatgccatgaaaatattctgcacttcggcgtcggcacatctcagcgaggccaaccgttgctccacgttttgcccaatggttgccaccacgggagtgacgacgcccgcctctccgaagaacagcggacgaagagtgccccacagttcctgaaagttaaaaacgaatcggtacgggagaagacagagcaagcgccgaattttgcggaatccaacgcgcaattcttaaaatttgatccgattatggcatggatcaccacgtcgttccggtccagtccgatctcctcttccgcctctctgatcgccgcagtctctacactttctccctgctcgatccgtcctaagccgatcacttttctttctgatcattggtcacaaatcatttttcacctccgggaaacgaaatttcgttggcatgatgcttcatccttttcgccctttgtgtgaagagaacacacctttcttcggcggatggtgagcccaactgacagaacagcacgagtgttgcacagtccgtcgccgtgggaattccctgccgattctcagccaaaagactcttttcattccttttcaaaagccttggtttatttcggttgaaattctctcttcgaatgagaattcgatcaccagacgatggaaaagcatcagaaaaggaacaaaaagaatgaggcaaagcagcaccaattctgatagagaggacgaaacgaaaggggaaaagcatttcgaagggaaaattatgaaaaggaaggagctctaga

SEQ ID NO: 11089 - DNA, 3882 bp, Heterodera glycines
  unsure (1)..(3882): unsure at all n locations
agctccctcgcacaccgcgttgcccgcgcattccggcaatgcgcccggcacgcacagttgcacactgccgttgcttgcatggcgtaacacgcgctgccccgtgccgcacccttcgcctgggtctttgccacagcagcggtgctggccgtccagcgagtcctcgtagcacagggcaccacctaatggcatttaaaaaaaaaaattaaaagttgaatttggcgccaaatggcattgtgttaggcgctgttgtgaaaaaaatataaaataagcttcggggttttgagaacggcctgatctgctggctttgtttccacgattggacctctagacctgggttttctggaaaaaaactcaggaaaacgcaggtccataaaaaacaggttgccgaaaaataacctggacctagaatcaggaaaatccaggcctggatcaaagcacaacccgaactctagaaaaaaaaatgttttttagtccattttcaattttttgtctccaaggcaaagccaactgaggtattttgccaaattatgaaagaatcgaaggtaagctcattcggcctagattacgaatgaatcactgtgttcgggtgtcttttttttgtgagactcaaatataaggccgcaaatataggaatcggattctccgaccgtgaaaacctctaaaatgacttcactttgtgaaaaaaattgaaaaatttttttgagtaggggttggggtactatcggcactattacctttttaagtttttcacgtaaatttcacgtaactcacgttgtagctaaaattaaacgtcagattcgtgatcagcatcaaaaattagcctagaaaaattattagaaaagaaatttcagggggggtggcaaaacccggaaataccctttttttcatccggcggcgccatcaccgctacttgactccctaattactcaaaaacgcaaaagtggtcatttgggaatttgagcgtcgagactaaagagcagaattttggaaaaccccgttcccggacaaggatccagacacccaagatgggcccggacaaaatcccagattaaaagacctgttttaacatcactcgggccttggccaggacctgggaaaattctatagtatcccgccctctgtccggtctctagtcgagaatacgttagtgtccctccattgtcatttaattttcttttatccatttctgattcattttaataattttgtcatggacacttcgaatttttcaactccaaatgctcttctaccgtattgcaaaacgatcgaagaagtactgttgggctccgactattacgtcatgcatatccaaatgtttttgctgacttgcgtattaattttgattgttattttggttcgtcaatatttcaaacttcgaatttccatccacggaaacttaagggtattttattgaaaaaatgcaatttaattacaaatattaaaatgcgctcgcccattaatgagtttaagatcctgttcatcaacatcctcgtcctttacttcttccattctttgacttggttcgtctactttttgcgatatcgggtaatagttaattaattattaattaatgaattattaattaataaaaaatgatgacatcattttccaaaattaaaaaattcagttgcttctattcttttacaccagtacgtgtgatctgctgagccccgtttggatggtccccgtttttatgggcccttaccaagtgtattccgtcgcttatccgtctctccatttcgctgttactttcgaacgcattcgagcattgtttttggtgagaaacttcgcaaaatgccccaggctttctttgtttggtcccatcccaaaaaaacattcataaaaaaggcaaaaagcattcatttgagagattagggacacaatctctgagtaccaaatgagaaggatattcacatacaaaaaaggagacacttgcttggataattaattaggtgcacaattatgagcagatgggcccgaaactgatcatcgcaatcatctgcgccattgtctgttttactaattgctgttaattgtttcggttattaattaaccattttgaaatatcccaattcagtggcttgcttctttgctgtatttggcgtgcattgtcggcttggcactcgccgaccctcaaatctctggccacccccaaggcgttgtttacttgacctccgattacaatgccaacctgattttttgggccatgcttttcacgatgcttttggtcgttgcgacggcattgtgcgattggcgcatttatttgctgaacaaaaggctaaaccgggtcgggaatggcccatcgactgagtacaacctcagtctgaagtaccaaatcaacgaaaacaccctctccttgatgctgatcttcccgctggacttgctttacgcattgatttatcccatatacaatgttattgtgctggtccttcgcgcctaccggcaaatgctttcaaccgccaattacgtctcctattaccatatggcgaatacggtatggtagagacagaaataaactgacaataaagcatacggtaagtttataaaacaaattcccatttttcagttgcttttcctgcattctctggtcacccttgtggtgtatattcgatttatcaaatatgtcagccgcgttcgaaagccgagcattgtgaaaagtcaaccgaatgaagaagcaaatatacacttcaaacaattgcaagcgcaatggaaatgaatttttaaatgttttcaattataaaaagttgacgaattaaaagtcattaggcatttttcatttaatttgtttttgcaaaaattaatccattcgaatcaaagaaagtgccatttctgtcaccttaacaattgtttttgtgccgttctcaattcttttctgattggcattgggcaggccaaacgcattggtccgtctgcgaattgcgcagcattcccggcacacaatcgcacgagcaaaagcagtgcatttgcgtgcaaatttcgggcattgggttgtcgcaggtcggctcgcacccggcgcaacgcaattggccaatttgttcggaagaagagcactgattgaaaaatatgagggaatattataataatattgtttattattagtttataaaaaagattggatttattaggtgaaatgccgcaaaaaatgacaatttttttaaatagattacacgtaaataaacaaggatatttgaattaaattcaatgattcttaatttatggtcataatattttaagatagcaaaatcattcggaacaatttcatggagcttatttgttttttatgaaacttggtaagcctttttgcttaaacataaaatgctcattaataacaccaattacacttttttctttgcttttttatttattttagttatttaaattgttattaagttttaaaaatcggggccattacattgcatgctccgttttgagcagctaagggcagagcactgaataaaatggaaaagaaagttaaacaacgagttataattaaagtcattttgtatttaattatctaaatttatataatccaattattaatttaaataacaaataagtaatttttctgctaaaaatttaaataaaaaaaaaagcaaaatatttcaaacgcctctctctttgtttgatatagagaaaaagcgttttattcactcactcattggggcagcgttttaatatgtgaaaaatatatagttttctcaaatctcaggggtcagaaaacaatgctcataatcagccaaatccctacacataaagtccgaaagtccaatgggggggggtgttttggcactatatggaaagtgacagtttttgaaaagtttttcaaaaggggggaggaccattgtgttttgcaaaanttttttttgtgatagtcataaaaat

SEQ ID NO: 11090 - DNA, 539 bp, Heterodera glycines
  unsure (1)..(539): unsure at all n locations
aatcctccaattattttgatcaattgtgatttcaatggtggaaaagcggacaaataattatatttttgtaaagtaaaaagtataattattatttgagttcgggttagtgagtagaaattagtcaagatacatgtcagattagtgattagagtcctttaaaaaatcggataaaaaattatcatggttttttatattaaaaaaattttgcaaatcaaagagggtcctctccttttgtttcaaaaactgtcactttcncatatagtngccggtgttttttttctttttttgctttttaagtacccattaatttgcgtttttccgatttgacttttgtttttgccttattctgagcaaaaagaagaccaatttggggacattgttattcaaaattaacgaatgttgtaaaatgacaatggaaaaatgaaaacaaaatttaattgacaatttttgtgtggcagcgaaaatctgtcatcaccatcaaaaataacataaataatgacgaaaaaataataatcttctatgaatgaaaatcaatatat

SEQ ID NO: 11091 - DNA, 1334 bp, Heterodera glycines
  unsure (1)..(1334): unsure at all n locations
tagaccgaacaattttgaccctaacttttttgaaattccataaagttttcgaactttaacaaaaaaaaagagaaanctttttttctatctaattatataaatacaattaaattggttctttcagaaaaaagttatgaaggaattaatagtattatatttttatggtcatccaaaaaatgtaaggtcgtttaaatgcatgaaaattgttcaaaccttcaattatcacattatttgatatgaaaagatagcttaaagatttctttatgatgcagttaaatttcgaaaaaacttattgaatttcaaaaaagttagggtcaaaattgttgagtctaaatttttcgagttttttttgcttacaactttttgtaaatttttactaattttttaaaaattacataagttgtagagaatatgtagagctacattctaataccaagatgaataaatttgattaagtttaagctaagttatgattaattatttagcaaataaaatttaaataataataaaatttaattattacgtacattgctacttttgtcacttcggctcaccacggatttatagcattgagttttttggctatttttcctatcatttctatagacatcaaatgttggaaaagaaaaggaattgtgccggggttttcttcttttgcacttccaaattttgcgaacaaagggacaattgtctgtgaaattaggcaacacctgcttttaaaatcaaacaccaaaacaaaataaatttatccaataaataattaaaaagacaatccaaattaaattaaaataagtcaacaacaaaataaattaaaacaaaaatcaatcgacgaccaatcaacaaaacgcctaaaaattatccccaacgaccaactaatccaccaacttcactctagaaaaccaaaatatttgggtcgaattcaaattaaacattatgccaaacaaattcaaacaatcaaataaaaggtcaaacagtcactaataccacacaaacaccaattccatcagacgttcattaatttttaataataaaaagagttgcttatctcaaaggaccaaaaattgttacggaagccaagcttatagcgcttgtcttgaggtgattcctcacacaatttgggaatattaaaaattaattatcaccatcgatttacgcattcgttttttctatttttgccgcctttgtttcgctataaaagcgaacttttaatcagccattcaaagcaatgaatatttaacggtaagatacatacggtgcgatggaatggcacttgcggactatcattagcggagcatggaaatttcataggcttngaaacacagactaactaatta

SEQ ID NO: 11092 - DNA, 2273 bp, Heterodera glycines
atcaaatgtccttcaatgtcactttcattgttgtgatcggtgcttgtctgctgctcaaagtctaatattttaaattaaattcaatacggaggatttgagggtgactgattctgagaataaaattttgggatttttgctgcaagcaaaaaaacttaacaaatttggcactaaataaccattttacgtggtttaagtcaatatttatttaactaattataaggcgtttgagcgctggtggcgccggtaagcgccgcaggggaattttggtatttaatgcgaatttttacatttttatagtcagtactcagaatcagaactttctgagaagcgaaaaattctaataattcagaacatatggaacccctgctgatattatcgcatatttaacaaaataataaaaataaaaaattgatgaaaaattaattggccaacatttttataatagcatgaaaattgaagtttagttaaataatttataaaataaaaattattttggaattgttactttttttaccacaattttgatggatttttcgcatatgaaagttaagacctaccaattttgaactgagagggttacggtatcaaatcccaggcgatctaccgttatcattaatcatacaccaatcacattgttaattttttttatacatttgttccagtgccaaactcagcagcagacaatgcccggcaactccgtccaacaattcaccactccatcagcgccggtggccaacaatcagacggtgatcaaagtggccatgttggtggcccaaaatgacacggactttggcctgccgagaaagaactcaatgctgcgcaatgcgggaggtgcaattccaatggcactggagcagttgtgggcagacgaagtgctgccaaaaagcgtcaatttctcgttagcttttgacatattaatacaaatttttaatttccaaatttcccctctttaattgtctttcacacggtccgtatttatccccgactctttggtgtcgtggggagggattgtagccgttttcggcatccctcttaaacataattaacggatccagaaaaagacgaaaaaacaatttagccttttttggtcaaggctgctaacactaaaaacaaattatttaattttttaaaaattaattttatttcattttcgatttgaaatttagaatatattatttttttaacttaaatttaggtttgagtgggtttatgaaaagtgtaatgaggcaactgcgatgggattaacctatcagtttatccacgattttggtgctgacgcaatcattccgacgacgtgcatggagggtaattggaaattttaataaagatattttgattttgatcgacaagcatttcttttataatatgattaggctaatatttagtggcgccacaagtgggtcatttggccgctaattttaatattccgatgatcgtttggggacagaatatggtctcaaagtgagttcagtttttttttttaataaaagttgtttttgtaaataacaattaacctttttttgataatgaatttaattttaaaattagttaattttcttaaaaaattgaaacaaaatcgcaaaattttgttatctgaattccagtagtcctatcccgacctgatgccaatcccgatcccgactttttcaaaaatcagggctttataaattaattaattatcctaattaagtcttgcctcctcaaacaatgccacttatccaactttgctgaacattgtgccgaactacaaatagtaaatgcatttatttaaacataattccgcattttgttcattattagcatggcatccggactgatcagtcttttacagtatttcaattggactcaatttgccgttgtgatccaaagtgatcttggcaatgtgagcggaggtgaaaagtgaaatttattttacatattttatttatttatttttctttttaaggctgtgattatctcgccaaatccattgatgttattttttttaatttttaataaatatttttaataagctgaagacctaaatgaatggataattaaaaataattactttttggctggaacccaaaattaacattcttcaatcatcgtcatcataactagggcttcaattttaggttatgaaaactgctaaaattgttagtttttaggttcaaaaaaacctaaaatagttgttaaatacgagaaatagatgccagaagttttaatttgggcgtgtaaaaatgtaaaattttatccaaagagcaataaaggtgagcccaaatcagtatgaa

SEQ ID NO: 11093 - DNA, 1191 bp, Heterodera glycines
gcgttcatttgtttttccatttgtctattactttttattatgcaaatcattccaatttaagaactttgtgtacataatacctgacaatgacatgactttgtcgtgtaagttcaaattaacgaatttcttattaaaaaacaaaacattttttttataagtcaatttgtcgttggacccattttgggtgcaaacgaggtatttttggcactttaattccaaattttaattataattatggcaataaaaaagtgtcaattcgaatggacttgacggaagagacgcggacgctgaagtgattggacgattggcattttgggtaggtcgctcggggggcggaggaggggaaatttcataattaattgcatgtcgctacctttgaaattttttctggaaagtgctggaactttgaaattaaaaaaagtgccagagaccccaattcctaattactaataataattggacatttcccttctcaagtggcattatgacatcactctttccgcgttatccaatcgcaactattacggcttttacgggagagtggtcaaccgaacgtacggttggcccttttactgtcccgaatcggaatgtaacacagttgcaaatgtgatttttgttttgatcaaaaatatatgctcaacagtgatcatttttcaattgaagggctccctcaattccgtccttttgtacgatgccatttataattatgggatggcactgaatgagagctttaagcaatttggcatccgaagagagacataccgtaacgggtcattgttagcggccaataacagaaggccatttatgggtgagttggcaagggataatcacagctaattggaaaattatgaggaaataaaataattcttcttcaaaggtttgaccggctacgcaaccgtggaaactgaccgtaacacgcgggtctttgtgttgtccaaccgaaaaagcgacagcaaacaaagtccgctgcgcattttgatgcaattggcatggacaaacggcgaattggtgagaaggggagcaattaaaaacattattgcactaattagtatgcaatatcactttcaagaaaaaacactcattttgcatatttaaatttgcaacccgaatttaatttgttatttatttacatattctcctcgtcagaatgtggcaatgagagatggcaggtcaatgatgtggttttctcta

SEQ ID NO: 11094 - DNA, 1646 bp, Heterodera glycines
tattaaagggctcctgagtgtcccttttacagacaatgataagactaagaccttttcttaatctttattcaaatttacacaattacaatttatgcaaattgcttggacagaaaactgccccggttgacttaatgctgagtacaagaagtgtcttgtaaaaatctcacaagaagtgaagcaagaagcaaaaagtgaggaaaatggagaatgggccgggcttttataccctcacaaatcaatgggggcggggccaggcacgtgaaaaaggtgcacaaacaaatggacaaaaaatccataaaaatatgaagaagagaaaagatgactcataattagggtcgcaacttttagtgacgaaaaatcccgaaatagttaactaaaatagtgagtaaaaatgccaaaatagtgacaaaatagtgtcaaaaagtccaaaatagtgacgaatagtgacataattttcagccaaaaaataagccaaaataatttttattcactgattgcagttgcaaatgagtaggactgggatttttaagaccaaaaaacccaaaatagttacctaaaaaatttttaaaattaaaaatttttgccaagaaagtaaatttttgagaattttttttttcatttcataggagtatattttgaaaaattttagctcgatttttaggggtgtatttttttgaaatttttttaggtcgattcttaggggtgtattttttggttttattgcatttttgttaaggaattttccaaaaaatgtcgaaatagtgaaaaaatagtgacaaaacgccaaaatagtgatttttaactattttagtgacgaagtcgccaaaatagtgatttctactgaccgatagtgacatcagaatcgaaatttttaatgcagaaatgcgttttttgagctcctttcttcaaaacaattgagcaaaaaaaaagttttttcactaaaagttgcgaccctactcataattaaggagcgagcgaatggaaaaattgatcgatgaaaatggacggaaaaagaaatttcaaataaatttgtgtcgcttttggcgacagtgatgaagaagctgatgataccgataaaaatgaattatggttttaatacttcactttctatgtttctttggtatttaataaatattttttgatttttaggctaatttttttagaccattttgacatttttgttgtaatacagtatacttaatgacagcgtattttattttagaaatattttatactgacacattttccgggagccatgagaagtgtcaacatttgacaatttccctcccaaaaatcgccaacataatcctaaaccgtataagaattttttggaagtaatctgggcttttatcccgcagaagattaaggaattttaagaaatcgatttgggcagggcgaaaccgactttttcgatcgatcagtattttaaatttacaaattgcaacaataatattttgtcatatgcgtgatcagcgacctcaaaaatacacgggtaatatgtttcagggcttctaaccgaagaaaaatttgaaaaaaaaaaactaaaaaagtgcaaaaaattttcaaaacacccctctttgcaactagcgccaaaaaagtcatgatctaaaaaagtgaggatggtcactgatcagacgcgaaaactg

SEQ ID NO: 11095 - DNA, 1075 bp, Heterodera glycines
  unsure (1)..(1075): unsure at all n locations
tgtcactgatcagacgcgnaaactgggaatagagagcccttcnaaagatcaggaccggcacctgtcgcggaccaaggattcaaggctcggtcttccaatttcgtaaaaatttttagtcggaattccgttttccgaaaaatcttggagcctcccaaatgcccacccccctggtaggcgaagcaacaaaaaacattttaaatgcaaagtgacatcaataaaatacatagtatgcagaaattggggtttttaaaaaacaatacacgaaaaaagaaaatgtgaaatgaataaaataaaaatgagtaatttgttcgaagaattgcggccaaatttatcaaaaaagatgttgtcgtcatcggaatcactcatcgctggtcactgctgtcctggaaattttcgaaatattaatttttctaattgattaacattttgccaagaaggcgtctgaaaatcgtcgccagtgaatgcaaaaattggtcctttttgatgaaatctgataacaaatttcactcaaatttccaaaaaatttcccgcgttacctatcggccccaatgctcccttaatttcttggaaaaagcgcgccgcaacaaacatttattatcaatttttttcatttggaataaaattttcaaaaatgctgattttttggcaaacgaatattaagaaaattcaagcgacaaaacaaaaaattttttagggaattttttttttggaaaagagcgtgctttacccaaaaacctgcccataacaatgaaacgcccctaagcccacgcccaactgccacacctgctgtgccgatgaagaacaattagcaccactggcgccgccttcgtcgtcccgtccgcgcttgtccgcctccaactctttgatacgctttcgcaactgctcattttcagcgcgtaagcgttctcggtcatttgctttgtccagttcgctctgcagcactttgtttttcgcctccaatttgatgactttttcaaggagttcctgaacccaactgaattagtgtgcagcatggaagggtgtgaccatttcagtaccattgatcagtttataatttagcctaattattttttgg

SEQ ID NO: 11096 - DNA, 5099 bp, Heterodera glycines
  unsure (1)..(5099): unsure at all n locations
gctgtgtctagagaaggatattttgttagaatttttttttaagtatttgaaaaccctttaattaaatgccataagtagggcttcgttttgaaggcaccaaaagatcgcgaacgaaatagatacncaaaaggcagaaaaaatcgcaaaataggcattaaataggcttaaaaatttgcaaagaaattttttattaacacttttcagtttacaaacacataaaaacttaatcaaaaaaaaaaactttattttgattttcgtgcttatctgtgcgtattagggcaaaacatttgtataaaaaacgaagtcttagccataagcattaaattttactttttacattaagtaatacataatttttaagctgaaatgatgaaatattatatcatattatttgtattccatttaactaattttgcaaatggaagcccttcccaaggtcaatccatgtgaataattatatatttataaatattatttttgtataaataaaaaaattaattataactaagcacttagaaaaaaaactttttagaagacaccgacgaaggacaaaaacagcagtattgtgtaacggaaattgaacacgacccaaaaattttgcttgaacgtagtcaggatgccacagattgggcactgtccaatgggctgatcaaattagtgccggcaatgtgccaaaattgcagaataaaaatgcaaaatgttaattaataaagaaattaaaataaaactttaaattacattttcagcaaagcttcgtcgctgaatttattccaatttctttgtatccatcgccatttcccggcaaattatttcgacaagccatggaagtgcacaaagtaatcactttaagggtgaacagtagattgtgcgggaccgggacctggtactgaaaaaacgtacaactgagtacctaagtccaggttttgaccgggaccgggaaaagtcccgattttttcgcggttttcccagccaaaaagtcccgggttttcaacccgaaaagtcccggtcacggtttttctcaaaattcccggtcccgtacaactctagtaaaaagcttaaattaattaaattatttcgtcatattcgcgatattttttttccgaataaaaattgaagcaaactttaattttcaaaattaaatttaaataaaaatttcttcaattctccgattgatttgccattgaatttcacaggcaatgcttttgctgtattttcgcgcctcccaagattttgcttttttgaaagaaacgcatcgccaattagtggaaagtaatgaagacaacaaaataaagaaaatgatctcactgcttgacggtctttatgaggaaggcatcaaacaaccggtggcaatgttttgccaaagatcggtaggaaaatgccaaaaattaaatgataattcaacattaatcaaaattatttttaattatttttacctaaaattaattatatttttaagtgaataatgttaaatagagataacatttataggcactaaaaaccgccaaaataggtaggctttaggctctaaaaaaccccaaaaataggcactaaaaaatggaagataggcactaaaaatcctcaaatttagggggtgtaaaatgacaaaatgtattcgaaaaaagtaaaaaaaaattaggccaatattgagataaataatttttaaatcacaaattcttgtcaagaaaataaataaataaaatttggagatgaatttttgaaaaaattttttatttcttaggggtgtatttttgaaaattttcgggtcgattcttagagatgtattttttgaaaaaaaattaggtcgatgcttaggggtgtatttttcgtctttattgcatttttattaacaaattttggactcaggaaaaaatagccttttgcctaaaaatgttatccctaattttaaataactaattttacatttatcaaaaggattacatggcgagtcaaaacgatgatggagagtatttgctaaagcaggtgattacatattaaaaacaacaattaatggataatttctttaaaagaaatttttttaaaaattattcactaagataaaaaactaacaaaataaaaaataaagaaatttgaattaaaacaactaaaaaatttaaattaaaaaaaaacgaaaactgaaaataaattttaaaaaaactcataacgtttcagcatcttggtcccattctgtccccgggtaacctcgatcgagatcaacctaggctttttggttgattctttttttaaatacatttcggttgaaaatttgggcgccggttagggatcagggctgcacgcatttacggattacggaaactatggtctttttgggccccgtaattacggattacagctttccgtaattgaaaacccagttgcgtgcagccctgataaggaatcctcctgttaaaatagcaggcattaatccttgcaactttgtcgggctgcaattctctcgggttctgttcttgatttttttcaaaattggctctaactttttgcatgggttaggttgaagtgaacaccggcgcactcggtggcgttggagcatgttcacgcgtgtccgagcatcataaacggatggtcgcaaatgcgggcattgacgcgtccgaggcggtgatgccattggaccaaactgatctgttgtttgccgaaacattgtatgaggcatggtaaggaaaacgggcattaattttaaaaaaattcattaaaaattccaattttccccaatcggcatcactggatccaaaatgccaataatttactatccaaattaggcataaatccagaaatgaccatttttgattaaaaaaaaacaattttaacaaaataatcaggcataaatctgtttacaaataacctaatttcataattttttaatgtttataactcgtggtgttttaaaggaaacaattcggtgacaaaaaagcggtcattcttttcgtgcacaaccaaccgagtcacataaagctcgactcacgaaaagtacagtatcaattggaaaaaattgcaactgaaagaataatgtgccgatttatcactctgtcggagggactcaaacggtcagtgacagaaacaaaattttaatttttggctaattttcttaaaatttttatttttttagcttaaaaattgatccgaacaattttaacctcattttggacgacaaatttgttgttggggttgtgttcgatcgacttggtgggccaataacaagggcagaagccgcacttaacttctcttttgagcgaacaacggccatcgtaaaaccaattataaataaacttttttaagataaataaactgggataaaaaattaaaatcattaataatggcaatatttaattattaattttagaaaactcctccgtatgtatttgctgtcgctcatacaaagaaaatgcaacaggtgaattgtaattttaaaaaaaaattattaataattagagattaatctagaattgaaatcaggccaggatttttcctggatcaaggtccaggctattttttttggcaacatgggttttcctggatttttgtccaggaaatccaggtccgacatggaatccatgttcagaaattttttcaaaatgcagaactctaataataactaagaatatccagttttcgaggggaggtgttagctaaaagacgagagatctttggcccaaagcaattaaaatggccaattaagattatttcggtttcaattttgattaggtgttcacaaagccgggcatggtggagcgcttctttcccgatcccaaagaagtccatactgttgaagcaattcgtagggtccaagcaaaaagttgggcactcggagatgacgaaaatgaagcggaggaaatcaaaaaggcaaattaaaatattaaaagtaattaattcaaaaatttaaaatttcgcagaaagtgtatgaaaacccacaagactatgtgctgaagacgaatgaatgtggttcgcctaatcaaaggatgttcttcaacgacgacatccccaaaaagttggcacgaatgacacccgccgagcacaattacttttacatcatggaaaaactgcgcccgatggtcgttaaggtgtgaattttttttccaatttaataatattaaaaagcgaataattcaataaaatgaagtattcaaataggaaaatttgtcaacctggatttttcatgggctgggttttccttggtttttgtccaggaaatcaaggtccaacatggaatacaggtccaggctttttcactaataccgatctctaataattatagacaaaatgctgtatagatttagcaaaaaaagaaaaatgcatttaaatacatatataaactggtcccgtattttacaaagaatcattttgtgcgcccaaaaattgggctcactgcgaatcttgacgtcacaccggagcttggcatctatggctgtctgatcggcaacatggtcaccggcgaagtgtcatatgtctcccgatttgggcatacgatgaaaaccaaaacggcggatgaggacgagggcggcattatgagagggaacagtgtggccgacacgccttaccttgtctagaagacaattagagcaccctaccgtatccaacacaattagcacactaccgtatccaacatattttcaagtgaatactgtattttgtaatttatagctttttgcactccttttctcattcatgtgatcatttaaaattttcgagcctatctattctattgcaatatgcaaataataaataaagtatatcacaatacatcaatttgttcgtcgcttgtgcatttaaaacttggcattttggtcaatgaaacagactttaaaaaaataattcgctggtttgagtccgcaaggattctttttaatttaaataaaaacagctttttatcaactatgatcgaaaatttcctaaaacaagagcattgccagtcaaaaataaggagattttaagccttcaattaaaaacatgcatttctttttttgatataactttgctcaaatgcaaccaaattttaaaataatgatagttttcgatagcactaagtgttttctataaatttgcaggtagggtgaaaaatggttaagtttcaagaaagttagacaaaa

SEQ ID NO: 11097 - DNA, 1265 bp, Heterodera glycines
ttcttttctttgcttccatcggtacttccatataagtttcaccagcgagtttcatcgcaaattcatgcacccgatcgccagagaacacctttttttttgttaagttgttttgtgatcaaatccctttgaaatggcttgttcccaccgggtgggaatgggcgtccgccatgcccggcagaacactccctcccccacagtccaccctcgtcacatcggtcaattctttcgagttgaatcgggaagaaatctgcgcctgagtttatgaattttacagcactttattttcgacctcttcaaaaatgccaatttgctcaattcgtccttcgatgcaaagaatggccaattcgtggccatctgattccattatcttttgaattaagaaatttttatgtgagaattttggaattagcatcactttgattttccccatttgatcacccaataaacaaaaagtccgatcatcgtccaccacttgaacaatctgtgtgaaatcaaagaaacaatcagtggcaaatattactgcaattgtctgtcctttcacccccgccccgcacctccaaacacttaaaccattcaatacaaatctcttggatctacctgattaatgttgtgcagaatgagcacgtctttcattttggcgctttcttttgatttttttaattaacaataattgaaacaaccaaaataattatggaacttaatgaagtccaatcaaatgaattctttaatcgactaatcttaattacctacatatctctcaccttaattgatttattagattgtttatttgcgctgtaattttttttaatgtgcgattaaatggaaacggacttgaccaccataaaacgttctgtagcccacttgataaaagaagttaaataattgatttttaaaagaaacactaaatttcttcagtttgactaccaaaaaaaggaattgaaaggggcgccactgaaagaactcgtctcagtggtcaagtccaatgggaaaatcattcccgcatttgtcgacactcttttcggccactttcgaagggatgacagcgacgtacggctggcagcacttttcattgccaatcactttttccaacgttcccacaatttccgcgcggaactgaccaattcaattcaggtccgtcgtgtgtttttgctgtttatttttgtgatttcttttaggatttcctcatttacactttggaaattgaccctttgcgttatcctttgcccaaacttcggaagcggcaatttgctgagaaagaagtctcg

SEQ ID NO: 11098 - DNA, 2447 bp, Heterodera glycines
agaatcgcgcccggaaattgaacgccttttggtggagtcgcgaaatgtcgtcgaaatgatttttccaaaattttgtccattggacgatgaaaatggggccgtttcaattatttcatcgcaaaatcaaaaagtaattattaacttttgacagctattttttcttttaaatgtttcataattttggtaaaatgcaggaacaattgcatggatttggaccgtcatccgcggtgactgtttcaataaatccaacggaatcgaacatcgaacaaaattacgaaaacgaggcattgttcagccaactcactgatactacggcacagctggagatttggtggtctaagcttggaaaatggcaagtcttgcaattaaaaggccatttcatctgtataaaaataaactgacgtttcaattaaaatattccaaaaccttttaaagtgaattagcaatgatttaggctcaaaaaattggcatcggtcggtgactcatcggaagtgatgcgcagaataatcgacgcaaaacgaaatttgggcgaggatttgcagaaatgtcgcgagttaaaggggaagcggaaaacggagggcgaagaatcgtccgccgacgaaggggacgacgattcggattttgtcgatgttgaggagaaagagggtccgagtaaaggacaattgtccttaaaacccattatttaaggatatgaacccgacttttcacataatgattgcaacaaaagcagcgacaaaaaagcgaagtgcgcaataattctcgatgaacggcctggtccgagtggattaaaagtgcaaaaggaaaagccaaaagaggacgaggaaaagggacggaaaagcgacgaaatcaatgggaagaaacgcattccaaaattggcgatgggactcgatctgaaatattggggagaggagcacataaagccggcagagagggtcagagttcaggcggaaggccatcacttttggagaccaatggacgagtgagtaaataatctaatttaatttaattaatggtcaattaagaaattttctttcccattcaagagacgctgacaatgtgcccactgaaaatgctgaagcgtatcgttcccgacagatcactttcgttggccaaatgcttccgaccaaaaaacgctgtcgagcgcccctccccagcggaaaattatgcccacgaatggaaagagagcgatgcgcacttcacggaccaatcattgacagagacgaaatgggatttccacagaaagagcaaaagtggggaaaacaaaaccaactaaaaaacatcgaacaatttaaatttcagagatgaggacgaaaacctgcaaaatagcacagacgaagcggacgaacagcgggaagaaagcgaggcggaatttttacaagatttacaagaagcgacaggggtaaaactaaccgaaaacagcaaaaaagtgaaaaagaaaacaacgaaaaggaggaaaaagaagacaaccacaaagaagaaaaagggaaaaaggaagaaaaagaaaacggcgagggaacggccaaaaccgaagagcgaaaagtcgcgggagagattagtggtgagaaaggggggggggcgggtagtttttgcgaaaagttaaatcccaaggccaaactgttcgacaaaaaaacactgaaaagggtggccaaaacactcgaacagatgcaaaaggcacgcgcaagtcgcaaattttctagccaatttaattatgcactggaaagacgatgataagacaaaaaaatttttacctttttatcattattgtaaatatattcaagttaaaaattttcgtcagaatcatattctccttcaatcgagagtataatcagagtactaaataagtaacaggaaatgattgcacaattacattaatattattaatttagaactaccatattattcgataaaagagaagaatactcggctcttatatggtttgtcccccataaatttgttgaaaaaattacaattttttaaaagagtcgagtagaacaccttttcttaagttttcggggtcgctgattaataatccggcatccgttttgacccatttcgaatccgaactttaaaaaaagtcaaaaactcaatttttatgccatttagtagcattgaatcgattttgtacaaaaaatgtgaattttttgaaattgaggttttgactttttattcgggttcgaagtggatgccggattcgcgtgatcagcgaccccaaaaatctaaggaaaggtgttttctacttgactcttaaaaagtataatttttcaaaaaatttgggtgtactatagtcaaccaaccggaaaaaaatggcacaaatgatataccaatcgattcgtcttgacgagctatgctcgaaaaagtaggtctccagttgcggaaatgccaaaaaaccggcttttgaaccggtttaaaactcgaaaaattgagtgaaaaaggtggcccctggccct

SEQ ID NO: 11099 - DNA, 2011 bp, Heterodera glycines
  unsure (1)..(2011): unsure at all n locations
tcaaattaactttccaaacatttctgccacttaatctttttttagttaatccttgaaatccgattttttcagttgagttttccaaatttcattataggaattcgtctcggcgattgtatcggtcggtggacgacgaatgcgacgacgcttattccttcgattacggtgaacgtaatcgacaacggtacggtatgcgaggaatggcactgattcggggtgatcagcagcagcagcagcagcagcatgatgttcatcaataccagcatcaacgtcgctttttgcccgatttgccgaccaccagcagaacaatgcgaacacagatggaagagtgggatcatttttggaaatttcaatttgattttgggactgtaattaattcgcgttaattaatggacgatcacgggcgggcgatactgtaggcaaccattcggtaatgatcgctcctactgtaggcattgaataatatggactattgaccgctgtaccgtgactgatcaattcacaatcttccgagaaattttccaatcatgattggggtactgtaaagcgatagtttctgattggcgaagaatctctcacactctaataatttcatttttaggcagcaattccccgcaccgtcctctttcccccgtcctctacattttaacagcactaataataacaacagtacagcttggcgctactaccgtatgcctcccacgagtcgccgtggcgtcgccgaaccgccgccgccgtcgttggcacgcttcaactcgctgaatcgaatcgcagtcgcaccactccggcgcgacttctccgtggaccgtcgtactgagtcgctgtttcggcactttgtgcgccccgatccgtttgagatactgtagcatttaccaaaactatcgaacaataccaagaatgtaaaattttgttatttttagaaaaagttatgccataaaatgccggattttacgaaacgacctagcactaaactatcacaaaaccattaatgagacaaaaatgcaaaagcatttttattattatccaagtgccaaaatctagagaattttctatattcattatgatgttgcttctttattcaacgtaaaaatgaaaacaaattttcgaaattaaatcatcgaatgaataaaatgaattagaaattaaaataatagaaaaaaatagtaataataatagtaagacagggttgtcaaatgttctgttttatgatttgaatgatttggagggtcgaaatttttaagtgacccgtaaaatttaaaaaaatataaacttgacaaccctgtaataaaaaacaattaaaaacaaattaaaacaattaaaaaatacaattaaaaacaaattaaaaataattaaaaacaaatgataaataattaaaaaacaattaaaaacaaacaaattaaaaattattccaccttcgcggcccccactcgcacggcatgccccgccggccatcagcgcttttgctgcagaagcaatgcgtgcaactgaatttggaataatttaatttttaaaaaatttgggccaatttatcgccatttttttggtaaattactgaaacactttttgtagcttttaaaaagccattgaatttcctatttaattgtatcaaaaaattatgttaataatagtagttaattagttagtttaattgattagtgttcacctgaatgtaatcaggatggataattgaggggacggctaacccaagtcactctttagcctaccattgtgaacgggcgaggatgggaagaccggtggcattttcggggagggcagtgatttataaataattattaaaaattgttttttttaataaacaatttttgattaatgaagaatgaataaaatggaaaacgaattgcgttttaaatgggtgcgggttcttccaaaaagtgagggcactcctccncccattaacatcttaagctcatcaaattgaacagatgggaattagcaaaacactgtttaggtgtattgcgggtgcacaattacatggatgtagtctttggca

SEQ ID NO: 11100 - DNA, 3286 bp, Heterodera glycines
  unsure (1)..(3286): unsure at all n locations
aaatttttcaaaattctttctaatgtatttacnctcagaaatttntaatattacagttattttttagtcatctgaagataatgttaaacacgtccattttcgaaaataaatgctaattatcgttttatttaattagttttaaataataatttnaaatttaaggaagaaaatttttttttcttcatccgaatggtcttgtgatttatttcgatttattcgatttatttattaatttttaattaattaagcagtaataatttagatgctgtacggaatctgtgtcccatctcgagtgggattttcctggaatcccgacttcatctgattctaatccctaattcccgtataaccctaacttggtgtataaaaatgcaattattttaataaaatttctttttaacttttgttgattatcttgttgtgctaaaatctgatttccgaaattatgttttatttataaattacaaatatatttttattatttctaattaaaccatcaattagtcatgtgatggaactgacaaacacttctttcatatgatttcattttatttgatataaattttagttaattaaacaataattatttaggtgagaactgaattgtcccggaatccctaccctaaccttcattcacataatacaatattatatattttaataatatttatttattttcttttgattcgcttattttgatgaaacacactcactcatttccgtaattttattaattatttttcaacaattttaatttaatttattatttttaaatttatttttattatttcttttttaaaccttcaattggtcttgtgatggaactggtaaacactcattaaacatcagcactcattcatcatttccgatcaaattgaagaaaaccaaaaattacaattttttccccaatttcccgcgtccccccataaaaaaatatttgaaggccattcattcgttctttcgtcgttcgttcattcgacgccaaaaattcatttaatttgcgcccattttaccgaagaaacatttgtgcccaaaaattgccttctcatctcacaaatcagcaacaaatgaattgaataaataatttttcaaaattcattgataatgatgaaaatttgtttattttttattttttgtaatttttttaaattgcaaaatgttgcatattttttacataaaagcatttgtgatgtaatcaaccggctagaatgaaaaaattgataaataattggtcaattaaagctaattaaggttgattccgtctgttctttgggttggtctttgaacctatcaaaattaattttctaattttaattttttttatatcttatcttaatccaatcatatcatcattaattagcaggatatcctataatttaaaactttattatgtattatgtaaagctcataaattgctaaggaaaataaacgaaataaaattaaaattttaatttaatttttaaataaataattttttgaaatgtcatttgtcctaaatgatcaagaaaatcacaattttactcaaaattccggtattctttgtataatgatggattggtttcgatcagtttgatggacctccgatcgttcgacacttttgatcaatttaaaatcattgattggcctttttaattggaattgacgggcattaatttgattcttacccgaccaatttatcttttctaatcatttccattattaactgttaaataattaaattcaatgtttatttttaaatttaaatatattctgaccaaaactcaagcatttttcgtttgttatgtgaacctgatcacttaaaaagattattccattgattggtcatatcctttcttagaaacaaccaaattaagattttcttggcataatttggtagccctaattaccctcaattagtatgaaaaattcaaataaaaaatttttttccacactcacaaaatgcatattatacacaatgcgaaatccattccagttccgtcctgtcctatcttggccaattccgtcaattcctgatccatgatttcatgacaaaatgccggtctttttgtgccgaacgcacaccctttttggggttggtcaaaagccagggcactcactcactgcttcttctcgttttgctcgcggcgaagcttcatcatcattagctgagggcatccaaaatgcgccgttttgcggggcgaagcagcacacaaattaatcattgttaatcagcggtcggttcggcggcttaattacccccttcccctcactcactcccgcccctttctgatcagtagggaaagcgcgcagcaatttttaacttaatttttaatcaatttttgaatttttttttgaattttatgaatgtttcattgcatttttgacatcaaaatttgctttggaaacattgatttgaataatctgcacaaatccaatccattcagcggcagcgcgtcacattttgtttaatccgctattttttgcaagcttaaaatctgctccgatcatccgatttagtttttttgacctcctttaaaatgatttgactttgtttttttttaattttgactattttttgtttaggtaattaaaatcaaagtttatttcgaattgccaaaatggattttttcttccaaagccctcccaagccacttcaggttatacaaagctatttttataaacaaattaattaattgcattattaatttttttaattaaaactaacatttaaaatatttacaatttttcaatttttatttttatttattaaactaatacatattgacatttaattgttaaattaaaatattttttgccatgtaaaattcagttttggccaaaccctccgcccgtgccggccaattttgcaaggccccaaacatttcgtgaaaaacattttggacaatggtgccgaaatttgacgctggataggtcattggaaatccaaatttttttaaaaaatccattaatttttattttaggcacattcaatgcccaagggcgtcgccatttcattggttcaccaataaataaataaataaaaatgctagagctcgacctggacttggcgccaggcctgggtttttttctgggtcatgtccagaccaggctatttttcggcaacctgggtttttccggacctgaatttccctgggttttgtccaggaaatccagctccaagtcaaatattaaaaaatccaggtccaggctaaacatgaaaaaacatggatttcctgggcaaattttagaatttattatttcaagtaaccaatatattatttgaattatcaaaaaaaaagttaaataa

SEQ ID NO: 11101 - DNA, 2186 bp, Heterodera glycines
cggccgcggtttttttttttgcgcgatgcgcggtcgcggccgcggcaatttgaatgcgcgatgcgcgatgcgcggccgcggtttttttctgtgcgcgctccagccctgatttgaattctccgcggcgttttcccaattcccttcccccaattcttttccccaaattcgcccaatgccttttcttcccaattctcagattgtggcccacccccaaagtggacctaagtgccgttgagccgagcttccgtgcccaattggagtccctttcctggtattcgtgcgtctccgattgggccaccgataagccgtcgccctttggtgccgctcgcagtacgcgcgtgtgccgttgctgctgctttccgttcaggccgaacccaaaaacattgaaatgcgaacacatccccggggcacccgaagcgccgggagaggagcaattggaggaggacgaaacggagagaaggagcagagaatggaaatgaaactatggcattttatgtgataattggggatggcacaacaaatggaaaataaaaaggaatttgctcttctctcgcttttcttagctttgcactttttcactgtctttggccgcgtcgcgtgtcgaattcggtcccttccgttcgctccgtccgtcgataggtcatctttcgccgcccgcctctccaccgtcgtcgtctccgtgccgttgctcatcgtccgccatccgtacgtgccgcacattcttccgcgaccttcccaccaccgttgtcattgcggacggtggtgccgtgccgtgttggcttccaccgcctccgctgctgttctgttcgtgcgtggccaccaactgcgccacgcggccactcttcgtcggcctttgtggcgacgtgcccgcctccgctcgtcgtccgtccgtttgttcttccgccgccgttttctcctcactctccagcatctttgactgtctctttggccttaaattggccttgccttttctctttcccattttttggcctttcacctgaaactgtctctgatcggctccaaaaatcgcagcgatttccttcttccgtccgcttttcttctcggcggagggtttgctccagtacagtaaacctaagcagcagacagcggagttttgattaatgaaacaaataaaagtgaaaagtttaattgccccccccccgcccgatttcgtggaccacacacatttaaatccgtgcgatttgtcctcagtttgtccaagcgacgggcgatgcgcaaataactgtcgtcggtttggatgaccaaatcctgtcaattaaattgatttaattttgcaattttgcccacttggctttctgttagggagtgccgtttttaggtttctgatcactccaccatctctcttcccccctctctctcacctttttctctctctccactctctctctcgccctttctctctgtcgccctttctctctgttcccctttatttctctctctctctctcccctctctctctctctcgccctttctctctgttcccctttatttctctctctctctccccctctctttttgctcgcctttttctccgctctgttcggatacgccatgttcagcagttcttccatttcgtctccgactgtcgctgtgactgattcggaccgttccctctgttcgctgccgttgatcgatgcttcttcatcttcatcctccattttttcgaaggtttcgtcttcttcaaatggctcgatgaaaggttgccactgatcagtttgggcgccgatgtcgcaaagttcgggcggcggagagcattgggccctgtgttttgttaattaaaatgggcactttccaattggcattccgttgccattgttcaattgcttttccctttttaccatgcgtctgtgactgcttcttcttcgaattccgcttctctgcccgtcaatgagaacattcgcctccgatgatccgcttttaacttctccgactgttcctcctcttccgatgggtacctttgggtgcttcgtttacttctgtctgatcatttcattatcttcgcgccccctccccctgttcacatcgtttgcactgatcgctgctgccgcgtttcgtccctctgatcagtttgtactcctttgaccaccatatttctgatcatttcgttcgttcaagccatgcgttcttccgttcggattaagcctttagtatccgtgcgcttattc

SEQ ID NO: 11102 - DNA, 2292 bp, Heterodera glycines
  unsure (1)..(2292): unsure at all n locations
attaggtggggattatttcggatgttgccatcgtaaatccgtcttgttacttggtgccttgtataattccccaaaagtgccattcccaaaatgccctccctcactttttgtccgtcttccttttgttctgtgtgcgtcagtttcgtttgctcctccgcttcgtcctcctcctcttcctcctccgattgttctgtttgtgttcccctcgtgttctccgatttcgtcactttctcatagcattgcgtctttaaatttactaaaatgtgcctcatttcccttaatcccaccaaattttccaatttagccttctgcgtttcactgacgcacaatggggccaattggcgcatataccacggctccctggcgaacatttgggcaatgatttggtcgcgttctgtcggatcggtcacttcacggagcgctttttgatattccttctggacaacaaacaaatgaccaaaaaatgaaaggggggggtgatcagagtgatctgatcagaggagggggagcagtgcctgcatttggatcatcattttgtacagccattcctccattttgatttgaatcaccgacaaaagcattgacacaaaggacagtccgaagatgacgaaaacgaacctggcaaagagaaaatagaaaaaattgtaaaaacagcagcagaaaatggaacggacatgagaatgagcatgtgcggatggtcgggcacaacgtcaccgaggccaatggtaaggcaggagatgcaaatgaagtagaaggaggtgaagtaggaccaactgatcaggggcacaatttacatggcaaatatggccaaggggcaaatggaattgccaatggcaaaactaaattcccccgtaggggggggggacactgaccgactctcccaaatgaggaaaattgccgcaattgtgcacacgtaaccgctgacaatggacagtgccatccacaccggaatggtcctttgagcggagggagattagaagcgattgaccactggtcattgctgttttcttggccttcggactatgtcatggatcagctgatcaattggccttctttaggacggttcatccacagatttccccccccccctttttattcccccctttttattcccccctttttattccccctcttttatttccccttttatccccctcgttgaccccctctcccacccatccagtgattatctctctgatccctcatgccctttcccccgttcgtctgatcacctgctctccatcggctcttcctcctccttcgtccccctcccctcttctgcccctctctcccctcctttgccctcttccatcgctctttcgtctttcgtcggtggcaattccgtttttgatttgatgcgttcgcgataactttttcggaatcatttattcgttgaccaaaattcactcaccaaagccatttttcgctcaaccatttggtcatctttttgctcgtcttcaatttggggggggggcaaaaatcattttataatcactttttgattatccaaataactgtttcttttctcatttctaatcattttgtccttttctgatcacttcccgcaaattttcgtctcacctgattgaggatggccaacaccttaacaaattgaacagtttggtcatgccattgccagaatgattctgacaatgagtacagtataccagcggaatgccgacgatggcgtacaaaatgcggngtncgtgcccgggcgatgtccgcggagtgatgttaccgtagccaatggtcgtaaagacagtgccancttgaaaagcgaccgtaaccgcctcttcccactctctgcgcttaccgtaaaacagagcacccaaataggtccattctgaacaaaaataatgccattttaagccaatcgactgcattaaattccattggcacgcaccgagtgttccttccggcacttttaacctcgcaaaatctcgttcgtagtccgtcaagacttttctaaaatgctgaaatgcttttttcccattttattcactctctctctccccccccccccttttctctccctttttgtctctctgttcctctctctctctctctctctctctctctctctctctcttctctctctctctctctctctctatcttcctctctctttttctttccctttttatctctctctctcttttcccctctctctctccctgttcttgttttctctctattttccactctcccttccccctccctttgtctcccctagcttttgtgccaacttcgatttgctccaccggtcccttacgagccctcaatgtgccgtcc

SEQ ID NO: 11103 - DNA, 3604 bp, Heterodera glycines
tctccctctttctgatcacttttctttttctctctcctttcacttcgttactcctttctctgatcagtccatgtctcctgccattagttcccaaaattctgcaacatcaaattcccttctgtccctttacatttcgccaccttcgaattcgattttgcccgatccgtcctcgtcaatgtcctccaccgccgattggagctctttgtcactcagagatggctcaatttctcgcagcaaattcttcaaagtgtcggtggacaaatagccattgccctgggttaattagcctaattaatgacccgacgatttattgctccggggaatgaatgttttttgagtgttcaaataaaaagttggccttccatcggataaaccccctgcttctgcccacctccctgtcgaagattcgaaatgcctccctcagctctctgcgcaacgtctctttgtccaccgaatttgctaccgtatacacctgtcgttggttcatcaaacgtttccccccggtaccatatcgcccccccccttttttaccaatgcgcagaattcctcaaattccaatttgcccgacccgtccgcgtcaaactttctgatcagtttgcgcagcttcttctcctcaaagtcctggtccattgcccgcattatttggccaatttgcgtggccatgatgtacccgtgattgttcttgtcgaacatgtcgaagaacctttggtactctgcgcttttggcttttgtttttaatttattcaaataaaatttaaatgattttgccttcgatgcgcgacccgtcaatttcggccaaaatttcctcaatgttttctgcgtcataagctgccttaaaacttttaaaattcattcgaattataaaaatgccaaaaattaccatttcaattatttccgttggattaaatgaatgaattatgttcgaaatcggttcaatttatgggggcatctgatcggatctgccaacagatgtttctcccctccccccgtccatctgtcgccaatgtttctttattttttttcaaatttttcatcccacattttctcccgccaaacttttgccccttttttccattttattatgccattgcttttcgattggccaatttattcctttttgttttaaatgtgcaaaatatttttaaagttttttgtgtttccaatttacgaaaaaggctttcagagttggctgcacatggtaacggtggctttgttcttgttcagttatcacatgtggtccaactccgacagccaattcgacagacaacacaggacaaatggacaaaatgttaaaggaaattttaaggaagaaaaaacaaaaaataaataattaaaaataacaaaaataaatagtaattaattaaaaataaacaaataaataaataataaaataaacaaataaatggcgactttttctgctcccatcggacgccgcttaaataaatgcaacgaatgaatggcctcgacaatttacgggacgagaagagaatttattatcggagcataaatcagcggacggatggcattcagtgaaagcagtgggaaaaaaggaaaagccaacggagggaaagtgagaagcggcaaaaatggacagaaaaagcgatcggaaggaaagcgaaggaaatcaaaagaaagactttggccttttggggtccatcggcaggggaaaagacggacattcccacggactgtcgtaacaccgtaagccaacagtgatcggcggaagaattgccgatccaaagcgacccctcccccttttgtgaccattttcaatttctgatcggattaatcaaaggcatttgtcccaccaaagggatggcattcagtgatataaaatttaaatcaaaatgttgtctctaattaattcttttaaggtgtacaatttgtgaattgatcacttttgtttttgtctgtctgtctgctgtctccctcttctctgtaaccgttgtctttcgcgtgtctctgcttattcactgccctccccgttccccactcactctctctctttctctacacaaattcgatttcgctgtcctccgaaagtcctcccaatttcactttattttcgtcgaataatttccgcagtctttggcaatattccgcgtgtattctgtccaccgtttgttcgtcctcacaatttgcattttcttcaatttccattggctcgcccactaaatttttaaataaaaattctggttcttatccaccaggaattctatagtgcctactccctcatatccagggtagccagattaaaattttcaaaatcctcattgacctatcaaaaagccacaaaatgaggataaatcctcagatctggctaccctgctcatatcctatatgcgcaactccctttagcgcagcatcttacttttcatttttttgctgttaattttctcaccgattgttacaattttccgccggtacggaaagattccgacgcgaagccatcgcggcaatttttgtgccgtttcttccggcaaaagggcagcgatgaaactttggccataggccaacggaaaactgacgcgggttaatcgtttcaacaaattctgcaggggagggaggaaatggcattcattttgagggaatggcatttattttttggggaatggcattcattttgagggaatggcatttattttttggggaatggcattcattttgagggaatggcatttattttttggggaatggcattcattttgagggaatggcatttattttttggggaatggcattcattttgagggaatggcatttattttttggggaatggcattcatttttttgatggaatttcctccgatggacctgcgttttcttcaatgtgctcccctctctgctttctttttgctcataaacgtcggtttctccaaaatgaaacaccggcacaattgcgacaccaaaacggaaattatttaaaatttgaattattaattaattaattacccgtgtttgatggccaattttacgaacccctaaatttgctttcttttttaaaattttgcctttaaaagtccttttgcctttctccgtgacgtaatcagccgattcgtgccggggaatgattccaacgcttcggccgcccctccaggcacaatgccaacggcaaatccgcccccggggcgactcaaaacccattcgatggatttgctgtcactcggaatcattcctttcgattgtaattttgaattatttccaaatttgtcaaatcacccgaggccattatcatttctctgcgcaaaggaaaccaaaagttgaggtccaaagtgacggaatgcattcggaggccggggaaaagagaggcgaaatttgcaccatttgtagcgaagaaaatgaaactacttgagccgacgatgccgtgggggtgggcactgtaaaaagggaggggggtagggcaattaagtgccattaggggttaattaattgcctgaacaaataattacgatccgcggaaagatcagccgttttaatcaccgaaatcggaaaataagtggccaaatggcgccaaacgggcgaattgtaaaaaaacggccagaaatgggagccgcgcgaaggggtagcgaagtcccaaacgaaccaacaaaagtaaagcagcaaa

SEQ ID NO: 11104 - DNA, 1134 bp, Heterodera glycines
ttattttttaataaaataaaaatattttcaatgtaatctatattataaattttaagtaaaatcttaacgtggacatgagattagttttgatttagtattttttaaaatcaacatatacaaatttaaaaatttgaatgttttcatttattttttagtttcttaattgtggcagatcctccaaatttataaattcttcatcgacaacattggcaaaataatttctttattcatgttcaaaatttcaaatttgaattttagtgatttattttactcaactattaaatcctattttctccgagcaattaattttattttttcttatttactgaatttcaatttaatttttagaaactccaataaatttaaaaattcttagagtatattggcagataaatctttattcaaattttaataacttttatatttattcgcgatggcaattcaaaagcattcgttattattttgtaaaattccaattatttggattagattgctaaataatatttttattcgaatagaatttcaatttcaaataataatacaacaaaattctttaagcttttttaaagtttcaaaatcttagatttatttttctttgcttttataactttatattcaatttgcgtttatatgttatttggtaagtcaaattattttacacctttacatttatattttttaaaattcttattaaaataaatttttataaatttttcataaacacttcatcattcataataaatatattgcgtttgttatgagtactgtaacaacatcatactttttattcatttatttaaaaaatttaattgaatatttatttaactattttttacaaagaaatttttattttttggaatttcggaaatatttccgcgaatataataaatttaaaacgtcaaaacaataaataacggcatctatacataaatatcattaatctaagaatttttattcttcactcgtctgtaatgatgctcaggtatttggatggaattgacattatgtgatttaaaaattgagtatggcatgatatgatatttgctgtcatgggatgaaactcataaatatttcatatatgagaaaaatggaataatttaataaaatttacagaaagtttagtttgccaatgtg

SEQ ID NO: 11105 - DNA, 1874 bp, Heterodera glycines
ctttatcaatataaattaaatcatatatattttattataattaaacctattaaaaaaggttatcgttttttcaaggagtcaatgatggttttttttgagatgatgatttgagtcagcaccgtcagcccctaaaaataatttattttcttaaaatttgctcaaaatcacaaaatttggccatttttgtggacaaatatgttaacaaatcgaattaaaaattacaaaatttttcccggcgacgcctatcggcaccgtctgaccccttgtttccaaaagttctttggaaaaagcgacgaaaaaaaatcaacttcaatttttgatgctcagaatttaacaaaatgcttatttctaataaaaaattgcttaatttgatcatggacaataaaaaatataacatttgaacattttaagtttgttttaaataaattttgtaaaaatgaggcttttttgcctgccaaatgatattttttaaatcaatttgcctgtgaaatttttaaatttttttgtggttctttgggccaatgattctgaatttgaagttgattgcgtccattacgaattccaggccctaattcgaaccaaaaccaatttttaccaaaacgattgcacttttttcttcatttttatgataattttctgatttaacccacatcgttgtaatcacttttttcttgaaaaaatttatataaatttttaaattttgttcgaattagggagagtttgtaatggactaatggacttcaattcctgatcattgtcccaaaaccccaaaaaatttttagaaaaatccgagaacctcgagcataataatttatttgaattcccgaaaaaaagtctttatttaatgaatcgaattttctaataataaatatacatatcacaaaaaatggatctcttcgcattgaggtattttatacaattatttgaatctttgaaaagaagctgaaaattttaaaaatgcaacaccagagcgctttaaaaataatgaatacaaagcaaaaaaaattattacagacataaattagttgataatattaaattaaaaaataaattaaaaagaaagtacaataaatttctttttccgttgtcaatcaattgtttgagtgttgcatttatagttttaataaaattattaaagaaagaacgaaaaagccttaaaaactttaaagatttcgttactttaataaaaacctatgtgaacaattcaaacaaattaaaaataaattgcaactaatgtttataagttgggcgcgcacggttgggcgctcacggttgggtgcgcacggttgggcgccagcacgtttggacgccggcacatttgggcgccaatattccaacaatttttttaaatttgtttttttttatttaaaaatgttttaaagcgaccataaattccaatttttatgttttaaaatttattaaaaggatataagtaaatattattccgtacggatgcagcagcaaattgaccaaaagaaataggccaaagctagagcacgatggccatctctacacacttgacaagacaagtgccgatggaacgactaaattttggcgatgtgagttcaagaacagtggtgtgaacaagtgcaaaggacggatttggactcaggttgccatcagtttttaaattcaatgatctcaattttttttgattttaagcgttttaatacggagccaatttttgctgagtcagcaaaaatgctgatatcgattgcttttattcctattgccgatctcactgaagcagtcaatgtattggacgttgcgttccgaaattttcggacatgcaaccgatgttggattttatgttaatcgaagtcataaacagccagcatttaccaccgttcaggttgaatgaacaattaaacggg

SEQ ID NO: 11106 - DNA, 977 bp, Heterodera glycines
ttaaatgaaagaaaatattcattaaaaagtaaatatgaaagataatcgtttcaaattaaatttatgtaagaaacagtaaaattaaattaaaaaaatataagaaccgagattaataaaatgattttatctattggaaaactaaaatatgtcacctaatttaaattttattaaaaataataacaaattcaatttgaaatttttaagtgggtttttgctaaaacaagaaaaatcattaatatggggattgcgaatataaaagttattacccgattaatattagacctgatcttaatttaattgttgtaaaaataaccttgaataaattctacaaatgatgattacctagacagctgtattgacgctagaacagttgcgttgacgtgaaataaatttaaaattatagtaacaaattaatgaaaaaaaattataactatttatgtcaaaattagagacctttttcatcgatacaaaaccgaccggaaaagaattctgacgttaccgacagtgaagtagaaatatacgtgcaaaaagaaaattatcaaaaatcaaatacaaaataattttgacttttttattataataccttaatttaaatttatcacaataaacttttttaatacaattttatcccaaaaaatagcttgaaattgtacaggaaaatttaacgagagatttgaacacaactttcaaataaatatagaaaagggaaaatatttttgttgaatggtctcatgagtgctatttttaagataaattagaaaaagcctaaattatattataaaataaaatttaaaccaatggaaatgagcttgtatttatgaaaaaaataaaataaaaaatttgaattttaaatatgtaacagagtttaaattatttaagaaaagttccagataaatagcattatttccacgatgaatagtatttaattaagcaatataatactataaaaatgataataattcatagtccatgataac

SEQ ID NO: 11107 - DNA, 4158 bp, Heterodera glycines
  unsure (1)..(4158): unsure at all n locations
cctaatatttaaaataaaattttaaatccttaaaacaatttccagagaccggggtagccgatcaggaatttcacgtacatttcgaccaattactaaatccagacataaattagaacaaaaagtccaaaattcaggaatgtctacaaggattttgtatttttgatatgaaaatagtttaaatgatcttttagaaacattttaaagtctttgaaaataaaatatatattattagcgctaaaatatgtatatgtactggaccttaataattggcactcgctttttcccccattccttccgcaaagacgcttccatttgatgtttccgaaacgaagacatatacgaacgaatagtgggagtatcagcattaacaaaaaaacaactgcttcggtgaattccaacaccaacatccgccattttatactgactgttagaaaagttggttccctaaaatggcaatggtgtaaatccaaatgttgtagatttagtgaagcttgagcccagtgtggttaactgggcggcaggccaactgggcggtatgggacacagattaggacccgctacaattagctaccgaaaaatactgagcgtgtataaaaaaaacatataataagttctgttaagtggctgatttttgtgagaccagaagcgcttaaaaataggaaaaccttgttacgttgaaagaaagctttcttactcaaaagaatgcaacaggaaccggagtcctgcattgtcatgaattctttcaagggaaatcagagttttttgaacaattaatgcttaattttttgtacatacctattttcggtaagtaaacgggtccggtacttgtttggtttagggtgtaaatttcaaataatttaatgatgattttcacttcagttacgtgtatttaaacaaagtttgaacaaaaatgtgataatcgagaatttaattactcaactttttgttcgagttcaggtccgggattcgaaattggtcggaatgggtgccggatcgttaccagtgaacatgaaaagcaaaacacaaaattcttttacatttataggcatctaaaaatgtatgtgaaatttatcccccaaaccacacaagtaccgcggattctatctgtgacccataccgtcaagctgtcccggtccgatgttagccctatatttacttacaagggaagggcgttccgaagaaccggcatttcccgaaaaatagaatttcagtgacccagaaaacctcggaaaatcattacctcgtgatcacttgtataaacccgaccaattgaagcaagaaaactaaacggttcctaaaataaattttgaattgtataaacgggcttaatcaaaagataactttgtgtttgtcatcgatttgaactttgtgcttcttcttgcgcatctcgcggaacattggatttttcgccaaatccataaaacgactatcatcttcaacgtcaatttgcttcttttttgctgttcgttccttcattttagtaacagactaaaggtcaattgtaagtaggcgcaaagatttcaaagtaaaatatttagcataaaacaacaaatttaaaatacatcttcatgacaccagatttataaaatttagtcgtggcttcttaagcctcgcatggaacatgcacatagaactaccaaaatcgatctgataaaattatcgcttttcttgtgcccgtttctttaattcagtgcactgctccatttatgctaagtcacgttccccgggttgttgcgagccaagttaagccttaaacagtgacatgcacaacaatggtattgaaggaaagaattgctgctgttacattgagtaggctgactccatagttatctcacgatcaatttcgagaaaatcgggcaaacgcggctcaggatcaccaatagggcgcgtggtgtatgtctggaaagttaatcgagctataaaaagacatttttaacaatgttttttgtctataaaatatggcaaatatttaattgcctcgaggatcatcagctgttcttcattgtacatcaaagctggaggaagaggtgcaatgtaaatgtccaggttaaaatactgggaaaggaaaagcatattcttttagcaatctagtgacttttgaaggtattcgatttaccacatttccgaagagaaaacacacacgtttcttgcgaattgcttgatagtctttgtcaagaagtttcaagtagatctgatactcatgccagtccaactgcttccgtgtttcaaccggttggggaagtctatatttgcaaaagagaattttttttaaaggcgaaaattacttcttgccatcagcgtcttcaatggttcgggtcgtatgtgtgtacgtgtactttccattttggctacgcgagcgaagtcgaacctgcaaagataaacttgtagccctaggtgtagcacaaagggatggggaactacagtttccatgttttctggtaaaaatgcgcgaaaaatntaaacgataatgagaaacgtaaaacgattccagaaatgaaaattgtcaaagaaaatggtgacataaatttcacgctgtaataagtaaaatttacctgactcgaaccctccatatggaggtaagcatcctcaattacaaatacctccttcttcattttcaagaaggcgctgtcatcgatactgctgaccaaccatttccgtttccttggaattttagatttatggaaaccaaatttataaaaatttacttgctatttggagccaaacgatccgaaatcgaaatgccaaaacgttcacaaacatcagcaataagtttggagatcttttcgtcaaacgaaccacttgaattatcaactattgatagatattcatgcccaacccatgccttaatttcggcattggatgctaataaaataataaaaatacttctttggtctttttgtcaagctgaattgcttcatccattgattcggttcgggcttggttattcgcaagttgataaaatgattgtgcaccatccgctgcggtgacgagatgacaaatcttattgttagaaatggatattatttgtaaataatgagcgaaaatgtctcacttggtggtatctttcacgcaattgttcgttggtcaccttacatgctgacaatacatctgaccaagattccatgtcgatataagcacttccatccatcgcacctaaactcaatatttgtttatcgaaaatgctcattactgatgctaatttaggtaatactctaccggtggtatcacacacttttgaaaacaattttttgttttcaaaattaatcaaagcttgtttctagaagtcttcagggtcgctgatcacgattgggccatttcaactaattgcttaacccggacccaaattcgcacaaaagatagagttaagatcttctaatttttgggtcataattagtttaaacacttggaaataaactgaaagcatcagtactaggaaggcaagattcgtgttcagcagcatcaagatcctgtggaaacacattttcatgatttttgaaaacaaaattttttttcaaaaggtgtgatacaatcggtagtattactctaatttctaatttatgttacctaccccggtctaaaatgatcataattttttccgcttcactgagttcggcctggttgaaaaatacctaaaaatgtaaagaaatgagttgtgcattagaaaacgcagtacattctcaatttgtatcaatgttttgagcaaatctatctggaattgagcagcctggtctctactcaggtcaggaaaacgaatgcgtccaggactcagcagaattgatgcagtctcaggaacggtgtacaccttccacccaatgctttcaaagaaacttgaaaggcgagcctaaagtataaaaaattgctgttaggtatgacatatggtaaaatagtaggttagtagtacctgtcccgttgtcttgccagcacacggacctccggtgagaacaactttgaatatttgtttttggtcgcccataaaactgtacaatatcctgtttatttgagttttttcatcataaaaccaaaaagactgggttctagtcggttttattggttctagtcggttttatgtgtcccatgacatattatgcgtcccatgaatgaccatcctcagtttcttagggcataacttttttcttactttttcaatacccatattct

SEQ ID NO: 11108 - DNA, 3204 bp, Heterodera glycines
ttcgaaaaaatattttatttttacataaattattatagattataacgatattatatattattaaaagtttgttctgtatagaagaaaaagacttgacaacagagtgttcaaatgaattaattgaatatcactcaataaaaacaaataggaaagattaattagaagcaatattataaaaattgagttgatgaaaattaattttttcaaaattatttgtatcactaaagaatttaaattagaaaattgaatatattatatgcgccgatgaataagatctgaaaattaatattctttcatttttcaaatgcaaaattaccatagtcggtacgagaaaaatatgcttaataactaagtccttttaaataattttaaattataattaattacaaaaaatagaattaggttaatttaatttgttcttttaaaattgtaaataagataaaaaaaattaattattctttaatttcaatatatttattaaaataatatcttttaaaaagatatataaaatttgacaagtgatagtgcaaaaaagtcacttaaataaatatgaacaaatatataagaagaaagaataatcatcaaaatgttaaattttctgcttttatgttaatatctttaagtttcattttttttaatttaaaattttggtaaataatgagatagttgtataattcagagtgaaaattttatcttgttttagattttgggcataataacaaatttaatatttatacatcttttacttttagttaatcttcgctatgcattttatataatttttttggctttaattgtttcaattttctaatttttatattaaatagaatataataataatttattttctcatttccttactttaatatggttttttaatttacaataatgagtaaatttatgtaattccatttttttggtcttaagttgaatgtttaggtttttagttttaattattttattaatctcatgtttcatcctcattagcatgttaataaatagttactatgataatatttttataaatgaatattatattttgcgcatgtcattttctacgtgttgattaatctcaggaagtaactcggattttaattgtaatttaattatttcaagtaaaaaaattaaaataaacaaaatcgttttccatttcttttttaaataagcattattgtattaacattttaaatttttattgatcgaataaacagtccatataatgaagatattactttatttattaaatttcggatgaattgcccttataattaaattatttaaaataaaatttaaaaattaattttagaaaaattattcattttcgttgtgtcatcgattggcatacagagctgaatgggatagaaatgtcacgacaactttggaaatgagaggggcaggattggcttgggctaagatgaacagacagacaaatttatgacgggattgggccgggggaaagtagggcaatgtaattatcacaagatatggaaacttgaatgttgcggatataacagttttaccgaaatttcttgtgaaaattaaatttttctcaccctttacgaagaatattttttccaaaaaatcaaatatttctttattaggccttaaaattataagaaacactcatgttcaagaaaaataatgctatgagagaatgatacaaaatttgagcaaaatgaaatacaaataatttataattaaatataaattttatataaaaagagttatatagttgtaatatttaataaaaaattaaattttggcaaaaaaataaagtcattgagctgaaattattaatatatataaccttaaaattacaaatttaaaaaatggattttttagcggatcagtattacataaaaattttaattaaaatgaaaagtatacgaaaaagtttacgaagattgaaggagtaaaataaaagaattaaatatcaatattagcaaggggtgcaaattaatttaaaaaattttattcttcataaattttatctgttgtttttgtaattgcaaatcaaaaatttctcaaggttttcggcagtgaagctcactgttgacccactcacgcatccattcagatttggatttaatttaggcataagcaaatatttattcatttgcatattttacaaccctggttataaaccttatattaaaatgagttacagtttaaagtataataaaaaatatttattatcaattcctttaaaatattctttgttctgttgttatttttaggattatttcctcttataaattatttttaaactcttttttgttttttaaaactaaaatttttacgaatttgttatttttaattataatttacaaaatattcttaaatattttaaaacatttattttctattatattaaatatcgaacatttatttttttgtgtgtttttataattaataaattttgaaaaaaaatttcattttaattattcattttgactttatttactatatcaattgtctgatctcgattattcgccatggcatccttttatttttggcttcaatcctttaaaataataaaatgattaattagttttaaatccatgtccactattcaccaatggtatcagggaagtgaacacctttaaattaattaattatttaatttaatctttgtgtttttttttaaacttatattgccaaccaaattatttttttaatttgttataaaatttattaatttatggtttgtttggataactagggattggtttggtaactttaaatttttccctttttgaaaaaattttttagacaccttagtgttttgttaattttgtgatcgtatgctaattaaaaaaaaattaaattgttttaatcaaataggaatttcaaaaaagtagaaatttgtattttataaaaaaacaaataatctttgttctaattatttggtcttgattctggcattttttttgtctgaaacattcctgcttacgaggccaactcttccatttattcttttcaaaattttttttttaatttatgcgaattcttcatcactttaaaaaattcctttttaaagaaaaagtcagtgtaaaaattttcattttttaatattttgctgtgctaattgcccaaattcggaagcgaaatgagcttacacccctgctgcactaaaagtgtgaagcatccttacggatcaccagaagattttctaaaaaatgcacctctaaaccttatacaaga

SEQ ID NO: 11109 - DNA, 3067 bp, Heterodera glycines
  unsure (1)..(3067): unsure at all n locations
cagaataaaccttttttcttattttatttattagctcaattttagacttttgctcgcaaataaaattaaaatgtatggtatatcattaacatgtgtttcgatgttatttttattgnaaaaatatgtatgacaaaaataataaacacaaataattgtaattatttcattttattaataaatcttgacaaaatgttcgaataactaaaattaaattttatgctgtgccattatgctttacatatttaatttatgtttccattattctggctgttgtaatttttttaaagtaaattattttaattttctctttactttctttaccgtgctttacttttttattgattataatccatttaaataaatattttctgacacttacggctgatggaggaagcaatgacaaatataagaatttgcgcgaaaacttaaatatgaattaaattttaaaaaaacttttctgaaaataacaatgtataatttttcgggtcactgatcacgatttatttatgccaatttctgatttataattacttgtttaatgatgccattttgactttgactaaaatttatttattttcacacataaatttaatttgtttatatatattagattattactcacaaaattaaaatttattttcaaaattttaaaaagtattattaatattattcacaaaaaatgaataagaatttatttgttggaaattatttgttaatgtttgatgaataaatctggatttttgcccaaattttcttaataaaattaatttaattttcttatataaattcatttttcagaaatttattttgttatttcgtttataaatttaaatatcaggcaatgacactggttagtttgttaacattgttgttggtctttctcattattatagtcttatttgttagctatttttcttttttatgttccataggtaattaaatattttagatttatttaatagtttctgactatttaaggcaattgttttattatttctaatataataatgctttaatattcctattttttgaatattataataaaaaaataaataattagttaaattaattagtattttttaatttattgaaaaaaatataaaattctattcttggtcttttggagtgcttttttaaatgtggcttttttggcaaatattttaattaataaagtttatttaactaattgtgttttttctaaatttaaaattactttaattaaacattattcttttttttaatttttgatctattcaattttttaatgttttttcagctttttattatttttttaaaattattaactccacaaattaattttttaattgaattgctaatataaaataataataataataataataataatataaacacgtttttaattataatatatgtttatcataatttattattgagatttgattgttttttcctatggttttatttttataaaataattatttaaatgacggtcgagaatatcttaaaatttattgtttctcattaattctcgcataaatgcaataaatttataactcaaaattccaagaaaaaataacgaactataagaaggttttcggcttaagaacatgagatatagagaaataaaaaatatagaaccaaataaatataaaaaatttctaaataataccttttaagaggttgtgatgctactataattttcaaaaaagacattcgaaaaaataagataataatatttcattgaaagaaatttaataaataaaaatggatttaatactggaatttaaactgtatataaaataaaactttttttatatttactattgtttgattaattatttaaattaattttaatttaacataatcttttgcggtttgttccgaaaataatttttattcaatttgattttactatttttattgacgagctctgattaattaatatctctttttatatttaagattaataaatatatacaaatcaaattcgatttgtaaaaattaatttgttgtatatttattagattcacctggttccttacgtatcacatccttctgttgtgttttgttggcaatttattattttttatatagtttaggatttattttaattttatgttttttatttaatttcatgacttgagatccctatttatgccaaagcattgaaatgattttaattagcaattatgctaacaaagtgatgaaatttttttgtgaaattcacattttttgaccagtttttttttaatcaaattttcgccaaaaagttttggcctttttagcatttttaagaaatgttttgaggggtttttgcaaatacatttgtatttattagagccctgatttggaacattttcacactatgaacaacatcaactctgaagtattgagaaaaaatttttagtatgctattttttttaaaaatatctttccagaacagtgatagtttttgaataattttcttttaaatttggggggggcaaaaaaacgaagaaattttcaattccaaaatacaaaaatttgagatacaaaaaatttttggggggggggggcttatattttaggaaatacggtaatttcttattattacgagatctaaatggaaaaattacaacaaaaatttattaatttacataacggtggtgcctatcactatggcggacctgaaattcacttagatttttagaattagagacgagcaattaaaaaatctgattttcttggtcccacatccaaaatttattcatgttacgggaatcaaaagaattgccggtaatatataatttcaataaaattgtaaaaattcaaataataatttattatttctatatcatttgatacttaattatacacacattttaatctgataaaagaatagaaattttcgattaggtatggtaaaaaatcctcaaatatatctaaaaaatgtgtaagaaaaatacaaaacatgtaccaactatgtacaaaaaaccccaaaatttgtaaaaatatgtaaataaacctacttttgttagcaatacaaaataaagacttttcctacaatacatcagataataaaaaataaaatgtttaaaccttt

SEQ ID NO: 11110 - DNA, 1384 bp, Heterodera glycines
  unsure (1)..(1384): unsure at all n locations
attaaaaaanattcctttgttacatttatttatttatttatttttaacatattttgcaatttaaataaaaatatttttactatattaaaatatgtaccatttgccgggctggtgaagtgcacatttttgttgatgttgacattaaaactgtgtccaactccgtcaaccacatcaatttgattcgtgaaattgttgctcaatgtttcccattttgcgcttttcaggtgccccgtcgcttttgcggctaactcaaacaaagcacggacaaaactgagcgcataggcacacggatcttcaatttaaataattaatttaaaagtaatgaaaaaaaatatttcaaaaagaaaaatattttccaattaataatacaacaagaattttctcattcattggacattacatattaatttttaagtcatttatagattggaatttattttttacaaaaaaatacaaaattttagaaaaaacaaaatttgatcatggttaagtggcttttgattagcgttggagcggatttaggtataatggatttctcgtttttttacactttttcgccaaaaaataaaaaaagtcattaactttttgaagcttttttgttgcattctttatttttaaatatttcatttttttgtcaatatttccatattttccaaaaatttttaattttttaaagtgaaaaaatgagaactgacaagtttttttctcaatgaaataaaatttattttcatagaatttcaattgagactctaattatacattcttttcttttaaaattaaactgatttttttcgtttttagtctcaaagacaaaatggtttatgatttttcgaaaatttgaactccgttttttgatttttttttctaatattttggcaatttttatccatattttagctttttttaatcaattttcgtttataaatttgcttcctattgattaacctacccattaatgtcaattgcacgtcaatttcgcgcacaattttggcaccaccgcccgccacacatttgttcattgtggccaattgttgtttaatgtatttgacatcggaaatcacattttggcacattaactctttctgatcagtttccactgagctggtgaagccgacgatgtatccgtgcatcagcgcggccaattgttgactgcccggacagcatggaaagcctttaaaaaaaattaaataaatatagttttttaattaattaagttgtttaattttagtgatggtgagcttggcatggcatagatcatctgatcagaatggcaattctcgagagtgagggacagggggacgactcttgtccaaaattgtctcactttagccctccatgttcgctcctctctcttttctataaccgtttggctcctctctctctc

SEQ ID NO: 11111 - DNA, 3893 bp, Heterodera glycines
  unsure (1)..(3893): unsure at all n locations
tccctcctatctctccttcttccctctctctctctctttctctccttctcccttctctctccttctcccttctctctctctctctttcctctctctcgttccctcctatctctccttcttccctctctctctctctttctctccttctcccttctctctccttctcccttctctctctctctcttccctctctctctctctttctctccttctcccttctctctccttctcccctctctctctctctctttcctctctctcgttccctatctctccttcttccctctctctctttcctctcctgtctcactttctctatcacatgctcgctcactctctgattatctcacactgactgattcagtttctctccctttcattaaaatatttgcgatacgaaaaggccaaattcaagaccactaaatgtctcagaatttttgacaaagtaataaagactgccgattttttaaacacacccgaaagtgtggaccggtgccaaaacaaataattcgagacaggcctagaacccatggcgaaatttttaatggtacagtcatttgaaacgatccaatttacttggggcagcccaagtgcccaaatggtgcaaattgcaagcagcaacaataatggccataattgctattttggaaatggacatcatcgtagtcattaaatgaagaatatttttgggcaaatttggngttaaattatctcaatttaatttggtgattatgtgcctgctccgctgatttaaataccatttttttacagggcgacagaagagtgccatcgcaaaaaaaaaaaatggaaatggaaaacggatatgaaatagcaacaaaaatcgttgaaaatggtcgtggaatgtgccgcgtaagatgccgcaaaaaatgtgtggaaataataatgtctaatgacagacagctggggcatcaattaatgcaaacatcatttcctacaatcggaagctgatgtaattattttgcagcattggtgcatgtgatttctatgcggggctcccaaccgatatttttcaaaatcagcatttggccgacaaaaaatcattatttggagtcaaaaatcaacattttggaaaattttattccaaatgaattaaaatgtttttatttgcggcattcagcaaaatcagcaaactttctcaaattaagcagcaaaaatcagcaactcatcagtacaaataaatcatcattgaccccttgaaatgcatcaaaatgatgataaatcagcagagtcgggttggaagccctgtttctatggcttcttaaataaaaaaaattacaaatttttgataatttaactgtccaaatcagcgatgtattggaatgctgatttccgcttactgacatttttgtgctcggatttgagacttccaaaagccaaatttttttgagagcgtcggcacacatttctggtccaaattgcttctgtaaatttaggagcaccgttcagtaacagaacgaaatcttgtgaataataaaatagattgaaattgactattaattttttttgattaaatattttatttattttaaattcaaaattcgttcatttatataaaaaaacaaattctttttggatcatgaatagagttcttgacatccacaacaagagagaccagaattaggtctcgagaatcattccagaataggatttaaaggattaaaaccactgaattgtcgggattctgttcttgagcttctcaaaaaaaggaccaggataaggggacctggaagttcttaatctgttagggcactcttaaaacacaatacttttttgtccatcttactggatttgccgatgtgatgccagaaggaagggagtgtgggataaaggacatgggaggacacccaagggagcgcccgtagctcagttggttagagcaggccacggaattataaaaatgagaaagcaattttattttcaaaattcaaaaaaaaaatgaagtaaaataattatatcagtcaaattgcatattatgtgtaaaagtgagagtggtgtaaataacagtgataaccacaacaaaaaatcatgaatgttcatttagaaaagtttaatatatcatctgcgtttcatgctttgatccatccgccaaatgcgctctccatttcctgcgcggcagccatcagcaaagcttcggcatggaacggcgcgactaattggacggacaatggcacatctgttgaacaattaggctccatcaaatcaaatttttaatgcaaaaagcaaactcaaaataaatttacattaaaaaattgatttgttaacaattaaaaataattttatttttcgaaataataacatctcctttttccaagaaattttgcatgttgcaataatcttatagaaatatttctttttaaatttataattcgcttactttttaaaagatcttatagcatgtaaaattttttaaaatttccatgtcgacacttatcagcatggtcaaacaaatttgagtgttatagtccgaattgttcgaaacctttcaaattcgataaagttggtgttttttgattccgaaaaaaattcgatttattattttttacccaaaatatttcttttaacaatttgttgaattgccctcaccgtccccattcaatccgacagggcacaccagggccgggaagccgagcacgttgaacagctgtgtgtagggcatgttcatcggggtgaacatgttctgacgatggaacggcgcaacggtgggccacgggggcaacaacaaaatgccattgtcaccaagcgcggtggacagttgggcacgcagtttggccaacttggccaattgctataaggtttaaaaagcgtcggtcttgttatgtgcttgacgttgaaattgttaattgattgggaggggatcggttaattgggctaatgagtgcgagttaattttaattgatcaggagagaattgactaattggactaatgcgtgtgagccggatgaaagcatagtcgtttttcataatttaaatcggaattccaataaattaatttctatatactagtactgctcgagagtctcggtctcgactcgagaaaagtctcgggtttttttggtatcgaatctcgggttattaagtctcggtcaggattttcgagaccgtgacttttttacacccctaatgactggcttttggttaacttctatttttataaatttaaggttttcggtctcgagcagcactataaatcacccaaacacaaaaaacaaattttataaaattaaaaatgatatgaataaaataggctaattgtaagtattgcttctattttattgcataatatttccaaacgatcattatcaattgaaaatgagtgattggtgagcgcttattcatcagccaattcgcctttttcttcttcaacagttaaatcaatggccagcgtcactttgtcctcatttttgtcgtaaaatcctttgctcggatccatcaattgcttaatttttacagtttattaatagggcgaggatttttaagggcagaacttattttaatggctaacacccaaaataaggatttctaaggtcaaataagggcgctaaacgcaaaattttcgaaataaaatgtttttcgtgtattcttgttgagttaaagccgcagaaaaaataagtaaaattcttagaatcctcatcctatttattaagccactaaatgaagttttgctgccactcaccgtaaaagcaatgaaatttgagaaaccccaattgtccacttcgttgttaaaaactctgtcatattttcccgtcaaatcctccgttccgttcttttgtgaaacaattcgaagggttgccgaacatttgcagctccaatttccgtcttaattgaataagaaattgttaaatttatttatctctccaccttgatttggagcg

SEQ ID NO: 11112 - DNA, 2093 bp, Heterodera glycines
catagcaatttcgccattttcgccattaaattacaattttacgctttattaaaatttcataataaaaattgcaataattttaaacaatttttattaaataacacatacataaaaccctcaagatattaaagttcaaaaatgttcatgcttttcaactttctaaactgaagccgggcgggagttgagcctgaaattttccataaattaaaaaatatttgcagaaaaaatgacttttaattgataatcgatgtacacgcatccgttcattacggtcacctgaaaatttgttaaattcaatttgggatgacaaatttacaaatgcattttttaattgaatttccggaaatatacctccagtaggcaatgatttttgaataaccaataattactgtgctacaatatgtactagagtgccacgggaccgggacctggtagcggacaactgagtacaactgagtaccaaggtcccggttttgaccgggactagtcccggttttttcccgggtttcccagccaaaaattcccgggttttcaacctgaaaagttcccggtcccgggtttgcccaaaatttccggtcccgtggcactctaatatgtactattaacaggcccgtagccagcccaccctaaataaaaaattttcaagaaaaaattggcaattttcaaaacaatttttcttaacaaaatgccttaaaattaaaaataaaaatgttttcccggcggatctccatttttctttgattttaaaatttagacccaaaatggcaaaaatttgtccttttttttggcgaaaaacttctttttttttctaggcgctgattattttggcctgaaaagcaaaaaaaagaaaaggtcttcgtgttcccccctcccaaatttttttctggctacaggattgactattatgatataaatatgtagttgaatttggtgtaccgtcctcccctccgcttttgctaaccaataattactgtactctgtacaattacggtacgtttaaaaaattcaaattttgtaccgtcctcccctctgcttttgcctttctgatttggtcacgcaaactgcccaaatcgcctccgcccattgatgagggcgccgcgcacccggccaacatgccggcctggtacatcatcatcgagatgccaagcccgacacctttgctgctgttgaagctggacattctggaaggaaaaggcgccgattcactggcatttgtactgtggattgaatgcatgcacattttttccagaaaaactgccctaaacttttggacagtgatttttttttcatttttttatagctgagaaagtttttcagaggtctttgcatttattgcgtcaaaatagcgatttgaattaaagcagatttttatttaaaaaatgtgtatttttgaaaaaaaattttgaatagcgattttttaaattaattattttatagcaaagaaaatcttttgttgaaaaaacaaaaataaataatgtttttttaattttcattgtattttatttatttctgttggcttttaacatgaaaattcaaaaaatttatttagttaaaaaaaataattttttttaattttgtgaccataatttatgataaattgatgcaattacgaatgaatttaaaaataaaaaataatagtaaactgctcagacttacgcagaaagtgcctgcttttgctggtgctgctgatcagtgccacgttttttcacataatgtttactatcagactgatcagttttgtcgccggaaaagcacgaacccattgtggctgatcaatgtgttaaatgaatttgctcagaagcattggataaagccgagaaatttttttttgaacatgaaagaggacttaaattataaaattgaaataccattcttatgtggtgagttataaaaatattagaaaatgcaggaaaccctgagctttgtgaggaatttatttattttttattatttttaatattttatttaataaatttaattaaaaaatctttttgtcaattaatattccaaaattaaaaatactaaccaaaaaaggatcaattaaaaaaaggtaattaacttgaaatttaattttaaatataagcatcctaaaa

SEQ ID NO: 11113 - DNA, 2791 bp, Heterodera glycines
gaaataaaagcccccttttgagggggttgaaaaataaagcccccgggggctctattttaggaaatacagaattaaaaaagatttttttttaatttaaaatttaaatcccatttacttgaaaagaaaatttgacacacattttttttggtgttgaactaaaaaaaggcttaaaatgcatgcgaaacaatggccaaaaattttgggggctccccccatattatggtacaacaaacgaaggacaaacaaacaatgtgtgaaaatgaatggaatttgtgtccaaaggatagggcgggggaggggacgagaaatttttgcgtgccctccgccgcacccgggggcaacgagcggaaaagaatttcgcctccggcgacaggcagcaggcggcacagccaactcggagttgtcaacttcacatttggcacataaaaacaaaacaaaaccaaaaaaaaactcacattgtttcgtgcgcaaagaaatgtcaaaaacacaacagaatgccaaaaatgtggggaggaagcgaaaaattcaaaaatttaaatattttaaaatttattttagaaatattatttggaaaaataatttaaaaatcataaataattaaataggtggcatatttatgcaataaaaataagaaataatttttatcagaatgccaaaaatgtggggaggaagcaaaaaattcaaaaatgttaaatattttaaatttatttgagaaataatatttagaaaaataatttaaaaaacagaaattattcggaacgggccaactccgtctggccaactccgtctgagccaactttgagtcaatataactcttgaagttattgaccgaatcaaacaatcttgatatcattcgaaagctcttcacaggctctattagcctactaaaaattacagaaaatttcgaactataaaaaaagatagaaataaaaaacttcgaaaattctgccttttttgcggttttcaactgacaacttttttgagagctgattaatcactgcgaaatagcttataaatatcttctaaacatctagggctttcgaatgataccatgattgtgaagtttggccaacaaagaaaaaagttatagctttttgaacattgctgagacggagttggccagacggagttgaccctaccggaaattattaatgcatgtttacagaatgccaaaaatgggcggagtgagcgcaaaattaaaaaaaaatatttaaatatttatttgaggagtattattttaaaaacgataattaaattgattaagataatgttcaaatacaaaatttgaaaacattaaatttatggttatttttttgtcaggatgacaaaaatgcagaaatttgaaatttactaccttttttcaaaattatcggcaaccaaaaaatttataatattgcgaaaaatggcacgcattaccacagtttcactcttctgagcctatccaatttaaacccttcagcagctgtctcggtggggatagttaaacagaatgccaaccaccccataaatatttaaatgcatttgctcgtatttcaccgacgcacgaaaaccgaatgaatgaatgaaacgtggaaaatgccaaggcttttctgcatttccgctttgctattacaaaaatataaaaaggatttggaaaaaattaccgaaaaataaaaattcactaataaattggtttacaatttgacgaccaaataaaaaaaaatggcccacttttaccatttttttgtactctaccctcctaaaagggccaagagttaaagagagagagagagagagagagagagagagaaattcggtggatgcaattttcgccgggggcgggcctttgagtgccaaattgaccctttccgagggcgggggacggacaaaattcacttttcgcgtgccctccgccgcgcccccaagcgccggataaacgatgcgccaaggcgagaaattggcgttgaaaattggaaatatgccgtgcgaaagtgcggtaccccgtgccgtcttaactcatccggcgaccacacaaatttcggtgccgccgccgcccttcccccgcccaaaaattgattttggccacttcagttttgttgaaattcgagaacaaaaattgagcctaaccgcttattctagtcgtgaaaatggggcttaaatgaaagttttttgtcacattaaaaaggtacagtattcttaccatgttactgtacataaagatggtataacactcatcccatgttcagaaatatttcaattatactataaatttaatatattatgagccaaaagtatgaattaaaattacgagaatccaagccaaaatgtgggaaaatttgcatttttgtagggctggaaatttatttatttacagtatttgttagtttgtcaattatacagcagaagggcttcatttgtcaagttaaaaaaaaatttgcgtgccatcatcccaaaatgccaaaagtggaacgaaacgactttttggtgctaaaataaacaaattttaggcacagcattgacgtagaaaaattgttccaaaaatattctcgaatttttgtcctgacttttgtctaaagattaagcagcaaaattctttttttcgttcacacaacgaccacattttattttattatgtttgaatgatttatttacacgcaaattagcattaattaattaattgtccaattaaagggggtgggtggaaaacgcctcaggcgcctgtgctaggtacggccacggcaacaaaaactgcgaatttggtcatcagtgcatcgctgcacacagcacatttcggtcaaccgttccttagaga

SEQ ID NO: 11114 - DNA, 3279 bp, Heterodera glycines
ccatgcgatttctgtgctcgaaaataagcacttgcaacagtggactcagcgaaggcggaagccaatgctttgtgaggccattctcgcgaaatctgttgacaaattacttaattgaattgctccatttttttaattataaattattgtaattaatagttttaataataaatcgaattattatttattatttctcattttaattgtaattgcattccattcgtgctggtcttctagatgatactgataatgtatttattattatctaatgttaaatttaaatatatcaaattttaagatctttttaaaacatgaaaaaatatggccgcaccattctatgcatgaaatagatgggtgacaaaatgcgtctgaaatgcataatgttcttggttgaattgaaaagtgggggaaagaattgaaaagaaaatggacgaaattagagccacgagggaaaatgtaaacattgtcaaaatttgggtggcgaaagatggggcggctggcaataagcttccacagaatgctggtgatggtgacagccgattaaatttattggaaaaacaaattttttgggggaaacaaattaaatcggagcagagaagacgaaaacttttgcaaattcttatttacattatataaatttaaaaatatacaagaaaataaggcttagaatatcggattattattattttatttaggcctcagaaatttcttttttgaaaaagcgaaaaaataataatttttttaatccaaatttttgcaaaatttccatctccaaaatggggtggaaatatttttttcatcgattctcatcattcttttgctgaagcgatgaaaatgaaaaagtgcataaagaaatgcgccctaggggctattattgaataatttgtttggattatttggttgagagagaaatgcacaaaagaacaacaacacagctgaaattagtcacatttttctgttaaattacctttattagtaaaatttttttatttattataatttaatttaaaattatttaaaatattttaaatcaaacgaaaaattttatcaaaaattttcgatttattaaattaaattaattcaaacaaattaaaaatctttttaaacaacaattaattttttttaaatgccaaatgccattcatttctttccctttgttgcttcatttgccttttgtccataatcctaaatacatatacaaaatgaatttataattttttttggcatcttttcaattttatgggcaccaaaaaactagtgatttttttttgaattcctcccccccccccccttttatgaggagatcgaaaaataactccccatgggggataattagagaatatacggtatatatgtttttttgtgaaatccgaggtgcgcgaattcatctgccctcggaaaattacggcactaattcgtatataaaatgatgtcattcaatgtcaaacttgcctgttgcacttcctccaaatattccatcatttcctcattttgattggctgccatcaccgcggcaccataaccaccgccattgttgttgttgttactgtagccggtcccgacaaatttgccactaacagttaccgttggcattacggtggacggcggcagttggccaggcggtgccattggcaacggaattgctggtcggccaatttgtgccgctgcttttggcatatttgatgaaataggtgccgcatgtgcctgtgccttatacacttgtgttgcttggacatctgagccttgctgtctaaaattgaaaattttgaaaactttaaaatttatcagttctccatcagcctgcaaaatttcaaataatttcattaagcttgaacaaagttatgatcaaatttgaaaacttggtaactgtgtacttttgaccacattattgttcagatttaacgaaattttttgcaattttttaggctaatagagaatagggcgatatcaagaattaaaaatttagttgcttttggttgggaaatcccccggaaaactgattcattgttgatgtaatttcattttttttttaaattctggtgccacaaattttttttttttttggcattctgtttcacaccctaaggcagcagacgacgactgttcagcatgttgtcggaatggttgtggttcttgcaattcttgtttctgttgttgttgtacttgttgcggttgttgttgctgatttgtcatttgaactgcagcattgacaggacggccttcattgtttgtagcggaagattgtggcaccggcactggtgccacgttgttacgctgctgaccggcttgaatggcaccgccagcagtagtactgcccctctgacagtgtccgcacccgccaggttcgccgagcaagccgggcatgccggcagggccctgcgggccctgagagccatcgtcgccgcggtccccggtcggcccgcgcattcctcgcgcaccatcaccgcccggctaaattaacgcaaattttggtggcataaaagatgttggcatttgtgccagtttcacacacctgtccgtccttgcccggtggcccaggcgttccgcgtggcccatacggacccatttggccggcccgtcctggcgccgcgccgttcagcaagcggcccctgtcaccagcaggcccaactttacctggttgtcctggcttaatacggggtatatttagttttgcgatcatgatttattggtttatctgctcagatcagcgatcacgatttatagtataaaagagtttatcaaaaacaactaactgatccagtctgaaattataatttttgtcattttatttccgattttctgatcagccggcataaatgaagttaattttgatcagaagttaggtcaagatcaattgatggggggggggggggtgataaaaaaatgattgtgattcctatacactatcactcacaaaaacaaaaccaacctctccgcgggctccctgtggacctggcggtccttgatggttgttttctggaattttttaaaattttttattacgtatttattcgtcgaagttcgttcccaacttccctaaatccgggactttcccattcccgaacagcacaaacacccacactaacaatttatctattgtgtacctccatgctttccagattttcctggttggccggcgtgtccacgagcgccttttggaccaggcacaccgggcgggccttggggtccaggattgcacttaattaaccaattaggcatataattaattgaataattcaccaaatggcatgaagtttgctcaattggcggtgccggaatgta

SEQ ID NO: 11115 - DNA, 1125 bp, Heterodera glycines
aggtggatgttgaagcattggcggacgtacatttaatatagtgtagataatttttaaaaataggaattaaattgaaaattaaaaaaatttgaataaatagttttctcgaggagaaaattttgatggcgttcggaagcataatagattttataaaaagtaataaaaaaaagctacgaatttcgaccaaggtcagctacaaaatgacacattgtgtgcatgcacaacatgagcctcggaagcctcccgtgcttctgctttcttcttcgaatggcatgccgttgcgacgcttttgcctttccgttgtgccggacaacaattgcgcatcatcgggcgtgatcaattggtgccataatttggcagattgatgcttgagcaaaatgatcattttaaattctaatgatgtttaagcgaaatttaaatggcattttttgttttggcataaaaattcttggcatttcaatctcacctgacattgctggacattggacagcatcatggacattttgtgctgaaaatgctgatgcgcgatcgggagcagcacaacaacggccatcagtgaaacggtggacaaaacgctggccaaaaaaacgccatgccgttcattatgagtaaacattaggccgtaattaaattataattaattgctttaaaattgccccaattatgtgttaatgtggcaaatataaataaatgtttaatttagaaaaaatgaaataatattattgagtggaacaattttggaagtattaattgttttttttaaatagttaagtgaattttaaaacttttaattatagcccaaaaactgcacataaaaaattgaaataaaaaatttaaaattgcacccttaattgatgatgtcgaaagttgtcgaaatttaaaaaccgaatttcagacttataaaaataaataaatggatggaaattcgacgttttgatcaatcgcaaaaacccatgaaaaacttggtcattgcatttgaatatatccattcccaaaaaaataagtgtgtcaaatgcatcaaaaacttcactttttaaacacattcattcccattgacttgatcaactgctattcctcgaatgtcatgatcaaaaaccagttgaatgaatgaatgattaactctcg

SEQ ID NO: 11116 - DNA, 5442 bp, Heterodera glycines
gcctccgtctagctttgctttggcaattgcgatcgccggtctcgtcattctgctgtgatggactgatcagaaacagagttgaagggatcaaggaattacgaacagcgattttttgggattaactaatcaattatataattaatcatgccgtttacatttaaagatggcagtttttatattaaaaaagcatctgcgtggtaaaaagcataatgttcttaaataataaaaaattaaaatatttttataattaaaatattaatttatttaaaatttaattttctggagagtaaaaataaagatttagcaattgtttaatattatggtgagaatctttataattggttttctcatttaagcacttttaatttaatttttatgaactcctaattaatttgtccatttataaattatatgtatttactaaataagatattaatttacaggataacagagaatttttatggcttcctatattctattattgtttatacaacctttttggttaatcaaaactaacaatttatatgtttaaaattaaactcattgacttcagtaatactattaatgattacagcattatcaattgctatttagattaaatatattatataataaaactaaacatttttaattatttcggtttaattaaatttcttgtttagtttgtcagtgaaacttcgttcttttgttgaacatcgatcaattcgcaattttaatggacgaagctttgtatgtgcaagaaccagtgcccgattcggtcggcttaaaactgctagcagcaaacaattgagcaacataagtcaatgcgttaacattcttaaagaaataataattaaaaaattatttcaattttatttgacagaattaaacaaacaatttacttggcaagcgtatttagttgcggtgcttgacgagctttggccgtataaagtcagtccagaaaagagcacagtgtcaccgtaatttaaattaaccgctgaaaataaattcacatatgttttaaaagaatgaaatatttacatgtttctgcgtgattcaaacatttatattttttatgacttaaattatgctgattttattgacaaatttcttttaaatttttaaaaggttgttttatttaaaaattgtaaaattcgattattatccttgtgattaattatgctgatttgaatacaatttattttttttaatttctaacatatttttttaataaaattatttttattctttgatgaaaaattgttcaatttttgttaatttagtaaactttatttttttacaaaaattaactaacagacaaccgattgtccggggcccttcatgaccgtgttataaacttcgacgctacgcttcggttgaaaaggacaatttccgcatgaacaccacaatttgccgtatttgccttggttattaaagatgaataaatttgtatttattaaaagcattttgcatttttaaataaaaattaatttaatcataccttcgccacagaaattttgaatgattgttgtgcctttgcccgattgggtgaaatactaaaaatgaaaaattcgtgtaaatattaaatttaatgaagttagaggtatatgagtttatatcgagaacgttatgtggatctctgggattatgagataaattagttaattgtttactttgtctgcagtgccttggccagcgccaccaatcactttgtatgtgtacgatttgcttgtgtctgtgtatgctaatccaacagcatgataacacagttttttgtagcttcaacattttttaaaattaaatgattaaatttaaacttaaaattttttactaaatgttctttaaggtgcaactgcccttgcagtaaatgccataaccgggcgtgtcgaaaatggcattttcaatggtgacaccatcggtcagaatcattaagttcttcagtttggcgtttttcacatcacaagctccgttcaaaaggccggaaccgctaacaaacaaagtgttctgatagtcggtattctaaaaattctgttgaattcttatatttttatatttaaatttgaattctttttttatagttttactggaaatgggtggaaaatgattaaaagaattcccgttttgcccggtgtttgccccaaaagccggaagtggaagccccggcaaagtcacgacgaaactctagtcccattttcggggttgggaatttgcataagccggcattgagttgtgaaatttgggtaaaaattatgcacaatgaaattaaaggcagcatttaagagtaatataaattttaaatttattttgatttttcgaattatcttatgacatttccattgataattgcacccttttatatgtcaaggaatgaaccgagtgaatctttattgtaaaccaatttgtttgatcagatttaatttcaactaaaatttgtctgaatttttgacaaatttcaaataattccacaacattttaacattcgccgccccgtaaaagaaaaaaaagtcagaattgatgtgttcgtttaattaactttgtttcattaatttttatacgaattattagacaaaccacaacaatttcataaattattctttaccctttgcaattaaagtcagaaattgatacgtttattgaaaaatagaatgttatttgataatttttttggcattggaagaaagtttcatgttgcgggacacctagagctattgctcaataccaacattatttaatttgactaagcttgagctaattcggcaaaacttaaataaattttgaaatcttcggggcataagaaatggatataaacaaactaaaaattgagcaaaaggaccaaatgaagaaaatgacaagaaattacttaacaatttgctaaagttgtgaaaaaatatacaaatgaaaaaaagactggaaaaaagatttaatgccagtcatcataaaagtaaattccattttaattatttttcattaattacgtttgtttcagcaccaaagacaaataatgacgaattaagaaggatgaagaaatatttaaaaattaaagaaataaatccaaaaattagtgataaatagagatgcaatttatcgatgctaaaaactgccaaaagaattaatttttagtttctaaaaaaccccataggtgctaaaaatgggaaaatagtttctaaaaacttaaaaatttaggggtgtaaaatgacaaaatttattcaaaaaagtaaaaaaattaagcaaaatcagtattgagctaaataatttggaaaaactaaattttgtcaagaaaataaaataaattattttggagaatgaatttttgagcaatttttcatttattaggggtgtgtttttgaaaaattatgggtcgattctaaggggtgtattttttgaaaattctcaaaaagttgatccttaggatccttagggatgtattttttgttttttttttttgcattttaatgatttatttggcttttttattttgaagtaagtgtgttttttattttttgttttttaacaatgcgattaaacaatgttttttaatgcttaaaaacaattccctagttatatgtcgcccaatcataaatataaaatgtattcatgcgaattgttctatatttttttggacctaaaaataaacctaattccaacttcgtgtctaagaaaatctattttgtttatgttaacctttttgttatattgaataaaataaatgttaataattttctttcatcaaaatgtatttatcatcataggaaattacgctttttcggaatgtacgggaaaatttttgggttatatcctattttataaatatattttcagatttttccacaatatatagtagggttcggacgccgcccccgtcacccccgcccccgccgggggcgggagcaggttttttggcctctcccccgtccccgcgcccgcgactctgaccttagcaatccccgcgacgttcgcccccgcgggggcacgggggtgaaaatacacccctaagaatggcatattcgtgggataaaaggcaaaaaatttatacaaatttgaatttttaaccatctttgacaaattttttatgaaataaagtaaattttgctgttaatttccaatatatttgtggtttagtggttagtgcttcaatactaacagtatttcttgttaggagttcgacaccggttgacgttttcatttgaatttatttttatctgatatatgcagggtttctttttatgttcttatttctaataaatgttctgattttagggcgtattttcacccaaaagaatgaaatttctgaaaaatttggctaatttctaacaaaattcataaaaaaaatttcccccggcggcgcctatcggcaccagcggcccccaaaaaacctattttttcttaaaaaattagcataaatcaataaatttggtcatttttttacaaaagctgtgtaatttatgccaaaaggaattgaatagaggcgatacatcgactaaaggaatgtggagccaacacatcattcataaaaattaattttttttgtgagattttttggagctaattcaaatcaaacccccgctcccgtccccgcgggggcggaattatcgtgcccccgccaccgcgcgactctgacccacgccatcccacgcccccgcgaaaagccacccccgcccacggggtccgaaccctaatatatagaagtatttttaaatgtttggtcctaaagacagtatttttttttaaatctttgattttacattttaaaattttgtgtcttcttggccgccctgtcgcctttgagttaagaaaaagaagacttattccatttataacaatggaaaagcaaaatttttaatcaattataacttgtatacttattccaaatgaattttatctgtggttatccgcttacttaacacaacaacaatatttataatcaaagtttctatagaaaattgattttcaatgtttctttgatttgactgccacagcccgggcattgcttttccgttgagtccaatattttcttggcacaactgtcacaagttcccaaatgtttgcatggcaaaaagacgatatcacgctaaattaaaaatccgaaaaattctttttggcattctgtcacccacaatattttccaagcattcaatacagttgatcttttcatttgattgttcattcgttgacggagtttttgcgttttgattggattcgttaggtgatggcaactcggatgttaatgttgacgaggctggtgaagttaggctttggctccctatgctcttaaattagcaaatatgacaataatttaaaaaatggcgccgagaatccgaaatttcgttcaggaattcgtaattgagggcgagaatttttctaaatttgaatggactgccgggtaagcagtttgagtatcaatatcaattttgaaaattgaattcaaaatgaactcattttccttctgtatgttgcatccgtctg

SEQ ID NO: 11117 - DNA, 1479 bp, Heterodera glycines
  unsure (1)..(1479): unsure at all n locations
ttatattattctttaatttgtaaaagacgggaatttttgaattaaaataaattgagtaaaattccgactcaaaaacgccaaaaatgccgggctctaataaataatccaatgcctaattaaatttatcgaaatccttcaatccttaaagtacttgttaacaataattgaaggattacaaattaagacgggacgatttaacattaatttataaaaccggattatctcattatctgtagaaaaacaattttttttgtacgtccaacaatacaacaatagatgttaccccacatttgcgcctatgtccaaaatcgggttccaacttaaatttttataatcctacaatagatggactaaaaagcttaaaaagcaatttaaagtgatagtttgcgataatttgatcgtcagcaaatttttcaaataataattaatctttcaatcatcgtaattattgttcctaataaactaaaagaataaattttattaaatttaatgctgtttaagacctctaaggcgcaagggccgcaaataaggaaaggtggaaacggtaattaatggggatacggtggctttggcgttaacaattttaaaatataaaaagtatcatttttagccttttggtttcctcaaaaaaagaacaaaagatgcccaaataggccaaaatctcacatttggatctcaggttaagcttttggctcaaaaaagagaattggccaaggcaagtgtcagaatttgtttaggttccgtttttaattattgttttttgtaatttttgtcgaatttttttatttttttttattagagtcgctcaccgactcttgaggaagaaaaaaaagttggtgatcgtggacaaaattggcagaaaaatttttgtcggaagaagtttaaagtgttggggagcaacaaatatcctcgtcgccgagagattttcacaaaaaccgaaattaagacttttctcgagcttaaactctcgggcatcacaaaaatttattcacgtgtcaagttttaccaccttctaaaattgttttcacagctttcacaagtgatataataagctttattacaataaatattacgaatataaaaatttttttttggtattttttaatgaatgcctttggcactgatcaaattataaatcatttttcctttacatcagatcatcctcctcctcatcattattcttccttcattcatccagtcaggctcagaaaagggctaaaaatataaaatgttttttttaattgattaaaaaattatttaaaattaaaatcaaaatataaatccaaaagatcaagcttttttaattccatcgaaaatttacaaaataattacatnagttttttttattaattttctaattgacacttaatttttcggatttaaaattatttttcgccattttacctgcacgatgcgccaccatcatcangcagcgcagcgttgacaattgcggcaaccaccagcttggcactgatgcca

SEQ ID NO: 11118 - DNA, 1921 bp, Heterodera glycines
cgctctctctctctctctaattgatggtctgggtttttctgttgaattttcttggttaaaattttcaaaatttttgttggattttttgataggcagttttacgaaagtacccctagcatctgcatatatatataaatttatatatatatatcttatggacaacaaacctctgacacagctcgctgtcacacaactattcccgtcaaaacaaccgcgcaatctctcatttactatatcagctgaattcaaatggggaaatgtttatagtttctaagcaaaaaaaaaaaaaagtaaaaataaaaaaaacattttcaaaaatcgaaatttgctgtaccataaaattcattacatttttaattgatatgttattaccactcacgaactccaaaagtggtttgtactccgctggcaacggttggcctttcgtgtgaccgacagcccgtaaggaatgcatgcagccaaattctggtagtgattaggtatcatcatcatttattgaaaaagctctgctgtgcttttactacaacaacaacaacaacaacaacagaaataagcaacaacaaaaaaatagaaaaaatatttaaaaaaaattattttcaaataaatcagtcaatttcgaaaggacccatttttagctcattgggtttgtcagttgattaaactggcttagctgaagaaaaaacaaaaacattcaccccaaaattttataattatttttatttttgaaccaaataccgtatacatgagacttctcacgcaaaattcggtacaaaaaaccaaaagacccaaaacttttgtcgtgtcgctcaagaaaacgagattctcgagtaccattagaaaatgtgcttccccagtgtttgtataataaagccaaaattaccgtacgacagctgcacaaccgtgccaagaataagcagttggagaccgattgaggcgacagtggtggccattgatcagatcggatgagtgggatggaagggattgaggaggattgaagaatgaacaagaggattagctaaatttatttttaagtgaaagatgaacatacaatttggcttattgggcccaatttgtgaccggaatttgtcaattacagtagtcctacacatatttgaagagacaaatcttttatgggtccgcggtctgcaaaatgattgcttcgaactgctttctggtggcccaaaaacggctatttatgcggccattttggggcggagttttcggcgctaacgccgacaatccgtccgcccatcgttcgtacgtccgtccctcggtcgatccgtccgttagccgaggcccgccccaattgcccagcagcaaaaattggctttagcattgtgccaaaagtggtgaatcattcattcattcattttgcccattttgtccatttttccaccaatttttgtacacttccgcccatttcgctgctcattttgttagcatcggtttttctgttttcacaattcattctgctgttactgagtgattcattcatcatccaaccacataatttgtccatcaaaagcagtgaaaacataaaaaattagctgtgctttcccagcgatgaacggaaatgacagaagaaaaaaaaatgaaaaagcgaataaattaacaaaacgaatttataaaaataatttatattaaatttattgtatacggtatgaaataatgttttatggtaaaaagtagtgaatttccgcttcagaaaatgtacagatcatatgatgatttttggaaaaaacaaactgacagtaaaatgaaacggagaattgaagagaggaaaaatgttttaatttccatatactgtatttgcaactaaaagtcgaaattaaaatttgttagtttctctaccgttgaaaattagacaaaagccgaaaaatgaccatttttagcaatgtgccataatttgttttgttttttt

SEQ ID NO: 11119 - DNA, 874 bp, Heterodera glycines
atttgcctttttaataaaaaacaaaattgttttgttgtgtgaatattatattttttgaattaacatatttatcttttcgtattcatacgtccgttttttctaatcaaaatttgatggacaaaatgaatgaatcatctcaaaaaaaagagtaaaagcgatggaaaagccaaatgcagaaaatgaattatcagatcagtaacaaaaaaataattggagagaattaatgaatttcgactgattgatatggaaaaaaaataataataataatatatatttctattttgatggacgaagttcgataaattaaattaggaattggaattattatcgccggcacgggacgcttcatgcacaattttgcgggatccctactcgcttttttaattgggctattccaataaattagaaaaaaaacagaaagtgtgtaggtaatgttaaggtggttggtatacaaatctaagctttaaaacacaaaatttgtaagcttattcttatccttacttaataaatgtctataatctgctaatctttttcactactaattaatccgagttcatctgatcatctccttataaatttgtcccggcgctcagttagcaggggcgcctgtccttacacttcgaataattttcaaatttaaagttgaatttctcgatatttctccaatttaactaaatgtgagccaaaagtctcaaattggcgaaatatgaaaaaaaaaaaagactttccatcaattctttctcgatgttttcctctttaattttttctttttaattaaatttattttcttgagaaatttttaaattttatatatcaaaaaaaaacattagtaaaaaaccataatgaccttttatattagcgttcaaaaatgata

SEQ ID NO: 11120 - DNA, 3367 bp, Heterodera glycines
tatgctcgtctttcgataaccaatcgccaaatccttatcaggctcggcatttattcacagtgccaaaacagaacaaagcttggcaatcggccgccaaaaaccaaagctctaccaagcaggtgatttcaattgaatgagcctctcatgatctgggacccaatatccaaatttacctgttttcatttcaactcattccgaaaacacactcccgcgaaaaaatcttgaagctatccgtttattgtcaacgaaacctattataagggaaaataactctcctaattaaggatacagacagaaaccatccttccgttgccaaccaccttcaagcgagttggcacgcgccatcactcgagcaaacgcccgccatcaggcgagcaaacgcccgccatcaggttggcaaagcacccaccatcaggctagcaaacgccctccatcaggcgagcaagcgcccgccttccagtgagcaaaagccctcgttctggcgaacaagcgtccgccttccgacgaacaagctcaacggtgtgatggttgggggagcgtctgatcggtcgagtgaagagataggaccgcctatcggcggtaaaaggagggcgaaccgcctgatcggcggtgtgaaggttggtaccgcctatcagcggtgaaaagcataaccgcctgatcggcggtgtgaaggtggggaccgcctatcggcggtgaaatgggggagggaccgcctgatcggcggtgtgaaggttggtaccgcctatcagcggtgaaaagcataaccgcctgatcggcggtgtgaaggtggggaccgcctatcggcggtgaaatgggggagggaccacctgatcggcggtaaaagggggaggaccgcctgatcggcggtgtgaaggcgggggctgccgcctatcggcggtgaaaaggaggggggaccgcctggtcggcggcgtgacggtgcggaccgcatatcgaaggtgaaaagtggggactgcctgatcggttgtgtaaaggaaggaccgcctaagaaccgacttaacggcgatgtcaaaaaaaatcgcttgattaacgcaaataaagatatacatttttgaaaaattgcgaaaatgataatttattcaaacattatcttttttggtgagaatttttcatttttaattgagtttagttgagcagattttattttaaccttgtccttccgcaccaattattcataaatttggccactgttttaaacagcgaacagggttaatttgggtcggtgttaattggccacaacgtgcgatgcgactttggccacaaagcaagatgcgactattaggcagggggatgaaaaattgatgcggtgggaaaattaaaaatataggctcaactaaactccacagtgaacttaaaattcgggactataatttcaggaaaaaggacgtaacattcgtgatcagcgaactagaacccccgaaggttgagacttaagattttttgttattattatttgggatactattttaaaaagttagataagatgaatttctctaattttaaaattttgttgactaatagtaagtataactaaatgatagcatgaatgcttattcaaagaaattatagtaaattgggctctcaagtgcctgggaggcagagagtttctaatttccaccatccacaaattcattacaaaatgcgaatttaaataattttttcagaaacgaaatttaaaataagcacctgtttaaatatttagaaatgattgggaaaaaatgtagggtgcaatggaaaagatcaacaaaaaagttattttgaatcaaacaattattattattgtcaagaaaaccttaacacaaaaaaaagggttgggtaatttcacaaaagaacggggatgatgggctaatgtggggaggaaatttttttttggtttttcttaatggaaaaataaattccaaataaatttttcagataatgttttaacctgcatattattaaataagttgtgaaaataaaagattaaattatttaaaggaaaagaagcgaaagaaaggattgtagatgtgtaggtaaaaaaaagctttattgaagatatgatatagatgtatttgtagttaggggctgagctaaatttataactcagttaatccttcgtacaaacacgacgctctaaaggtctgagctatttaataataactcagattatcttaagagaaataaaagacaaataaaattttaaaaaaatttacctaattgggggtagtgcgctctcgaaaaacgtaaatgacaaaaagttaattttccgttcaaggtcgaaaatgacgaaaaaattaagtcgcattgcatcgcaactaaataatctatgaacaataatctttaaacttttattttttaagcgaaaggtgttttattcctaggtaagaaacggataagaaagggccatgaaaaaaataaatggcaaaatgtctgaagaaaaaattctaaatatatttgttaagcatattttaaaatattaaatttctttatcaaaacaaaaaatattgttaggaaatgtttcagtttacagcaaaataaacaaaaaaaaaatttgggaataaacacattaaaaacttttatattttgaaatgatacaaattcaaaaaaatgaataggttaaattttaattaaaacgtcattaaggaaaaaaacgaaagaaatatttggacgagaaaaattaattaacgattaaaaattaatcgatgtttaaaaaatttgcataactttacgcagaagcacagccaggatttggatgagaaaaattaattaatgattaaaaattagatggaaatttgaggagggcgggggggggggggtccaatattaataactaatctgcagggagatgaaggttatcattgatagattttgttgtagaaataattaaattaaaaatcaaagttgacaaggcacttaaattttagcatatttaatctttaaataagccttcgtaatttaatcatttgagcattcattccgctgaagcgcagaaggaaggaattgaaaattggaatcgattatgcgactcgggggaacggaaagggagggaccaaagaaagtctgcaaaagagcggggagggagatattatcaacaaccaaatgcgtagctgtatattgtcaaaaatgcactaaaaagtgggatctgcaatttggacaaatttaagtgaaagagaatccccaacaaaaagcaacaattaatttatttgaatgagaaaccccctaaaaataaattagccgtatttaatttacggaaataatttgtcagaataaataaattcaattttaaaagtaaagggaattttggtgacaatttttttttgtcataggtaatatttgcaaaacgaaattttatggtaaagatgaaaaccct

SEQ ID NO: 11121 - DNA, 1674 bp, Heterodera glycines
aaaaatcagaaaattttttggtagatattaattcgaaaaatactcattgtcaatttattttttcctaatcaatatgcgcaatcttttcatagaagtacagccagggcagcggcaggtgggggggggggggtgtcggggaaacattgaaccggaccattaaaaggtgaacggaaatttagtcggggtcaaatggttaagcgaatgagtgggcagggggtcagggaaagaaaaagcgggaaatggcggaggggggagggggtttagccacttgctaaatatggggctaaaaaatggattaaaattaagttcgctaaataaaattaataacaaaggttttaagaaagcctttaaatttaagtacattattcgttcatggaaatctctttgcgcaatcattgcgcagcagcgcggaggcgggaggaaatagccaacaaaaacaataataatttatttgaaagagaaagccctatcctaagcaacgtttatttaaaatttgtgaaattaaataaaaaatagagtacgataggaaaaaaataggttcaaataaaattaaaggaaaattatatgaatcttttttttcgttattattttccgtatttccatgcgtcaaaaaatgggaggggaagagtcaaaaatttgaatcgattaaaccccaaagaatggagggcggcgcgggcaagtggtcggatggcaagggatgttcataaaagggagctcggtaataattggacgggtggggggtttgtctaggaagggccggaattttacaccgagatttgtggacatatactactcatattatataattagtaaactatgaatattgaaaactgtaatcaaataaaatccgttatttttcactgttctttaaaacgttctccaaaaatatggactgaccagcataacaaattctaaacataagaatctcattaaaaacaaacaaaacaaacttttgttagcaaacaatcaacgttttcatataagcaattgcaaaattttttatcacaatcatagcgtttttgtccctttagccgcaataagtaccacaatatttctttgcaacttacaaaagggaaaaaaatttatttagaaaggttatcacacaataatttaacaaaaaatttaatttatcttcattggctgtttaatcagttcaaaatgtccatcattaaaatacaaaaagattgatgctgttgattctttttgactcaggttcgaaagctaaagtttcaaaatgaatttacacaatcaaaacgttctaaccgatgtttccaaatctggtgaataaagttgccaacggaaaatcctttcctgtaaacgttcgcaaacaattatattaattcgaaacaatttgctggctgatgctatgtctaaattgttcatccatttctcagtttcatgtgctcctgttgctggcgcaacagcaatttcaatgtgttttctaatattttcaatactgttaaaaagcacttaaattgtttagttaaaaaactcttctaaatagattaacacttacaccaccattcattttcattatgatttatatgcgtgtgttgatatatagattcttccaaatattcaataacatctcttcgaatatcagagtgattccattcacttccagttaaagcgagagagatgctacgccacccacagtttccatcacctattatt

SEQ ID NO: 11122 - DNA, 3282 bp, Heterodera glycines
tctctctccccccctcttttctctttctctgctccacctgtgtcgttgtcacactgtccgccccgaaatggcaccgtttgttcttgttcttctctcgccgacaaaacagcacaaaaatgaggcaacagagcaaaaagattccgctgaacattgtcaacagaaacatcaaagtgtccgcaaaacttcggacgccgaaaaagccgtaggaacggagcacacaaagggaccgaaagagagaaaaggaaatgaatgaaagcaaaatggggacaaataatggcattttttaaatgcttggaaatggcacttttattgccctttggtttatctttcattggcattttgtgccctcctcccgccccctccacctgttctcctcgcgcagaaactcgagcattggcattgagaagaggtggtcgtccgcgtggttgggcaacgcgaacactttggccaacactgtgctttcgttgcgttccttcgcccgcgtcacattttccacgcatcgcatccccggcgcgtctgtcacgcgccctctgttgccctccagccaatgggccgcgtccatcggccggcgcttccgccgctccgccgccgacggttcgacgctggcgcagtcgcagcggaacggattgcccgcaagcgaaacgcgacgcaaattggcagaggagggactctgaagggtaattagcaaataaataattaaagaataattagcaactaattaattaaagagtaattagcgaataattaattaatatgggttgtttgcctggaggtattctggcacttcctccattgcgttgtccgctaaaagaagtgtctccaaattgggcagcacttcgcccaattctgtgcccatttcggtcaatgcgtttccgctgaggtccaacaaacgaatgttttctgtttctgtgcattcgctgccattgaaatgcgtcagtcggttgttcgacaaatggagggactgaaaaggaagcggaatatttaaaatataatttaatgggtcaacattatgtctaatttatttgtcattttccaatttctgttttttgttgttggccggcactgatcagcgatcacttatcgattaattgactcgttatcgattgatccgttgattgattcatttacccactgaacagtggttgagttccgatcaggcgtcgcttcgttctcttaccattaaattggccagcgattcgaatgcgcttggctctatcctccgaatgtccgatcggttgaggtgcaactcgcgcagccttttccggccgaaaaattcgctgctgctcagcacgggaagattcagtcccgagaggaaaacatgagaagcatgcattggcaaagccctgaaaagaggaaaatgacaatgacaaagaaaaaataacaaaggcaaattgtgaaccgaagactaaaatcggagccgacggaatcgccggaacatttgacgacatttgtggcggaactccgatcgcggaaacagtgacagccggggggacagcgggactaaacaaaaggggtaattagggccaattaagaaggcaactagcaattaagcgaaatttgggagaacgcactttgcagtcgcatccgttgaattggcagcactgacagccgatggcacagaaaagggaataggtgcacagaaaatcaaaggcctgaaaaggaaaattacgacaattagcaaatccttcctatttatacccgcataattagcatcaattcctaattaccccccgataatcagcatgtaaattcctaattacgccctccccccaccgttgtctcaatgatccttttccgctgcccatccaatggcaccacacatttggcactttctatgtccattactccgccctttgcggcattgatttgcttgcgcgaaatggccgtgccaactgcggaggccgaggcgttcagcagccaattcatctcgcaagaacattccaacggattatcttaaacggaatttaggttttggaattaattaatgactgatttggttttgctttaattgactctaacctccgacccaaagttcgccaaatggtgcatttgcgacaacaaatcgttcgtaaagttcgcgcggaattgtgctcaatttgttggagcgtaagtcgacctaagaaattccaccaattgttttaattttgtcttttggcattaaatgccaaatcattcggcacttttttcagctgtgccattgccgtgtctgccaattcgtaggcggtaccaaaggtcacttcggttagccgattctcgcgcacgtccaattcctccaaggacggcggaagcgaatccatggccaaattggccaagtgatttcgtcgcaacttaaatttgaaatttggagatggtcctcccctttttgtcagaagaatgtcaaatgcctcgagtttgcgcagttttcggcccctcctcgcctcgtcctccgtgccaatgcttcgcatttcgtttccgttcgcctcaatttcgagcagttcagcttcggccgggaattgggcccattccaactgaattttcacttggattttatttttctattatcttttcccatttttttgcctcttccattgcattttcgctgacattgacccattggagggaggccaaaccgagcagagatttgttcagagatcggattttgttgccggataagtcaattttgcgcagccgaggacatttggcaaatgcatcggagctgaaaaataataattaaaattgtgttaaataattaaattaaattaattattaattttaatcattagttattgtcttcggattgccttagcgtttgaattcgatttttggccagcgaaatctcggccaaattggcgcagtcggaaaacacgaaactttccaccgattccaacgaattccccgccaaattcagcttcgacaaatgtgtcaatttgttgagcacaaatttgtacaaataactaaaaaatcgtttaattgtccgattgttaatttctttttccattttcacttttccctcttcccccttttattgcccccccccaatttcggatttgtcccctcaaatgcgtcgtctttgccaatccatcaaatgtccgtcccccggagggacggacatttccatcggaaagcttcgccaatttatttgcccaggggtcatttgtcaaattgaaaataaaattcaaatgccaaattttgcgtcactcttacgaaattcggctggtgggaaagtccatccgtttgattttttggagtcgccgcaccgccacgggcatttccgtcaacgcattgttcgactgatgggaaaaa

SEQ ID NO: 11123 - DNA, 2240 bp, Heterodera glycines
cagttcatttaatcgctcacgaaaggggggattttagtgaacaaattgtcgctctaaaaaggtattataacataaaaaaaacaaaaattcggacgaacgcactaaaaaataaatgggaaatattcgggggagggcgggggagcgaagaaaggcgattcggggagaggtccaactgctgaaggaacggcacatggccaaaggcagcggagtcaatctgagccaaagtgttgttggccaatgccaatttacgaagtgccgggaaagggctgaggtcggactgccgaagttggccgatctgattggaggagagatcggcgatgatcagttggccaagttggcattgggacggagagagagagagggagggggaagagagcgaattggacgacacatccaacacctgagcagagattggccattatgggagtggtcgaatggcataatagcaaattaaatgcaaagtgaaatgattagtgcccctttccctcgcctgaagtgcccgcaggggacaaagcgcattcagcgggaaatgcgtcagtgccgtgccggtcaaagtgagccgttccaacgcgtgaagaccgtcaaagaaatgggcactcaaacggaggagagacggcatttgggagagatgaagcagccgaagacggggcgtggaaaggaaaagccgacgcggcggggagagaagccaacggaggagaatgggagaagaggagcaattctgaacaagcacaccgtaacacgggctatcacataacgcatcattccgaccaacagcataccgtaacccatcgtatcccttgcctttttgcccaatttttgtttacagtactctgtcgttttcccaatttattgcttgcacatttttagtttattgtactctgcatccccaattctctaccgtaatcctcaactcctgtagctcgtcgaacccgtcaaacggtgcttcgtcctccccgtccccgctttgctcccccgcgtcgtttggctttgtccccgtgcattgaatgctcagtgattttgtgccgccgcgcggaaattggccaaacgaacgcaattttggccaagcacagatgacaatgagcagttcatgcttcacatcgtcgggcatacagctgcaactgaaaacggaaagggaagtcaattgcattaattaatttttaagtgccaaatttggccaatgaattggcactttccgtcaaattttaattgcctttttctcggccaatgttcggggaatggcattcgtttggcacacattcatcaaaatgtctctctccctttcacatataaacaaaaatttgtttatcgttcgttgacaatggagaaaaatttaaaattaaaaaattttccgtctcataaaattaggcgaaccaaaaataaaaataaatggaaatggaaatttggcgcgaaaaattattattgccaaaatgagaaaaatgtgaaaattaatgaaggggataaaattttaccaaaaaagggtttaaaaaaagcattttaaaggggatgcaaaaaattatcagaataaaaaagtgagcgaatttttcggttcaaaacgtaaaattcccataaaaccccctaatagaccgccccttcccggcagtgtctgagcaaaattgcttatgttcattaagtttttttcctaaactctgaattgcctctaaattacctaaattacccctctatttgctgctctttcgttttctctctctcccccccccccccccattttccccccattttctcccattttcgtttatgacgcgccaaacccaaaagcattcattcgtttcattttcttttattatttatgttttattcgttcgcttttcggcttcttttatcccccgggggaaagtgcagtaaaaagaagcaaaaagaaaagggaaagaaactaatgacaatttgggaatggcacactaaaaaataatcagtccaaatttggttggtttttccttgcccaccccctttttgccccccccccttccccgtttttaaaaaattccctctcccctttttttactgactcatcagggcatcggtagcgaaaaacggagtattgttggtgttgttggtgttgcggttggtcgttttctgctgctcctccgtttggcgttgtgtcccttcgccggtgaatgtgccccgaggcgattttgcccgcagggaatgccaaaacaaaagccaaaaggcaaagggcaacagtgaacagcttggacttgtcgaatttgctgatccgtttgaag

SEQ ID NO: 11124 - DNA, 1791 bp, Heterodera glycines
  unsure (1)..(1791): unsure at all n locations
tctgggctaaattttcagtccctctaaattncggggcttccctttctcttttttcccgtttctgacagaaatttcaacgcgtacatagccgttctaatcagtttttgtcatgaactaaaccggtcaatatcgaacactgccggcggagtggtcaacggagcgcagacaattggctctgaaatggcgctttcctccggtgggaggctgacggtgagttcgtccggccaattttcaggtgtttgccgagccaatttggccctctccaccataattctgataattttaacacatcaggtgtcactggccgtgtggcgaggtccgcgggattgtccgcggatcgaacatagcggaagattatgtgccgattggcgcgaatctctcgaacacgatttgctatgaaaatcggcattttatcggtggatgctagccacgaaagcgcaatgcgcgaatctgaccaaagattaatttgtccgatctcataatttaaatgtttatgcacaaattttactgcccgagatccgattaggattccaagtaactctaatcgtgggatagttagaccatccgcctggtccaccgccattttcttcgggcggagacgagaacgagcgtaagccaacgacgagagaattccctgcggcatttcagctctcaaatagatcgtgcaggcaaaagcattaggtgatgcatcggtgaaaacatgcaattgaatttcgccagtgttaattcgaggcgtgaagcgcgctatgcgcatcatttttgctgcccagagggctttaatttcatcccattctttggtctcttctactgggattggatcgtcccagctttttgaaccatcccataatttttggaaaaacaatttcgccccaaccaaacagggcgaacataaccccaaggggtcgaaaaatgacgcaactgtttttaggaccgttctccgagttaaaccatccggactaagaactgtaggaaaagtcaaagacaaattgtcctcacaaatagtccattttactccgagaaccgttggtgcctcattttggaggcgatcattttcaggtatttcgtccaaacttgacggatcagccacaatgaattcgcacagacgcattttagccgcggcgaaaatttctgtgcttcggctgcctttctgcgtgcttcctcaggcgaatcagccaaaagcagaaggttatcaacgtaaagcagagatttttcccggatttcctctgctaactcactgggaaatgcttccaaatgatgttggagtttcgctgccaatagaaaagggcaagacactattccaaatgttatcctccgaaagcggaaaacgagaagattttccccagaaagtggtgcaaatatattttttacccacaaaaattttgaaaattcacggtccgattctttcagacttaccatcagaaaagccttttctatgtcggcccaaatagggcattttgtggccctaaactgaatgagttttccggctaaatcaggatagagatttggccccgaaaataacatttcgtttaatgattgggcacccttttcgtgggatgaagcatcaaaaacgattcgaagctttttgcccatcactgtatgatgggcaagaaatgttgtggtcttttagcgcgatgggccttttcaattattcctttctctaaatattcctgtataatgtcgttacaaccgctaaaaagttgtggcgattccttcagtctccgtataagtgcagaaagtcttgaaaatgctaatctgaaattttccgccgagtaatctccctcctccttccat

SEQ ID NO: 11125 - DNA, 2011 bp, Heterodera glycines
  unsure (1)..(2011): unsure at all n locations
aataatgtgtgaaaagttaggagctaacgcttgaaaactaattattttttaattaaaaaaaatttgggacgaaacgactcattttggcttaggggacgaaacgacgcgggacgaaacgactcattttggcttaggggacgaaacgacgcgggacgaaatgacgggcagcgccttcgtcctcggcaggggtcagctccgtcccgccaactccatcccaagcgccaaaattcagaatttttttattaaatagaaatttgtgcttttaaaataaataaatggctgttttttattttgaaaataatttaaattaatctaaccaattttgcacgtcgtaagatgtcagaagagcaaaataaatttgcattaaatttttttttaattttcatttcttataaccaccgggtcaattttgggctcccagttcaaaaagtaaatgcatgtgtggcgaagtggtttttgtaagatagtaaagggacaaagggaggaggttcgagatcatttgaaagttcttgatgagaagaagctttttctaagcagttaaccaatccgatgagttataaaaaaagttataggtgttcgaaactttgttttttataactcatgaaatattgtgtaagccaaataatggctgtattacaggatgtgttatttctggggccaggccgttttcgtacgggccgttttcgtacgaacacaggtttttggactataacttttttctttggcaaccaaatccaacactgttgttatcattcgagagcccttcagatgctctattagcatgtaaaattccaaatatttcgtcaagtttaaaaaaagttagagccaaaaaagttggaaaatttattttttgactcttctgaccataacttttttgaaccttaacgaaatttttccaaattttgcagagtaatagaggacacatagggctatcgaatgatactaacaatgaaagctaaacgtagcgaagtaaattcagtttttctgtattaacagagataaaaaatagtacgccaaaatgagagatgtttttttctctgcactctctatttattgacacatgtctcgttttttgactcggtgtgtatacataggtctatttttgaaaatattaaggtcgattcttatgggtatatttttctgaaatttttttagtcgattcttaggagcactatgggtcaactccactgtgcagagaaaagcctagtattttgtttaacactgggcttgacccatagtgtaggggtgtatgtattttcttttttgggtccatctcgtttgggcgccagcccatgttttgggctaaataacttcttttttttaaccaactccaacatttttggtatcattcgaaatgattttggattttggtatcccaattctttgcttaaaatcccttcccatcagattttgttggcacttcacttgattttggattttggtatcccaatactttgcttagaatcccttcccatcagattttgttggcacttcacttgatttgggattttggtatcccaattctttgcttagaatcccttcccatctgattttgttggcacttcgcttgattttggattttggaatcccaattctttgcttaaaatcccttcccatctgattttgttggaacttcacttgattaagcaaatgcagatttattaatacattagacaacaacagacatcgttttatttgtcaacaataatcagaagttcacttctattctggcctctctcatttcagaacgcaattaccacatcatccctttgcttttgttgtacagcgtcaaacgggcgcagccataaccctgaaaatcgtatttttgttatatttagattatgattttgtgagaagtgcaaactgccacccatggttatctgctattttggtacacttacatagtagtcgaatttgatcggcgattgcggttgccattgaagttgccattgtttaaggctccaaatgccccanaataagtgtgaaactggaacaanaggcagagtttcct

SEQ ID NO: 11126 - DNA, 2563 bp, Heterodera glycines
cccttacccacaatttttttttgtaaaacaccgcaaaaaacgcaaaatgtgatttggtaagcaaaaaagaaaaaaaggtcgtcagaaaaaaattgagaattttttcaatttcttaaaaattttggcctttgagggggggggggggtgggggtatattttgggtagcaaatttttgacccccccccccccctgtccgtgtatgatcccaccgtttagtttggacgaaatgacctctacttcaagctgggctatttctcacttatcggtttgccctttctctaaagcattgttttttactgtccaattgttttgggtctgctgaggacgcatgttctgcttggggattatcaccaggcgctgcaaactgttgagtatttggaaatggatgctaaggtttcgtgccattcatcactgatgtccggtgaagtaaaacgtttcagggtttgtacaacaccgtgccctcctgtctggtcaccctccattacttcgtcggtttctcccacttggtcagtgcgtttgccctccgtttctgctttgatttcctttcgctttcagatgatgcgcaattatgccgaggctgccaaaatattcatcatctgtttgtcgtacattcagcgaacccaaagtttgcagcaacaaatgcaaccgcagcaaaggaacaaagcgagcaaatacgacgtggtcagtcaacggaacgaatgattcgcttcgtctttttcattttgtttgcctcgacagattggcaaaacgaatgagcagctcttccacctgctgaccatctgtttgagtctgcagccgcaacgcatcgacgagtccatccaatcgcaacttcaggataaatacggggaaagaatgctgcgtatggccaacggcgacatcgacgagttccgaaacgccttccagcagggatgtcccaagttcttgtcccccaccactgttgtctacgaagggagcagtgtggccaaagtccgacagacccaaacaacttgaaaatgccactttttctttaggagcctttgcttcgccaatgcaatgcgtttttggaaggcatcgaaagtcaaattagtctgccaattttacgtggctatcttaaactgtagatgaactaaaaactgcattgaattcatacactaatttcagctacacaactcttcccgtccaaaagttggccagtttcatggatattcccgactcggagttggactctttcatcggcaagctcctaacctacaaaatgattgtcaccgaattgggcaaggaaaccattgacaaaaccgaaggggtaagcaactacaaacagaaacaaatcccttcaaaggatttaatctgtctgacttaaggccgatgagaccaccgatttggatttctacgttgataaggtccatacggaatgtttttcttattttcatttttagaatattatatttaggacatgattctgatcgctgacactaaagtggctcgtcgcgtcagcgaatatttcatcaaacaaatcggaaaacttcgtgaggtgaatttggagggggaaagaatccttagagttctcctattctattttcgtttctttctcttttcagatttctcgaaaaatcaaatcatctgtcactcccgttggtcaaatacacaagaattgatgttttgtcactgtaattgttaattattttagacattcattcgttttcgcttggcatgatttgttcttacacattttctgttgtaaaatgttaattcaatcatatcatttggcaccattttatctgctagtacaatgacaatcactgtcaccataaaggtaaagccattgttcccttttctgattttgagggtccaaattagacaaaataaattactgtttggaaatgccccgataagggcggtaacgtaaatttatcgggtttttgtttttctgtccaccctcaactgaaaaatactctctccccttttaagacagcaattagttaattatttggctattgtaaaattcaatcattttgagaaaataaaatagtctttccgggtaattctcgccaattcaccttcatttgtcccgtctttggtgtccccaccacgcccatcggtggggtgggggaaggggggggggtttcattgatgatgttctgtcggggacatcaagaagagcattataatcggtgcgttgttgctgttgcctctttcggttgtaagcacgacgaactaatatccatgaaggataattattcgaaatcgaattttcatccaacggatctgtatcgttttttaagtcagtttctcgtacctttgataagccttgacgccaaatgactttgccttctgactcacacttcaaatgttcattcctttgttctctatcgacttgatctgcttcaattaaatctcgtgagaaacatttttcagctttgatcacgggtattggggcatcagttgtgtaagaatcattttttgtttgtgtgtgcggaaacgacagttagttttggccaagtaacgtttccacgtaaataagcttaacttaatccctttcaattgcatttgttcttggagttttatggaattaatttttttattt

SEQ ID NO: 11127 - DNA, 1009 bp, Heterodera glycines
  unsure (1)..(1009): unsure at all n locations
aattccgaacctctgacccggattcgaacaaaagtcgaaaattaatttttcaccaaaatccacctttatgttcccaaaattaatttaaatctgctaataaaaatgcaacaatccataaattcaagttcgcacgtaacatataaaagattagcagatttaaatcaattttggaacataaaagtggatttggtgaaaaattaattttcgacttttggttgaatccgggcccggggttcggaatcagtcgaaatggatgtcatattcgtgatcagcgatcccaaaaacctcatggttacattttatatgtcttgtaaaaaaaaaaaaaattatgtggcctaaactgtataagtaccgcttggctaaaaactcgccacaattttcgcatggattgccccccccctttgcctttggccaattgtcacttttctctttcttttctcaattttcggtctttttctgattctcaacatttcctttcccttttgcttattatttttcttcattacctcacttttcttcccctcacttttctcttttcattcttcccaatgtcctcccaaaatggcactgattcttcccttttggacgatggtcaatggttggacgggcatttccccctgcaccacgcagtgtttgacaacgatgtgccaaggctgggacaattgctcaaagaggcagcagcagcagcaggtttggacattggaaaatgggaaatacgcttaaaactccgtttttattggccaatccttttcagctgaatcttcggtcatcgacagagaagacacccacgggaatacgtcagttttccatagataacatttaaaatttgtttgtccttcctttatatttttaaaaatttaatttttttgtatttttgtttattttagggccatgcacatcggctgtatgcttggccacagaggttcctctgacaatcatttggttgatttngtaggttttaagagtgtgtaaaaattgctgttggaacatggggcatccgtccaatccg

SEQ ID NO: 11128 - DNA, 1020 bp, Heterodera glycines
acagacttgaaaaattagaaaataaatcggataatttttgttactgtacagggagttctcctcgtggattcgtacgtttgttccccattttcctttccatcgcttcgttttcagctcttctctcgcggattctcccctccgacactttcaaaatttacaaaaaagggcatcgccttcgctttgacttttcgcttgtcgattttaacaacaatggcccattgccaaaatggtatgtcggaaaaatgattacttttaccacttttttatatattttttgtttgttttctaagggaacgtggcgatgtgtctttgcttttggacattttgtcaaccgatggacgaaaggcggtgctaatggacaatcggaagagggtcagcagttggatagtgattttcagcataaccaaatgggactttgaatgattacaggtttaccaagtgttgcgggaaaagaaccaaaatctgagcgatgaattggacttgctgatgacgtcggacatcaccaagttggccatggccaaacgacgccctaaaatattggctaattttgtatttcagcactcacatgagcaccaaacccatccattttgtgcaggcgaaaaattttctcaatttcccaaaatgggtgggcaaaacttaaattttatttcgcgctctttaaattttcattatttaattttttaggacaagatcgacaattataaagcatttctctatcacataaagggaatgcagctaattacaatgaaaaggtgcattcataattgtaaagtaatttaatccgttttgatttcagacgcgagcatttgtcccgtgaggatttggaaaggaacaaaaaaatgcaacttttcttttcgagcggtaaaatgccgaaaggagatgacaacactttggaggatataaatacggaaatccctgagcatgacccggtcaaattcagtgaaatataatttaacgaggaaattgcagaaaaactcggacgccgattcatcaaatttggacgacataagcacagacgac

SEQ ID NO: 11129 - DNA, 1251 bp, Heterodera glycines
  unsure (1)..(1251): unsure at all n locations
taaataattatttttggtaattaacaataaataggtcattgacaaaaaaaattaataaataaatggcacttcttaaggaatcaagccaccgcaagtcaatgtgtccagattggggcagccattacaagacacagatttaacattgaatgttgaaccaatttggtaagcgcatacggtagtgccttgccgtgccaaacagccccgtgtgtttgggcttgtgccacggaccagcgcttggattttgcaaccttaattaattgattaatgatataattagagtctcggtctcgtttaaggcatatggcaaattaagcgacacgcgttgaaaatttgtttaattacagtttttcagtactgtcttggcgtcggtttttaagaaaaattccttatatggggtgggcctcacgccccatttgcccaattaccgtcagtcgtggcacagctatccggacactgagtggtcagtcggaccaaaatgtccccgttgcgctccccggacggctgatagcacacattggccgcgtcgcaaacgcacggattcgcgcattgtgcgttttgctgaacatcaaacggtgtcgtcccgcgcggcaacggttccgcgtttgtgccgcccgggcaagcggtcactgggcacgcgggctgagttggtgcagcaattccgccttgctgacggtcaaagaccaatgtggcagtgcatgccgtacacactacaattaaaatccgcatttctatcgctttaaatatccggaagatatccaaaatataactccggagctatattatatataaaattatcattttaaacatacgagttgttgttgttgttgttgtggttgttgttgttgtagtcgttgttgttgtactggttgtcgttggggtcgttgttgttgtagttggagtggtagttgttgtagttggagtcgtagttgttgtagttggagtcgtagttgttgtagttggaatcgtagttgttgtagacgttgtagtcggagtcaatgttactgtacttggagtagtagttgctgtagtttgtatgggtattgtagttgttgatattgatgctattgtcgtagttcggctaattgttgtcgttgcagttctcatgcaaccgttgacaaattgttgttgtaccgctatgaaatatactacntgcatataattcactgttagcataatagctttaagcctttgacatatgtttcattttgttttccttaaatccaaaattgtttattgactaataattttttt

SEQ ID NO: 11130 - DNA, 2836 bp, Heterodera glycines
ttaaatccagaaaagtcgtggaaatatgctaatttttctccactggcaactttttattttaactttttttatattttgcctaaaataaaactatttatttaaaattcagctataaatcatatagttttcttctctgtataattaaataactttatttggatgccattttcatataagttaaacagctgactgaccaactaactactaattacctgctgctggaggaagtaattatgtgtgaaaaaatttccactccaaatcaatccattaaaccgcttttgatgataaattgggttgtcggtgaacaaataaaaaaatttgcgcgaaagcgcaatgtcaaaacatttataaaatgtgatatcaagagacgtaataataaaagtgcatttttttgaaatgactcgttgaatcaaagatttattaaattaaaattgattcattcgtcaggtacattaacattttcccaaggctaaaaaaattggacaacaaaatttaaattgttttataaattataaattagaattgccaaaatacaaattatgccatatgtacaaaagatataaataggaattttatattactatttttgggcaataatttacaaaaaagcatggaaacgtgcataaataaataaataaattattataaacttaaaattaaaagttttgtttttttccttttaaaaatttttgatttcaaaagaaatcctatctaaaagagtttctcaaatttttctaaaacatgaacattttgaaaaggcctttattttgcttaaatttctcttgatgctcttttgtcatttcaccaaaaacaggtgatcaacaacgacctggaagaattaatggtgcggaaaatcatttacttccactaattatttccactaaacgctcagctaattggcttgaaattcgtttgaaacctgcatccggcggtgagtttgtgtgaaccaacaaaaaatttcgccaacgatttagaaaaaatttaacaaagcttttttggtagatttatatctgttttttttttgtaaataagagtattttcagagaaatacatacggtaatccgttttcatatactttttacttaaaaaacttttttgatttatgccaagaatttagtttttttttcaatatgaaaaggtcatattaatgtattaaaattggtagctcggacctccattacaactcgcagaattggcactgaaaatgccaccacaatttcaaatcgttccttatattttttgaccttacaataaattataaaaatgattatatttaaaaattgaattaaattattttgagtaattaaaaatttctgttgccacctcttatctaaaaatacatttattacaatgttgatttttcttttttccaaattttaaaattacatttattattttaaaaggcgagtttattagagaccggacaactggggtaggagggatcccgagtcgggatatcgactgaatcacgaacattttggaaaaaagatcgggacggatcccgagtcgggataccgactgaatcccgatcaatcccgaacattttgtaaaaccgatcgggacggatcccgagtcgggatcccgaccaaatcccgatcatttagttaataattttgtttttattttcatgtgaaagtttatgtgccatgaataagattaaagaattatttttggtaattaacaataaataggtcattgacaaaaaaaaattagcgcattaaggaatcaagccaccgcaagtcaatgtgtccagattggggcagccattacaagacacagatttaacattgaatgttgaaccaatttggtaagcgcatacggtagtgccttgccgtgccaaacagccccgtgtgtttgggcttgtgccacggaccagcgcttggattgtgcaaccttaattcatataattaaggatataattcgagagtctcggtttaagacacaggtctattccctatatgggtgggcccctcatgccaaattaccgtcagtcgttgcacagtcatccggacattgagtggtcagtcggaccaaaatgttcccgttgagtaccccggacggctgatagcacacattagccgtgtcgcaaacgcacggactcgcgcattgtgcgttttgctgaacatcaaacgctgccgctccgcgcggcaacggttccgcgttagtgccgccagggcaagcggtcactgggcacgcgggctgagttggtgcagcaattccgccttggtgacggtcaaagaccaatgtggcagtgcatgccgtacacactacaattaaaatcctaatttcattttttcatatcgctcttttaataggaatggtcgagaatatttaaatgttaatttgagttctagtcaacattaaactttttagaaatgaagtacccaccggcgcttggtcatttagaaaatttgcgcatttacaaataatttaatattattttgctaaatataaatattaggaaatccaagttacccgcactactcaagcaattgttcagttgtccaaacaaaactaacatgcaaattccccgaattccaagcccggaactatattaataataatttttaatgtacaagttgttgttgttgtggttgttgtagtagtggtagtagtggttgttgttgttgtactagtagtagttggagttgtagttgtagttggagtcgtagttgttgtagttggagtcgtagttgttgtagttggagtcgtagttgttatagtcggagtggtagttgttgtagttggagtcgtagttattgtagttggagtcgttgtagttggagtcgcagtcgtagtcgttgtagaagtagtagttggagccaatattgctgta

SEQ ID NO: 11131 - DNA, 1366 bp, Heterodera glycines
  unsure (1)..(1366): unsure at all n locations
gggggggggaaggccccaccacgaggccgcgaagaggccgagtgagtaccttcggtgcaggaaaattattaaggaagagagttcattatttatttgttttttgcataattaattcataaatatttttttcagaaagggttctgaaacgcaccaaatttatttacaagttgaataaggctctctgatgcttttactatcaaaaagggagatgaataaaatttttaattgctttaaacatgccaaaaagtttaggcttaaattaaaaaaattttcttcggctctagctctttcaataagcaataaaatcgtaccaaattttataggcatactccccggaacaggactaacttaacctgaaaaaatgacaattgtaattggttttaaatttttttagaaattctgagtttttcactgtttattattttttgcaaaattaattcataaatattttttcagaaagtgctctgaaacgcatcaaattttatgtacaagttaaataaggctctctgatgcttttactatcaaaaagggagatgaataaaatttttaattgctttttaaacatgccaaaaagtttaggcttaaattaaaaagattttcttcggttctagctctttcaataagcaataaaatcgtaccaaattttataggcatactccccggtacaggactaacttaacctgaaaaaatgacaattgtaattggttttaaatttttttagaaattctgagtttttaactgtttatttattttttgcaaaattaattcataaatattttttcagaaagtgctctgaaacgcatcaaattttatgtacaagttaaaataggctctctgatgcttttactatcaaaaagggagatgaataaaatttttaattgctttttaaacatgccaaaaagtttaggcttaaattaaaaaaattttcttcggctctagctctttcaataagcaataaaatcgtaccaaattttataggcatactccccggtacaggactaacttaacctgaaaaaatgacaattgtaattggttttaaatttttttagaaattctgagtttttaactgtttatttattttttgaaaaattaattcataaatattttttcagaaaatgctctaaagcgcaccaaattttatttacaagtcaattttagcactctgatgcttttagtatcaaaaaggaagatgaagaaaaattttaattgctttttaaacatgccaaaaagtttaggcttaacttttttttcagaaactgatcagaagcgcaccaaactttgcagggatactgaaaggaagagaaataacctattttaaatattaaatagtcagttcattaaaataatttttatccanaaaaatttt

SEQ ID NO: 11132 - DNA, 950 bp, Heterodera glycines
tttaattcacagagaattttcaaatggctattctacgccagaaaatggctacctctttttctgagtaattttgtgttcaacaaatgctccaaaaagcgagccaagggccggagagcaatgaccattttaattcacagagaattttcaaatggctattctacgccagaaaatggctatctctttttctgagtaattttgtgttcaacaaatgctccaaaaagcgagccaagggccggagagcaatgaccattttaattcacagagaattttcaaatggctattctacgccagaaaaatggctatctctttttctgagtaattttgtgttcaacaaatgctccaaaaagcgagccaagggccggagagcaatgaccattttaattcacagagaattttcaaatggctattctacgccagaaaaatggctacctctttttctgagtaattttgtgttcaacaaatgctccaaaaagcgagccaagggccggagagcaatgaccattttaattcacagagaattttcaaatggctattctacgccagaaaaatggctacctctttttctgagtaattttgtgttcaacaaatgctccaaaaagcgagccaagggccggagagcaatgaccattttatttcacagagaattttcaaatggctattctacgccagaaaatggctatctctttttctgagtaattttgtgttcaacaaatgctccaaaaagcgagtcaagggccggagagcaatgaccattttaattcacagagaattttcaaatggctattctacgccagaaaaatggctatctctttttctgagtaattttgtgttcaacaaatgctccaaaaagcgagccaagggccggagagcatgaccattttaattcacagaaaattttcaaatggctattctacgccagaaaaatggctacctctttttctgagtaattt

SEQ ID NO: 11133 - DNA, 1210 bp, Heterodera glycines
ttttctgagtaattttgtgtcaacaaatgctccaaaaagcgagccaagggccggagagcaatgaccattttattcacagagattttcaaatggctattctacgccagaaaaatggctatctctttttctgagtaattttgtgttcaacaaatgctccaaaaagcgagccaagggccggagagcaatgaccattttaattcacagagaattttcaaatgtcaagggcttctattctacgccagaaaatggctatctctttttctgagtaattttgtgttcaacaaatgctccaaaaagcgagtcaagggccggagagcaatgaccattttaattcacagagaattttcaaatggctattctacgccagaaaaatggctacctctttttctgagtaattttgtgttcaacaaatgctccaaaaagcgagtcaagggccggagagcaatgaccattttaattcacagagaattttcaaatggctattctacgccagaaaaatggctacctctttttctgagtaattttgtgttcaacaaatgctccaaaaagcgagccaagggccggagagcaatgaccattttaattcacagagaattttcaaatggctattctacgccagaaaaatggctacctctttttctgagtaattttgtgttcaacaaatgctccaaaaagcgagccaagggccggagagcaatgaccattttaattcacagagaattttcaaatggctattctacgccagaaaaatggctacctctttttctgagtaattttgtgttcaacaaatgctccaaaaagcgagccaagggccggagagcaatgaccattttaattcacagagaattttcaaatggctattctacgccagaaaaatggctacctctttttctgagtaattttgtgttcaacaaatgctccaaaaagcgagccaagggccggagagcaatgaccattttaattcacagagaattttcaaatgtctattctacgccagaaaaatggctacctctttttctgagtaattttgtgttcaacaaatgctccaaaaagcgagccaagggccggagagcaatgaccattttaattcacagagaattttcaaatgtctattctacgccagaaaaatggctacctctttttctgagtaattttgtgtttcacaaatgctccaaaaagcgagccaagggcccgagagcaatgaccattt

SEQ ID NO: 11134 - DNA, 901 bp, Heterodera glycines
  unsure (1)..(901): unsure at all n locations
agtaattttgtgttcacanaatgctccaaaaagcgagccaagggccggagagcaatgaccattttatttcacagagaattttcaaatggctattctacgccagaaaatggctatctctttttatgagtaattttgtgttcaacaaatgctccaaaaagcgagtcaagggccggagagcaatgaccattttaattcacagagaattttcaaatggctattctacgccagaaaaatggctatctctttttctgagtaattttgtgttcaacaaatgctccaaaaagcgagccaagggccggagagcaatgaccattttaattcacagagaattttcaaatggctattctacgccagaaaaatggctacctctttttctgagtaattttgtgttcaacaaatgctccaaaaagcgagccaagggccggagagcaatgaccattttaattcacagagaattttcaaatggctattctacgccagaaaatggctatctcttttctgagtaattttgtgttcaacaaatgctccaaaaagcgagtcaagggccggagagcaatgacccttttaattcacagagaattttcaaatggctattctacgccagaaaatggctatctctttttctgagtaattttgtgttcaacaaatgctccaaaaagcgagccaagggccggagagcaatgaccattttaattcacagagaattttcaaatggctattctacgccagaaaaatggctacctctttttctgagtaattttgtgtttaacaaatgctccaaaaagcgagccaagggccggagagcaatgaccattttaattcacagagaattttcaaatggctattctacgccagaaaaatggctacctctttttctgagtaattttgtgttcaacaaatg

SEQ ID NO: 11135 - DNA, 3643 bp, Heterodera glycines
  unsure (1)..(3643): unsure at all n locations
taattcaattcgactataaanttaaggaccttttgactatctacatatacattgggtaattagataattaagcattataattggactaattattcaattaattagcatgcttcgatttcgttgggcgtgaaaaatccggtgtccaagccaacttcccatctgtcacgaccatcgtagattgacacaagttcgtcatgggactaaatttttaaaaattatttttctgcgtttaatttaaatattttaattattattttacttgcaatggccaatcccaaagtttggtgctttcttcctgatctactttaatttgattcatttaaaagaattggtttttcttaaatttaaatattttatttaaaataaaaattaaaatatttaaaataaaaattcttttattatttatataaaattgactattttattattcattggccatttttatataggccaaattttacgagagttcatttgagtaaacaacattttccatcaaagaatttgctcgaagctcttttgtggccataaacaatcaacaaaatttggccacgatcaacataccctaattgttgtcgttcagttcagcaacaacagttgtggacctaaaataacaaattttttttgtttatgtttaacaaaaaaaaaatgtaacgaaataatgaacagatttcaaaaagaaaattcagcaaaaaaaaataaaaaattttgttttcataaagcttagcatgttgaacagaaacaactgctgttttattttgaggatgagattgtttgtgtaaatatatattatgtccaaaaaaattttactgatcacgggagttttttttattttggcaaatttttttgatatttttgcgttgtttttgggggcagggtcgttttcgtacgggccgatgtcgtacgagcacaagtttttggctataacttttttatttatcgaccaaatccaacattgttggtgtcattcgatagccctatgtatcctctattagcctgcaaaatttcaaaaaattttgtcaaggttcaaaaaagttatggtcagaagaattcaaaaaaaccagattttccaacttttttggctcgaacttttttttaaactgaacaaaattttcttggaattttgcaggctaatagagcatctaaagagctttcgaatgataccaacaatattgggatttggttgacaaagaaaaaagttatagtcaaaaaacatgtgctcgtacgaaaacggtctggtccgttatttttgtgcctctggtaacacgaaagtgtacatataaattgataaaaaaaagaatataggaaaattgaaaaaaaatagcgcacgttttgcttaatagcttgaaaaaaacgctaaaaaataattttataaaaaaataaataaataattcattatcattttgtgtcctttttatttaatttccttggccccatattttctttttaaaatttgttgcgcttttgaccacttttagtagagttatggttagtctaaatttttaaaaatcgactaaaatttcaaaaaaaaaaaaaaacgaaattctcgaaatattgtagtttcttggtagaatgggaaatgatgataagctaatcaaccccacttttcagtggcaagcaatgtcacagacctaatggcaaaatatttatcttaaaaatttttaagttgtatttttttaaaagtttttttctgaatagtgttggacatttttagaacggatacttccatttttactccaattaaaattttgccgacaatttatctgatcaaaaagtttgaccaatgatcacattgatttgccgatcaatgaatgatcacatagtttttgcagattccatccgatcattttttggccttcttgaacttcttgacgttgagccctttctccttcagttttgcatctttttgtgccaccggagtcattgcacaacttccggcatggcccgaacaatacctaaaataatttataaatttatttaattaattttaaatatattttttaattgccaataccatcgtggcccataacggttgtagaatgacagttccattgcagcagctcctggctgcaattttgcgccacaaaagcaacagttgaagcagtttttgtggacttaaaaaatatgccaaatttaattgctttgaaattttgagtaattaatgattaattaattcaaataattatgataaattatgacttgtctcccggtcgaccatcaatcgatcagtcaatgtcactttttcaccacaaaatgcgcattcttcaagcaccggatcagcgccagttccgaattgcattttaaaaagtttttggtctaatttaataaaatatatttaaacaaaataattatttaatttaactaaatgatttgctttcatgcttctgatgaatgtggtaaaatttattgaagagaaaacatttgttttcccgaaacttctttgccgagaaaagcacacatgcgatggattatgtgtaatgggtgacacctgctgctgcaagcaaaaaaaaaataataaaaattattttgaaaaagatttttaaaaataatggaagtaaattttgatattttgaaccgcaaaatgacaaatttaaaacattgaatcgcaaatgtcaactttttaaaaaatctaaaaattgaaaaatatttggaatctcaaaatgccaactcaattttgaaaaataggaaatttgttctttctttaatgaaaattaaaattttgcattgttttattaattataaaaactcggatttaatttatcatcaaattacaatagccaaagtatattcataaatgaaagagaaccaactaaattctaggcaaagtccgatttcgaaaaatatagtatcatcactaccgtaaccaattttaaatattacagtctgggaatactgctgtttgtatgtacgtgacgtatctcatttcttcgcctttttgaacttcttcgtgttcatccctttctccttaagtttggcatctttttcagaaacgggcgtcaacgcacaaccgcccgccgaacccgagcagtacctggagatgaacagtataaatatgattgttagaaatgtgtttttcaaaatggaagttttaaaaaatgaaaaatatgaaatttatgtattctatttaaaatttcaacaaattttatgaaaaactcgaagacaaatattcaacattgaactttgctgactaaaatggaaaaaaaaccttttctaatacggtttttaaattattttccaaataaggaccaaataatcgtagatttagtagtcgatgatgaaattattcgtcaaaaattaataaaatccattttttaattaattttcgctcaaaatataccatcgtggaccataacggttgtagaacgacagttccatggccgcgtgaccgggctttaaatttgccccacaaaagcaacaagcaaagcaatttttatggactgataaaaatggaatgaaataaatatgtttttatttaaatatttataatatttaatatttttatataaatatttttttcaattaaaattattaattttaattttaattacttgtttctctgtcaaccatcagacgatcagttagcgaaattttctcaccacacatcgggggggtttttgatccatttcgccacccgtgccaaaacgga

SEQ ID NO: 11136 - DNA, 5307 bp, Heterodera glycines
  unsure (1)..(5307): unsure at all n locations
acaaatttntgggtattggatgttggtgtattcaatttcccttctatcgtttataatcaaatgtatttagccttttctcgacagtgcagttcaagtattatgataccgtatctcaaactcatagggtccaagtatttttgcatttgttataataccataccagcgtcgatgtccaatggtaattcgagcagatgtccagcggtgttcaccaccaaaacgatggagaaaatggcgaccatgatcagcgaaaagtgccgtttgaccgttgacagaggccatttcgcgcaaatacaacgctcaatggcgagtagaaaaacggtggacgggatcgtaccgtaatagactagttcaggcatcgataaccaatagagagtcttgggatgaaattttataggtatatcattttgattttttgtttcaaaatgaaaaaataataattttgcattaattccatatatataataaatttaaatcaattcagcaaaaaagaaaattattttgttaacattttttttcgtttctctacttgggtcatagaaggaggattaattaaaataatgtcatcggtaataaggttagatttttttgcactgaatttaaacaaaaatgaaatgccatattttggaaatttagcacaatttcattttcattgaaattcgtccgagtttttccacattctgaaaattttacgcttttcaaaatattataatccagaaattttccactgtgacgtcactttggcgcaaacggatgtaaaattaactatcctaattttcgaaataggtattaaacttctgaatttttgggcttttgatatagacaatataatccctccctttcctacttaattatttttttttctttgcttttacatatggtgaaaagttgttctgcgtgaaggtgccgggtgttcgccattggatcactctgtaaatttggtacggcgtggagagtatcgaaaaaacgaagtgcgcatagagaaacaacatcagggttggtgccaaattctgaatgcgcagcaactgaggtagacagtgaagaagctacaaatgatcaaaatcatttaatatttttatattaaaccattaatcgagtctatgattttgtgcctgataaaaaagacttgatcacaactcgtcggattttttcgaatcatatctttggcgttcgataatttgatcggatttataatgtttgagactgaaatagtacataatatttgtcacaaattccctgaatagacaaagtttgtcttgcttattgattttgatctgaatatattaatctgatctggagtttgatcaggttgtgaacaaactgaagggttggaataatgttgacccgacccaattatgtcttaatcggttttaagtaaaattggctcaccaaaaccaggaaacccatggtcaatgcggtaatgccgtgcgaaatcagcgcaatccaattcaggcacaactccaagtagggcaaatagtcgggcaattgcagaacgggcgagttcagtacggtctgaggatctgttgctattgtgctgttatccatcttgaaattttacgctataaaatgtaattaacccactaaaagcaacgtaatgattatgaaaaaaggcaggagtccgtacgtttttttgtgaatctctattttcgaaaaattaatttaaaaaatttacattttttcatatgaataatgaatgattaattcgcaaaaatgcacatagcagaaaggtggatttcgaaaatttataaaagtagaagcaccgcaaaactcatgtcaaacaaaacctcataaaatctgttaaatacagtcaggtgcacttctgaccaattgttgaacaacaattaagcgcttttataaaatggagttaaaatgaaattatagcttaattgtttatgaagcgggaaaactggacggaaaattaatttaatttgctttacgctttagctaatggaaatgtccttataaaatttgattaaaaatatttgttaatatttgcgcattgggccaaatcaaagtttaatcagtataaataaaaaattgtcaacaatggccattgaccactgaaatgaaagttttttaatttaaacaagctgatattgtaaaacaaataaagaaatttagaaaaaaaattaaatatgattttggtgaataaataatttgcagcaatgttaagaaaacttaatttacgtattgtatatgaaatatttgcaggaatgtcattcaattttaaatctgctgaagttcatgaaagtttgtaaaatgggaaaaaggcattcatgtaattttttttaaattatacttttttaaaagatttaatttaatataattcttttgttttaatattaaaaaatgatttttttttataaaaatggagaattatgtacaaaaaaaaattttaaataataatcaaaaatgaaaaattgctgattaaagtaagaatatttatgttttattctatgtatgaatataaaaaaataataataacatctactgaacaaacaatagcaataaaagaaattttaattaaattaaaattatttttttccactaattaatgaactaaaaaatttttggcttttgtccgtgccaataaaataatatattttttcctgattgtgcttacatcgtctatcatggttaaaaaattcagaaaaaaattataaaaccctcgatagaatttttgcaagatcaaaaaagaggcaacgattgaatttattaaaccttttttgtaaattcatttatttccattttgtaatttttctcgattttctaaaaatgctcatttgtcatcgattattttgtcaatcatttttggattttgtcgttttgtttttcaattcacttttttcaatttttctgttttaatcattttttacggcttaaatcaattgtttcttccatttcgaaattttattttttgatttgatgagaaaaaataaagggatttttgttttttaggattaattccaaaaacaaaatcagatatagccaatatgaaattctacactgatccatatattttcaaacgtgtccttatttttatttcatgtttgtcctgggaataggaattttagagcattttttaaaattattgtttttgttgtaaattaatgtatatatatttttaaatttgtcctgttttggagaaaattatcaaaggcatttattatataaaagatttatttaaatatgataatattaaattaagttatgcttttaataaatatactcccgtattccctctaaatgagccgctcatccaaaataattttgaattcgcgtgtacaattagttatacggtatgtaggcatatatggcaaaaaacaaagttcatatgcatattgatacggtatgctgatcacatccaacgattggcattttctacgatatctgcgttagcatcgctgatcactctccgatcagcaccctctaccggcccatgcttcttcaaagctttgatgtccttcgtttgaaattgccgttccaattcctccaatgttttgcgtctcgtctccggcataaaatggaaaacgaaaagcatcgcgcagcatccgatcacggcaaacgcgtaaaaggtggcggtcatgccaacccaactgatcagaatgggaaagccgaacgtgagcagacagttgaccttgggacaaaaagtaacacaaatattctatgacacagtatcatcagataataaaaataattaattaaatttttttaaaattttttttagggttcttctccgacttaatttggggaatttcgaatgttgtcagttgcacgcccaaagagtatgaaagtttctttaaatgagttttgaagacttatttcttttagaaaagttctgttatatttttggctttttataaaaatttgctcccttatgaggtggttgctccccgacatttttttaatttctcagccatccccgacaaatttgtcgtgaattttcttcctgatctacgggttcggacaaacctcagtttaaatgagtttatttgaatcatgagaaataattttagttataaatttcataaaaattatttttgctttttaaatattatggaattaatttaaaattagttaaaaacataaaatttgaaaaaaaactcattatatttatttaaattaatgaattttttaaaatcatttaatataagtaacatcaatatattgatttttaaaaggtcttttaaaattacttaaaaaattattgatataaaagtttcagaccagccaaagtatggaggtggacaagcccatggcgagcccgcgaatgcgcaacggaaacatttcggattgcatcagccaagtgattggggaaatgccgcactgttggaacaggaggaaagtgacggtgagagaaaggaccacaaaagccctgggaaatggaaatttttttttcaattcgttcatcaattttaatgaatggaaaacaaaatcgtacagaaaaattattatttaaaatataaataaaattttgccttgccattcccttggccattaacaatgagcaggtgccaatcgccaaatgtgccaaaacagtgccaatttggccagataacagcattggacgacgcccaatttttccaatcaacataatgccaagcccagtcgccaacaccgaaattgcctagagaggatttttttaaaagaaaaaactaacaatattttttttgatgaaatgatagaaaaaacgagtgaaaagatttaaaaaatatcattcattttgatttttcaaaaaaagataaaaataaatttctaaattttttgattatttttcagaaaaaattgcaatcttgttttaaaaatatggtgtacaattttgcgaaatacaacgaaattgattaaattcttattaaattaaatttaaaaaataatttaattaacaattttttattaatttgaattatgaattttactccattagcaatgttggcagtcagtgccacatttgtcatcagtccttgctcaattagaatgttggtgccgtagtacatgatggagttgaccccggccagctgattgcacattgccacaccgatgccaatgaacagacagcggcgaagccacggttcacgcatcacatcccttcattgataggggtaattatgattaattccaacaaaattagtaagaatatttttattatggtagtataataaagaatactgtaacaatccaatggtgcggtacataaatgtgtatgttagagtgttacaaaatagggttggggttcaactggcgtcgggggcaggcacgtagccaaggggaaaggggacagaattccctaaattccccacctcccccgcaaaa

SEQ ID NO: 11137 - DNA, 3313 bp, Heterodera glycines
cgccctgttgtgcctgtccgctccgctgtgcccatttgtcctgccgtgcctgccgctctgcccgtttgtcctgccgtgcttgttcgtcctgttgtgcccgtttgacttgttcgtcctgttgtgcccgtttgacttgcttgtccttcactgtgctgcctgtttggtctgcacctgttcgttcaactgtgctgcctgttcggtctgcacctgtgccacgtcaaaatcgccgctccccaactgctcgtcatccggaagtataagggtcaccaagcccatacaaaatcaagggttgacaaacccaattaaaaaaaacaaacacacacacacacacggatcgccaaacccaatcaaaaaaaccgaaaaaggacaccataaaaagccaaacataattaaaagtcataataaaccctacaacaaacccatcactaatttaaataattaagtggacagagcgactcctaattcaattactccgacgaccaaagccaacacgaaaaagaaacaagtggcgaaaagcactacactgactgaacttataaaattaaaaacacaaacggaatacaaattaacaaaacttcgcccgaaacatacagagaatatactgaaagaattttacaaaaaaaaggagcaaataattaacaaaaacaaaaaaattctgtgattatatatattttttttaaatttcgtaacaattgttaattctgtgatcattaaaattataataatatttattaacttgtgataaatacctaattaaaattctcatttttctgattatccactaaataaccataaaaggatacttagttaattattttaaaatacaaactatgtccggtacgcttcgtagcaaaatacccctccttaatcgcgtattaaaaagggaaatagaaacgatcaaaacaaaaattgaggaaaacaaattcgaatatgatcaaaataatcccggagaatgcatgcggatattcaataaaacaaaggaaattatccaaaaaatagagccaaattttgaaaaattaaaagccttaaataaaaggtggcaaaatttaatgagaaaaatgaacaaggaagaatggaataatgaatggaaagttcaaaaaatctttcgtgaaaaacacgactaccttaaaaccattaaagaaatagatgaaattctcgatacattaaaagacgtaaatttggaggtaaaaaggagattaaaattacttaaagcaaaatcatcttcagactcagacctggaagatgaatcaaatgattatgaacatgaaaatgaagacgaagtagaagaacaagaagaagaaaaagaatatgaaagtgacaatgaagacgaatcgccagaactctccttgaatgaccaaatacaccatgatcgtacaccatttgtcaattaccgatcaagaataaagcttccaccccaaacgcttacgcattttaatggcaaattctcccaatggcccagtttctgggatgatttcaaatcctcagtggacaatgacccaaatttagaaaatatacaaaaactcaaataccttcgagggctcttacatgatgaaccgtacagaatagtgtcaccgtatcctcttacgaataaaaattacactatcgtaataaaattactaaaatcaaggtacggaaacccccaattaatcagagaaaatcttcatagcgaattacgcaacctcaaaagacccactgaatccacaattgaattaagacgatttattttgttaattgaccgaatcattttacaaatgaaatcccaaggggaagacataaatcaccctcaaatcaaacaatcaatcgaaacgaaactcccctataacattagacttaaattgaaggaaaaattcaaaatctattcaacaaaagaaataatggaatttttgaatgatcatacccaagcacgtgaagacatagaaagaatggaagaatcgaatcgccaaatccggaatttcccctctaatagaccaccccaaaacggagtacagagacaattctatccaaatttcccacacaatcaaatgaaaccaaacccacggaatcaacagaacacatcttcctctccttttccatatacttctgcatttacaacgaaatcaaacccagtacgcctggcacagtttaaatcaaatccaacacaaactagaacacaaaataaaatattttgtcgcttttgcgaaagagaaaaccatgcaagtaaagaatgcaaaatttattcaactcccgaaaaacgaaatgaacgtgtacgtgaactcaaactttgcctaaattgtctaaacaagggacatatggtcaatgattgcaaatccacttatttatgttttaattgcaaatacaaacataatactctcctttgtacccgcaaacaaactcagtacaaaccgaaagagcaaaaaaccagagtgaatatggctaaaaattacgaaaatcatgaagagacacaaacattcatgacaatggattatgataaaaatttatctaattatgaggaagaagaattacttatgactgctgaagtaaactgcataaatcccgacaaacataaagtaaaaaaggaaataattttatttgataatgggtcacaaaagagctatataaccgaagaatgtgcccaatctcttcaattaactacgattgaggaaaaattattagtaatttccactttcaatcaaaataagccaaaaatcattaaatcgagactagtcaaagttggcattaaaacattaaaaggtgaagtggagtacataatactacaaacagtggaaaaaattactgatgttacaaaaatggttaataaagaaaatgttgatgtactcggagtaaaaatcccaatcagtcacgcatctcctcaaattctaattggaatcgaccattattggcatttcatgttaccaaattcacaaattcaattacttccatcaggattttactcgataaatacaaaattaggaaaaatattatcaggaaaaggaactattgaggacacaaattgtaactcagtgaccgaaaaaagaaaaaaggatgaaacaaaccaaatacttcagaaattttgggaattagaaaacattggaattatcgactcaccacatatgacggatgaagatgcagcaatgatacactttgataaaaatgttacatttaaaaataatagataccatgttcgatggccttataaaagagagaacccgaatttactaacaaattttggattatgcatgggaagactaagaaatgttgttaaacaactaattaaaaacaaacaattggacaaaaaagacagaatatgcaagaacaaatggatactgatgtaaat

SEQ ID NO: 11138 - DNA, 1107 bp, Heterodera glycines
agcaacattggggcatggatctgttggacattcactcacatccagcagcatctttcaaagccaagctaagccccccgggcaattcgacgacgcttttcccgttcaaatccgtcaaaatatcctcgaatcgttcggtggtgaaggtgtcgtccagccgcgccaaccgtttgtagtctgtcggcgtgatcttctcgaacagttcgctctcttcgccctcctccaatttggccaaaaccgttttcacccttcgcttcgcgttgtcctggtcctcctccgcactgctcgtctctttgtcatatccctccgaccataattctgctcgtttgagttgtccgatcacagatcagaatgccctctcctggcaactcactctttttggccctcaatgtgattttgggcagttcggtcaatgtccgcacccgtgggctgtccactccgcctttgatcgtgctcagccgtctccgcgccgcttcgtccgccccgtctattccgcgttcgttcgccgccattcccaaaatttgcttggagtcgctgctgctcagcacttccctaagtgcgttaaatgctccgagttcggcttggccaagtcccaatttggccgcgtcttttgcccatccgtccaatgtgtccatgtcttaaaaagaatggcaaattaagcggatgaacggtattttttcatgccgatttccattcattcacctgaaacggcgtcaatttggcacacgaaaaaggacacaaaaagcaaatgaaaaaatgccaaaaatgggaccaaatttggcaccagacattgacttattgacataaaatgcttaaatgcccgtgaaagagtcaatgaattgagaacatttgaacaatttaatttcattccgtttttataccgctgcaaataacgaaacaaataaatgaataataaaaaatgcaaaaacaataaaattggattttttggatttatttataaatgttaactgaaagtgtttgatcagtcatttcattattttctgcggaaaatgcaaaagcagaaattgtagccataaataaaacaatgagacaaacttagccataagaatttttaatcagcaagtttttatttattttttaattttttcc

SEQ ID NO: 11139 - DNA, 1638 bp, Heterodera glycines
gtcattagtgcaaaatgcgctttttagaatgtgcagcacatgttcaaccatatgaacaaggcgaaggcgcaattattcgtcgccgaagggatcgtcgacgtcgtcgcggaaacggtcagcggcgattcaaatatgctttttggatacttataacaattaagtccgaatatgttgccaactcggtcattttgttgtgccaacgccacggactcttttcggatgtgactttgccaacaattaatcaacggagagacgtggaaagtgccacatcgccataggataaacgttgtgctgaagaaagcgaaaaagccatcgtgggtcggattatccagtctctgatttgatttttaaagcttacaatcgaataaatataatattttgtattttaacatgctaatacattactttcgaaaatattttagttttttaaaaataattagactttgtcctatccctctaatgtcattgggcggtccgttcccgatcactatttaagcttgtagcgttccctcaattgttcatcccctggttcattttattccaccggtctacaattgtgcagagaacagtcgacagttgttccccctttccccttccgaataaaggattttatttgaattacccctacacagtgttttgggggatgcattaacaccaaaccatcccaatcatattttattcaatattcaggaataagaaatgatgcaaattacaattatgatttggtatttagcgttgaaaaaataataattttcggtgtttaatgagttaaaaccaattaaaagggagaccaccgaagtggccattcccatcattcctgggcagtttaaatggccgttaattcgccaattgcctcgccccctttttcactcgtccgttttctcattgatctgttgccgtccgtctcttccgctccgccgccgcctcggggaaacactcatcgattttcgcgtacaattccacccgatatttgccgctgttatgctcaaagtccgtctccgctctttccgcgtgttctctccgcatgtgccgaagcatattggcacggctgaacttgtgctcgaccttccagcagtatttgcacgagaaaatgggcaatttcaaatgactaaaagaaaatgaacggaacaaaagaggaaaagcattaaggaaggacgacgcactgcaaattgacgtgcaatttgaggctagaatgctcattagtgacgccggcaccgcagcgagtgcaactgatcagccgggcgacgctcttccgattggaccatattcgatgacccaacttggtggaaattgcattcatttgaccaaacaggtcaaggggagtacgttttcgatcccccattaaaaaattgttcgtcccttaatcggaatccctcccccatctcatcccatccgtttacatccacaaaattgtttccgattggcgttgtgttgtcgtccgtttcatttggcccattttctcgcacaacatttgttgttgacatcacttctccgtcaagtggccaagtcaaattagcgtgaaattctgacgggccgacgaaccacgaagaatggcccggctggtgggccaagtcgatttgcttttggtgcgaaatgtggcatatgtcgtcgtctattttgaccatctcccgcataaat

SEQ ID NO: 11140 - DNA, 1816 bp, Heterodera glycines
ggctgcaggtccgtgccatttccatcggtcgttcttcgcttctgccggtggtgccaatttgtgccgattgcccctcggcctctcccattacgctattactttcgtcggcactttctaacaattcgatcacttcaattttatgctttcgttttgccagcgatgtcgacgaagtgaccgctggactttctccgggatttctgtcaccattttgtccatcttcaaattaatgcttaattagcgcctaatgcactttaatcccagccccgttcgcattaatcaccgttcgtttgtattttaatcactaattcagaattgcttcccgcgctttttcttttaaaatatttcaccatatcggcaaaatccaaatcgcaagtgatcagaattttgtcgccttccgcgtcttaaacatttggtcagacaattgtttaatttgacaatttcgaggattattccacaatcggcaaaatcccaccagtgtagcacagtccgccttggaatgttgcgattctgcttctgatagccccaacaagcgcagcatacgttggctcctctaattcaaagcgccgaaatccatcgcaatggagccatttgatttggatgggagccattgccaatcggaaaatcgaatttcgaggaaattaacgaagatcaaaaataggtataattgccaaaaaacaataaaatgcatacggagaaaccattactattgcaaatttattattagataaatcaaaggatttctttatacatgagattgtgaattaagtgtatattaaaggttgtgattcgtggttttaaatccaaggggtgtggggggtaaatacgaaaatttcttacaaaatttcggagatttgccaggtaagcccccccccccccccttatgttgattaaaaccattgccacgaaaggaaaaaatggaattagaatagttggataagaaatgaagaatcatctgtcacattatcaatatcatcatcaattttatgtttgtttcatcctccttagcttttggttcaacagaaatcaaaattgttggctctgaaaaatgacaatttgttccattccactaaattcccattcatttaccacttcggcatttcgcatcgggaaacattcggccaatttgtgatggattttccttgaaaatgccgggtaattgtagtcgaactcttcgctgctcctccccgggtggtccctctcaatatgccgtacaatcgacgctttttgcagctgtgggctcatttggccacacagccgacaattgtaaatgggcaacttcaggtggtgcaaattcacatgggacttcagactcgtgctggcgttggccacgagcattccgcaatccgagcacggaatgaccgcacttcggaggggacgtctcttgcgcggattgtgagtctggcaaaagcaaagaataaatagacgaggtgaattggacataaaataacggagtctaccgctgccgaacgccgcacgatggttggaggcaattagcaatacaattttagacaccgaattccgtcatggaaattttggtaatatttttttgtgaaagaatcaaaataatacatttttatatatgactcattttcaataattataaaatcagtaatttaaagaaatcccaatagaaattgtctcaacaaaacctacatacatggaaaagggggggggtcaaccaaaatttttgcgaaggggtctgggatagtgatgttcgagactctcgatctcgagaaaagtctcgggtttttttggtctcggtctcgagttttcagtctcggtcattgagactttcgagaccgagacttttttacac

SEQ ID NO: 11141 - DNA, 3462 bp, Heterodera glycines
ctgcttcaacttctgctgctgctctcccgttggctggtgctgtcgctgctgctggagaccatcgccacaacaatttgtgtgtgattttggagaaaacgcgctcaaaactggacaccaccgtggagtgtgttgcggaactgtggcgcaccacggatggcacggcacaggaagtaggacaaaaaacaaaaaaaaaacaaatgccgacagttgatggcttacaattagcaatgttgttatatgatttttgtgtccggacccctgctaaaatcggggatatctgcggccgagttttaagggccatttccaattactaacggcaaaaaaatttgggacttgacatttcgaatttaatcaattttcgtcatagttttgttgacgtgtctagacaaatacaatgaataaaagattaaaattgtaagcacgtaaatcgaccattttataaaggcttttattatttttttaaaatttttttttgatgagtttaagccgatttttattttcttgcagtttcatctttacgagcccgtccacaggcacttgccgtgtccggcacgaaatgaccaatttgtggccaaagcggaactgttggccagaatacgaaggtacatatattctttgttttttttattccggagagatttcgaaaagaatttggaatttggaattttaattttttttttttttttaattttcagcgcggacgaattggcacaaaatcgaatggcacgggcggcgtacgacacgctgtgcagcttctacaaactggcggagagcaagatcaaccaggcctatgttgaggaggtgggtcgaccgagagccgggttaccctaaagcgcagatgccggtccgggccgtagtttgaaaaaacataccctccacccctcggatttttttttgagcgattgaaaaaaatttttgacaaaaacttagtattcctcataaacatgaaaaaatcgttaattttttaaatttcttatataaactactaaagatttttgtttaaaaaataaaagttataaaatttaaaaaaaaaaaatttttccgaggtgaaatgatgcggaaggaggtgggagaactatttttctactggaaaaaactaagaaaatttaaaattgaaattcaattttttttttaaattccggaggtgtggggaaatacggcaaatctttgttcatgaaatatttctttgtatttgtatcggcacagattgtcgacgagcgcaagtggcgcttggaattgcgctggaacggcttcatcaacgtgtacgaggggccgcgcacggcgcgcgagttggagctgaagcttgtggccaggcaaaagacggagaggggcccattcgacgaggtcaaaggggccgacccgttgagcagaggtaacggcagaaagtgcaaatttaaaattcggaaatcctttttctctcgtcgcacacactatctttttcttactctcttaatctcaactcctctctctgtctccttcacttactctctctctctctctatttctctttgtctccgctcctctcgcttactctctcactcactttctctgtctctctctccatctctaacactctctctctctttctctctcgcactctctctccccttctctctctaccgcacgctttatttccgctcccctctctctctctcgctccctctctttttactcttcgtccattttgtcctaatcgtctctaatattttatccgttttttcagcggatcggtcccgtttggatgaacttgcctctttgttgcgtacggaagtgaacaaatcggtgagttccgctgccgaccgatcaataaataattaatttactaattaactcttttatttgctaatatgccgtctgttgtcacaggtgtggcgtcgtcgtcagttcgattccgacttggccggcggtgcgggcggcggcggtcatcagcagcagccgcgcaatctccgctgtaccatttacacgcgcggctacacatagcgtggtcgtggacgtggcacggcactggtgtgccgctccgcatcatcattctgcacaaagcccaaaaaaaaaaataggaaaatttaaatcccacaccatctgattcaatatttcatttcattttacctctcaccttttttggcacattacccaaaagtacatttgcttttttttcatttcttgattgatcatttgttcaataaagtttgatctcgtggctgccatcacaggatttttatctcgatgatattggtctcgcattggactgacccggctttctggtcagggttcggcaccaaatcccgatcccgtttacctttttaaaaatttgatcgacacacggcatgggatcccgacgtggctgacccctggctttttcgagcccggttttaccccgaaaaccctatccccatgcaaccctaaaatatattagccgttgtttctggattcatattttcaatcaaattacaatcattaagcacattttgccaaccttcttttatagttacaaagatagcaaaaaatggtaataataacaataaaagaaattgaattaagacagaaaattaaataattatatgttaaatgagttcatcaaaaaatgagtgtgttgttttttgtgtgtgtggcgcctctgatcatccgatcattgattgctgttattttgccacgatcgcttctcattgcgcggattgtccctttggcggtagaatgccgggctgctgcggtgcgcccttctgcaattttaattttgtgacgcattggcattatttttttttttggcaaattcggccaatcctcggggggggggggtccaattttgtgatggcattttaaattatgaaaaattcaaaaaaattagcggtacagcaataccagaaatggtgccctaggatgtcagttatcaaaaactgcaaaaatctatgattttgtcgggagctgagatttttttaaatatttttttccaacatattttttcggtggggggggggggaaattgaaaaaaaaattcaaaagggttttcgaggttgctgatcacgaaaacagcatccatttcaaccaattctgtacccctgacccaaattcgaacccaaaagttcaaaattttcgaatttcgagtcaccattgtactactaaaactccaccttgttcatcaggtagcgatggatgtgcgggatcactccgccgccagcaatggtcgccttgatcagggagtcaagctgaaaagggggaagagagacaaatttaaatttgtataaagagactcatttgtcagataaatgtacccaccgtttagtttcgtttttacccgaaaatttaaaacaaaaaattcagacatatataaattcttttcgaaggaaatttcgagtaaattgtaaaattttccaacgattttctagaaatttcattaagaattactaaattttttccaaaaatttctggaatttttttttttttttttgtaattcttattggtagaaa

SEQ ID NO: 11142 - DNA, 1189 bp, Heterodera glycines
  unsure (1)..(1189): unsure at all n locations
ttcaatcatggcactgccgtgccgtgcacagcaaaattttgcccgaggcaatcaagcatcaggagagagcaatccttgcctgccagtgtgtacaccgacctcatggcatcatggaaatggcttcgtcaattttgctgttgggggcaccaaaaaattcncagggggtcccttttgtagccatatgtgacaaatcaatttttttttttgcatataaaagggtcccccctttggcattttttcgtgggcccccaacagcaaaagtgccaaggcgattcaggaattttttccggccccaatgccgggatggcgcaccctctcgctcacctcctcgtcgccacggatggccaagtgcaggtgccgcggtgtcacccgcttcactttgaggtccttggacgcgttgccggccagctccaacacctcggccgtcagatactccagaatggctgcgctgtacacggcggcggtggcgcctattttttttttaaaattttttttcaccgaaaattcgccaaacattaccgactcgtccggtgcttgttgtgcgtttcttcaagaagcgatggatgcgtcccaccgggaattggaggccagccctggcactgcgagagatgattttctgcaaaaaaaaaaaaaaaattatgcgaacatttttgaaaagtttttttggcgcgctttaaaatttttacccatcacaaccttagactttgcttttccgctgtccttgcccgcttttcctttgccaccagccattgggaattttagaaaatgtagagtaattaggctaaattaaaaaaaaaaatttttgcaggcccaagccaaaaaattgatttttataaaacaaaatttcaaaattttggcgcgctcccacaacaaatattcatacgccatataaatgaaaatgatgcaagaaatgaatgggggagaggaagggagaagggaggcgcaggcagcacacataataatgccacaaaaataagcgtcttttcctccctgtctctgccccctctcccccttttccgttgtctcttcggcagagagaaagaaggggatttattgatggggagcaggcagagagaaatgctctatgtttgccaaactattttttggtagagaaatgggagcatttggcgggcaaggcaagcgcagagaaaaatggaaaaataagagagggaatagggatagaacaata

SEQ ID NO: 11143 - DNA, 3978 bp, Heterodera glycines
  unsure (1)..(3978): unsure at all n locations
cttttcagagaattcggagttttcgtgaaagcagtgaagatgggtgtgcaagcttttgaccgttcctttggtgagcttgaattcatatttcggcttttcatttgattggcactcgagacaaattgctgtagtcttggacgtttttttaaataggccaatttgccaaataagactcatttgcataaaatctaaacaaaaaagacattatttaataattataaagaagcaaacattagaattaaaaaattcaacttgaaactacaatgtacgagtactttgattatcgatttttttcaatccatatnttcggaccccccccccccccgccccatacctattggatgatctttgatcccttcagccgaaacctattggatggacttgtgcgcgagaatttaattaatttaaattaatttaaatttaaattaattaatttaaatgcgcgagagctgcgcggactttttctgataaattgtggaaaatcaaaaacatggtcgcggtctcgaaccgttgagagtggaagcgaggagcttaaccacttggccacaggggcagttgaaaggtatgggataattgttgactttatgatgaaaattccgaaaaattgtgaaaaatcaaaaacatggtagtggactcgaaccgttgagagtggaagcgaggaacttaaccacttggccacagggtgagttgaaaggaatgggataattgttgactaaatggtgaaaaattttccctttgcttcaccacaagcgctgcggaggcggacgtgtggcggcgagagactaaactttttttttaataacaggaattaagttttattataaacaataatttattatttttaaacagttaaataattaaaaatttgtctttaacaaaaagtttccaataacaattaaaattataccaaattcttataagaaaaaaataatgcataaaaaaaagtaagttacactactttgattgaaaaaatattggtggttgtctttgaatatttttcatttcttcaatcatggtttccgcttcgcttggggatatatgacctctcctcttgaggaatttaattaattgtaagcacactattccaccggacacataccatctgaatgacattagaaataaataaaattaagtgtattgtaattaactttaacctgcaaaaggtgtgagagggggcatcgagtaatttttgaatttttttcaattcgctgaaggctgtgttactatgtttgaaacgtccaacaatatgacgacttttggccaataaactgctgattgattcatcctttttcaatgcctcctgtacagccaaattcaataaatgagcagcgcaaggcccgtttggcatcggcaaaattcgattttcattttcatccctctcaacaaatgcctgcaaataagagcaagtgtaaagaaaattaattagattatcactcttttcatattggctgctgaatccgagataattgcatgcacacgttccttaggaataccccatttgagcaataaatcctcaattttgagcgcaatatttttccctgtgtgtgattcagaaaattccgtaattgccaaaacacgtgacatagacttccatttagaaattgagtgcgcggttaggctgcagtaaaacccatgatgattaataaacaaagtaataatgtaccacagaaggttgcaagtgcttccgctccaacaatcagttgtcagtgtaataaatgcttattcttttaattcatctttgattttatgtctgacacgttggtaaacaattggcaaggcagtttttctgaaaatttcaaaaatgtaattttctcataacttttaatgtaactcatcacctatagaaactttcacttttcactttttgatggggaaataaagaatgaaaagtttggtgatccacagcgccgaaggaaatgttttttgtcaccaaaaaatgaagaattttcttatcaaacgaggagagttgtgctgaaacaaaaattaaataatttaaaaaaatttggctgaattacagtccgaaaaagtcggtccgcaggacgactgaaagtctgagattggcttctgtttttgtttctccttttcagctttcgattcaagagcattcagcttttcagagaattcggagttttcgtgaaagcagtgaagatgggtgtgcaagcttttgaccgttcctttggtgagcttgaattcatatttcggcttttcatttgattggcactcgagacaaattgctgtagtcttggacgtttttttaaataggccaatttgccaaataagactcatttgcataaaatctaaacaaaaaagacattatttaataattataaagaagcaaacattagaattaaaaaattcaacttgaaactacaatgtacgagtactttgattatcgatttttttcaattttatccatattttcggacccccccccccgccccatacctattggatgatctttgatcccttcagccgaaacctattggatggacttgtgcgcgagaatttaattaatttaaattaatttaaatttaaattaattaatttaaatgcgcgagagctgcgcggactttttctgataaattgtggaaaatcaaaaacatggtcgcggtctcgaaccgttgagagtggaagcgaggagcttaaccacttggccacaggggcagttgaaaggtatgggataattgttgactttatgatgaaaattccgaaaaattgtgaaaaatcaaaaacatggtagtggactcgaaccgttgagagtggaagcgaggaacttaaccacttggccacagggtgagttgaaaggaatgggataattgttgactaaatggtgaaaaattttccctttgcttcaccacaagcgctgcggaggcggacgtgtggcggcgagagactaaactttttttttaataacaggaattaagttttattataaacaataatttattatttttaaacagttaaataattaaaaatttgtctttaacaaaaagtttccaataacaattaaaattataccaaattcttataagaaaaaaataatgcataaaaaaagtaagttacactactttgattgaaaaaatattggtggttgtctttgaatatttttcatttcttcaatcatggtttccgcttcgcttggggatatatgacctctcctcttgaggaatttaattattatgaaccaacagagtagaaaaacagggaaggcaaatgcataatgtgaaaggagcaaaagatgaaaaagagtgtcattagtctcatctgatgaacgtaacacctcaattccttctttcgtcgtgttattcattttttctctaatataattttgagctttatttataaatttacccaagctttgagtcggagacaatgtgtcgattataatcaatcataatcatttggtcaaattctccgagaacaatcatttccactcctccctttggaattggtgaatcaaatgtggccctaatactggttgtaccgcttctcaacagctcaaatccacagctatcgtctaaggttgaattcaaagagatgacaaaaaaggcccatccatttttgaattgatccattgaaacgtcaaatgaacgttctgaattagccatgcccaacgcttcatacatctccacgaatgctcttacatagtaattctttgaaaaatttaatttatgtggtacaacgggatagaccatgcccccagcatgtactgaaatttctcgcaaatcaaatggatcaaacttgaagggcgtcaatttgtaatcaccattaaaagccgagttactgaccaacgctattgttacacgacgaggtattgtcgagctgaacacgttgtattcaaattcgtagcgcccactgctaatgtatgaagatttgatttcggttttacgaacagcataagtagccggctgcttttctagtgtcttgtaaagattcatgttgagtgagggctgaacctcaatcatttttgcgtaaatt

SEQ ID NO: 11144 - DNA, 953 bp, Heterodera glycines
gaaatagtgctctgtctgactgtctggctacgcttttgaaaaatttgcccaaaatataggacccaaacccaaagagtaccgtaacatgatcggaagatttaaattttatttgcaaaataataaaccatatttgcgctaaaactcagtcaaattaataaaacttggtattgagctaaagctttacgtgtcctcttcatcttttgtaattaaaacctagcaatttttttcacaaaatgtaaccaaagagtttcaaaaaatttataatcaataatgctacttttttgaaactcaatattttttttttgattttgaacagaataatagagaaatctttgagttatctaattatatgagtggtataacttatttaaatcgcaacgattttcacaatttaaaagaccttacattttatatgaccataaaaatataattgtgctcgttgttgtttgagttgctgttggagttccgttgttgttttccccgtcggttgttgtcgcaggagacggcttttgctggcgatgtttgaaagagtcgaaaaagttgaccaattgggacactttggagacgaacgctctgcaaaaaaattctatcaattagcatttttcaatcccttttaaataaggaaatttttgaaaatccgggctatttacaaataaatttaataaaaaattatatttcccaggatggcaccatacataaaaaagggggggggggggtgggtcggaaaaattttttgcgaagtggggtcggccgcccgatgactttttttttttgcttttcaaaaaaccgtttttttcggcgcgcttttttcaaaaaaatttcgggaacaggaggtccggcggtgccgataggcgccgccgtgaaaattttgaaatttagtttccaatttgtaacagattttgtctaaaaaacaccaaattttgagattttaagcccattgttgttaaaaaaaa

SEQ ID NO: 11145 - DNA, 1984 bp, Heterodera glycines
tgtgaaacagcagcggctgacctgaccacgtcgttgaccatcaaatgcaggaccggtgaccagaccaactctaccggttgctgcagctgaacttggagatggagttggcgcggcacgggcctggacaaatgaatggacaccgagtcgagcacaccgcactgaaaaaatttatatttcctttatggtccgtaattactttttttgagttttttgctttttgtccatcatatttaccaacccaatcacatataacaagaggggtattaaaaataaactttttgcaaaaaaaaaaatttttttttttaaattttgagctttttagctatgaaaaaacataatggccccactcgattcaattaaaaaatcgctaactttttcaggatgatgaccataacaaatgtcctttttattgctgccgttttcttcgtctgtcaactaaacaattgaaaaaaattttggggtataaacaagctcttgtttcacacaccggtttgccaacacgaattgtgccgacggacacacggacgttcagtgccatgcgctgaccactaccgcctccgccgtcgttgtccaccaccaattgaacagcgaatggacgcgcaactcgcgcacctccaagtgcagtccgttggccagcaacagctcaccatggcgcaacgcgaaccagccgaggccgtcaatgtgcgcagcgcgggcgtgtaacagtcgctgcaacaccgccgccaccagacgcccggaatatctgacaaagaggaggggatttgacatgccaaagacgatggctatgggataaaaacgaaaataaaaatagggtccagtaccagatacgctgactacttcaagaaagttgatttagggattttatggctggaatataattctaaaaaccctttcccaacacattggaacaatagaatcttttgttttatgaatttcaatttcatattgatgcgacaaaacggcttttgtcagaagaaaaaaacccttttcaaaaaaggaggccaacaaattaccttctgaataaatggacgagcataacaagcagtacaagaaggatgttgaaatataagctcatgacagacaaaaagcgaaggaatgtatgtacaaaaaaacctaacttttcggtcagaatcaaaatattatgggttaagcccagcgctgacccacgaaatgtccaagtctcgaatttgagttttttattattcagctaaattagactcattttgtttttataaattttgaaaaattttggacatttcgtgggtttttactcttttggacatttcgtggcttggacactttgtgggggtgccaagcccagtgttagacaaaattgttcataatgccaaatatgataattggcgtaattttttgcgcgttaattcaaaatttacactgatcattgccatttttgtattgtttattttgatcagcaataactttcttcatctccaattaaactgcacaaaataggtatataaaaattgtttttaatgaattgtggacggcaattgtgagaccagttcgaccgcttggcttaatgcatgtgaaaacaatttatgcggaaacatacgatcacatcgatcgcaacagtgaccgcgacacgggagagaatcttatttaaaatcaaataatttgaattttttggaaattaatcattcgtcttttcaaaaaaactttaattataacataattaattacaacaagacagtagtactgaattgcagatttattggttccattttttcatggtttatcatttagtatatgtatatgtttaaattgtatgcaaatttatgtatttctcatgcatttaaagaaagtcgtttcacatttcatttttaacttacaattatgcactggatgaaaaaaaacaaacctcgttattcataaaaaaaatagcgaaaattaaaaaaaaaaaaataccagggcccccttggctccgcttagaagagacggctaaacgaaaattttttcgtggttt

SEQ ID NO: 11146 - DNA, 866 bp, Heterodera glycines
aaggaaaagccgaaagggaaggaaaagcgaaggaaaagccaaaggaaaagaaaaggaaaagaaaagcgaagaaaagccaaagtaaaagaaaaggaaaagccaaaagggaaggaaaagcgaaggaaaagccaaaggaaaagaaaaggaaaagaaaagcgaagaaaagccaaagtaaaagaaaaggaaaagccaaaggggaaggaaaagccgaaggaaaagccaaaggaaaagaaaagcgaagaaaagccaaagtaaaagaaaaggaaaagccaaaagggaaggaaaagcgaaggaaaagcggaaggaaaagccgaaagggaaggaaaagcgaaggaaaaggcaaaggaaaagaaaaggaaaagccaaaagggaaggaaaagcggaaggaaaagccaaaggaaaagaaaaggaaaagaaaagcgaagaaaagccaaagtaaaagaaaaggaaaagccaaaagggaaggaaaagccaaaagggaaggaaaagcgaaggaaaagccaaaggaaaagaaaagcgaagaaaagccaaagtaaaagaaaaggaaaagccaaaagggaaggaaaagcgaaggaaaagccaaaggaaaagaaaaggaaaagaaaagcgaagaaaagccaaagtaaaagaaaaggaaaagccaaaagggaaggaaaagccaaaagggaaggaaaagccaaaagggaaggaaaagccaaaagggaaggaaaagcgaaggaaaagccaaaggaaaagaaaagcgaagaaaagccaaagtaaaagataaggaaaagccaaaagggaaggaaaagcgaaggataagctggaggaaaagccaaaagggaaggaaaagcgaaggaaaagccaaaggaaaagaaaaggcaaag

SEQ ID NO: 11147 - DNA, 3556 bp, Heterodera glycines
gtgggacaggacaaatggcaatggcagtgacaatgcctctcattccctgcccaattggcacgattccccccccccattgaaatttaaattacttgcaatttggcgcaaaacatatcgcattcagtggatgttttgaagttctgcaaagttcaaacccaattatttgagtgaatcacaaaccagacaacaaaaagagaataaatacattaaaattgcccaatgcgccgttgtaagtgaacgaaatgcaacgacctaaaggggacggttcttctttgatcactcaactcactcgtcattttctgatcatctctgttgaatcactcacaaattaattgctcgttcatttactgattagtctgttgatcactcacttatgatcaactgaccaatcacttaagctgatcactattctccctctctctctctctttttctctctctctctctttctctttttctttctctctccttccctctctctctctctctctctctctctaatcatcgtttgatcattgctttcctccatttgctcaccttgctctgcgtcgtaataatagcgactttcgatgtcataataagtcgagtaacttttcttcaccagcactcccgggtcgaacgcgttcgaccgcggcaaagtgtaaggacgggcgccatggttggaacaaatgttttgtacggtgggacagcacaaatggagggaaccgatggcagtgcattcgaaatggggacctggcaaaacgtaaaagcaacagaatggcaccgctctttggccctctttttggcactttctctccgcttctctcccattcctttgcttttcttttacccaccgcatgtgctcgtcgattggcatgcgctgatcggttcgtcatcgttctgcgtgttcccgtgtttgtactgtggtgatccgcgtttgcatgctgtaatttgtgccatttttggacccttttcccatgccattaaacgcactgtcgcgacaatacgattcgcagtgttcgcgcgttttgaaattgtttggcgattgcaatctgtcaaaatgaccgaatttgtgtcgcttttctttgtgagtttcgcttacgttttctcttcccatgggtcccacataaactaaaagagagaagcgaatccgccaatttcaacagattcccacctgttcgcaagtgccggtcaccgaattgaaccaccaccgcgcccgaacgcccgccggcgtcgccgcgccattgtcagccacgcgttttggttggatgcaagtgaaagctgaaggggagcatttgtcaagcttggatccatctctcgctcgaggtggcattttgaagggagaatggtgcttttggcttaatctcctccatttggtccagtgttttgtctttttcgtttagttgcccaatgtttcgcccatttgtccaatatttagtccttttgtcttacaattgcctttttgtctttttgacctctgttatggcagcaaatgccatctgctgatgggtgtacgtcgtaaactccgtccattgcgtttttcacgttgtccattgactgcggcgcatgcacacaatcgaaaaggtcggctgcgaattgtccgttgcccgcgttgaatggttccaatccgtgcacacacgcgccgcccccgttggccacaaaatttgtgtactcagtggaagccgaatgacagaactgcagcggattgatgtgctcgcccatcggaatgtccttgtcgtccgggtcggtcattgccgaatttctaagcataaaacagcaataagccaacgaatagccgagacaaattatggtgataatgtacggtaattgtcaccctccgtcccccgggacacttaccgcatttgtgagacgggcattgttaacaaatcgtcgtcatactcaggcaacgggcacttcggcacctgcacgggtcacaacatcgaatgccattaatgcctttaggctttatcttaccgggtccccgtcttctcccgagtgcaaaatgcacacgacgccgtcccgtgtcttggactgaacgtacggaatgccattcacatcctctggacactcacaacggctcttctcacagcgactttccggccaaaccgcggcacattgttctgaaatgagaaagaaagacaaattcacccaacaaaccaaaaatgggtcgaaattaaccagcatattggcagcctgattcgcccgggtttttttctgaaatttcaattaaaccgaagaattatcctcagaaatgggttatactcaggtaacagtatccctgaatggccacaaaattggacagacaaatgcaggtgccgacagaacagaacatgccctgagcaattgagttgaaaaagcaattacagtaacagagtaccgtaagacaatcggtgttaaaagaacagaaatcaccgacacgaccttaattagtttttatgtaagagtttcattaaatgctaacgttaattaatgacctccgatgtttttcgcctttaatcccccattccgctaattgtcttgccccctaattgcctcgttccttaatgacctgatccggccactccctgtcttttgtagcgactttgcgggtgcttgcatcgcccattcatgaagatttggcctatcgcgcagtatcggacttccaaatgcatttggtcatttttaggggcggtagggacacagtcgagaaaggcattttcgcggatgtccactttgcttaatacattagggttgtcatttttgtcatgttggggattaaagggctaactttgccagagtgtcgcagaataaccattcggtcgccctttggcaatggtcgcccggcgatggcatgcgacaagaagcgcaggagaagccaatggaacattgagggaacagcaggggaagtggggaagaagtatcggatgaagagaacaaaagagggagggaggagggagtgatggccaacggggagggcatcacgaagcagacgagcagagggacgagagaccgaaagcagcagacgagcagagacaccaggaagcacacgaaccagacgagcagagtggcgagccagcgaaggtgccgcgtcagaaggaaaagtggcggaaaagttcgcgagacgtgcgacggcgcgggcatcacccaacaaacataaagaaagagccccaggggaaggccaaatgggccaattggagcgacgaatcagcaggaagaaggggaggaggacgcagagtggaagaagcacaccgaaaagcgcaaagggagcataggaaaagcggaaaacttttcagtgggaggcgcgacaaacggacggagggacgacggaagaccagtccaaactcggctcacagatcagctcagcgaccccttctcattctcttccaccgcttcggaatttttgcattttcatggacaggaaatggcgaacgacgcaagcccaagaaaagttcacaaaaacaaaatttggactgttaggaggcgaaaggacaaaaaacagaactgtgtggggtcatcggccgatcgacacggcgggtgggcggtgaaaagtgcttaaagggggattaaatggggagaatggggggaggggggcggagggg

SEQ ID NO: 11148 - DNA, 1856 bp, Heterodera glycines
  unsure (1)..(1856): unsure at all n locations
ggaggattcaatggaaaagtgagacggggagcggacaaagcacntgctaataggctgacaatggcagaaaaacccgcgaccagtcgtcgcaacggaaagggcgtagggagaggggagggggattagattagcccccgnncctttcccccgcctgtcccccggtgggggggatttggtaaggcccttggcaatggatactcacttttcctcgacccaacaaaatgttgttgcgcattcgctttggtctccgttcgccgttctgtcggcgattttattacaattgttcctatgaccgccgaagagccgactcgaacgtccgccaaacggcaacaaatgtaaaaatgaagcaaaggcgagaaaacgcagcggtggggccacagacagcgattggaacgcgagacgggaacggcacatgggacgacggtgccaaaagggccaaattggggcgaatggaagcgatcacagacatttcctattgcggaaagtggaatcagcaaataataaccaagagccaaataaatagactaaattatgctttgattgctcacttcggcatcggtttctgaatgccgcccttccgccaatgcattggcactttctccgcacacattttgccccgttccattggcactgtccgttgttgcggcatgtctctccgatcgccctcctccgcagtttttccccggctttctgtttttgcttttccgctcctcgtcgttttccctctttgtgtctttcccccgccaattcgcattgcttttgctccccaattggcttcttctctctttcgcattcgcatttattgtcaatgcattcgaaggcgggtggacagtcttcagagacggagcagaaatcgccaaattgacgtaaccttaatgaaataggaagtaaaagttgttggcaacgccagtcataataatgttggcatttgaccctttcccccgttctcccattggttgtcccccatttaaccctcctctgctcccgtgccattccccattggttgtcccccatttaaccctcctctgttcccgtgccattccccattggttgtcccccatttaaccctcctctgttcccgtgccattccccattggttgtcccccatttaaccctcctctgctcccgtgccattccccttgtcccccatttaaccctcctctgttcccgtgccattccccattggttgtcccccatttaaccctcctctgctcccgtgccattccccttgtcccccatttaaccctcctctgctcccgtgccattccccattggttgtcccccatttaaccctcctctgttcccgtgccattccccattggttgtcccccatttaaccctcctctgttcccgtgccattccccattggttgtcccccatttaaccctcctctgctcccgtgccattccccttgtcccccatttaaccctcctctgttcccgtgccattccccattggttgtcccccatttaaccctcctctgctcccgtgccattccccttgtcccccatttaaccctcctctgttcccgtgccattccccattggttgtcccccatttaaccctcctctgctcccgtgccattccccattggttgtcccccatttaaccctcctctgctcccgtgccattccccttgtcccccatttaaccctcctctgctcccgtgccattccccattggttgtcccccatttaaccctcctctgctcccgtgccattccccattggttgtcccccatttaaccctcctctgctcccgtgccattccccttgtcccccatttaaccctcctctgctcccgtgccattccccttgtcccccatttaaccctcctctgctcccgtgccattcccc

SEQ ID NO: 11149 - DNA, 3769 bp, Heterodera glycines
tgtaggtagaattgtggttccgccggaaaataaaattaaaaatgttatttttgtttttcctggggcgaaaaaggtgctgattacgaatctgagcttagattttgtaaaatcactgattttatctttgatttttcatcaagtacttgatttttttcaaaatttttaaaattttctttacaaaaatttgtgctgaaaaaatgtgctaatcacgaatatgaactcagattttgcaaaagccatcattttgtctatgatttttcatcaattctcacaaaaaataaactgctgccaagcgggctcgaaccccagacccgtctcacatgacccgtaaaggccagtaattaaatttcaaaaaatcgtaaaaaacgaataacttaacttatccaatcattcaatagctcattcgaaagctctttttgagctctacaaattctgtgtataagttttttacgcccgattaattaaaaataaaatttttaagtttattttccgtcgggaccacaattctacacctttgccaaaacaataaataataatacgacaaaaacaaatctgtaaattaggaaaatcggagtggaaaaaatcaaaaacatgaaattttgatgagggaaaaatctgagtcgccttgatttgatttgacttggcgctcctctacttcggctgctatagaacaaaaattcaaacttttggaatattttttttgggacggtgtcccgcctcgtaatgggatcccgctaaaatcccgcgcgtgatcccgtctcgctccagtctctatatcttctgcctctgctttttttattttttcaaataaagacacaatgccaaaaggaaaatgttatcgtgtcaataatcaaaaaaatttaaataacaagaaaagcgagaaatgctaaaacttttacatcaccacaaacatgactggaaaattgagtacatataattttacaaagtttatgaacaacgcaaacacaccgcgggtatacagaattaggcgttaaaagatgtatccgaccttaaaaattaacatacagtacccataaaaaaactagggcaactaaaatccaccatttcttggtacctttcagatctatgagtacaacatatgggttccctcaaaggtttcaaaacatgataacaaaaatgcgaaaaaatcgggtttttgaattctttcgtttttcctgtccaattttttccggtgaatttttacggtcgggaaaactgcaatagaaccgccctcaaattctgttttccgaattttctggttttcccattttttcagctcaaaccacatacaatttcacttcacacactcaacactgctcccatctgcttcaccaaaaacgcaacgccatggtgctcttcgcattgctccctgtccagctgatgctcgacaaatgaatatatttgaaaatttaattattaaaacgaatgcttcagtttattattttctgttaacatattacactcaaaattgcataatggaaaaattcttcgaatttctccccacaaatgagaattaaaaaattttatgggtacatttttgaatataggcaatttttcgtaacaaagtgcactcaaattttcaaattttttttttaaatttcacgggaaaattcccggttggtcccagtctcggacgaaaatcgaggtcccggtcccgacttttctggtcccggtaagtcccggtcccggtttttgtcaaaattcccggtcccgtgcaactctaataattaccttttttgctaacttgctatagcctaatatgcacgaaaacgagtttttaacttggtttgaagcttttatcttgaactttttggtgcattttttttgccttttttgcgatttatttttttgaaaaaacggtaaattttttgaaaattttgcaacttttcctaccatattttattacaatttccaaaaaattttccggcggcgcttatcggcaccgccggaccttcattttaccttaatttttgaaattttaaccacaaaatgagtagaatttgtcattttctatctgagaaaaagatcgaaccggaaaatgcagattttttttttgcatcacaacctcaagctattggcaaaatttttaaaaaaaatttcgcttttcgcattttcgcatattttggcttttcgcatttccctttttttcatttcgcatttttcggtttcgcaaatttcgcatttcgctttttatttttcaatttggcccatccctgggaggtagcgatgtttcacccatgaactgatttttttaaacatcattcccctctttttgcaggaggaggagccgcaaaagccgacggaactaattgggcgatgaccgggaaacatcaacaatggcacgaccgcccagatatagtgtgtcgtctttttattggcaagcgtgatgaactgctcaatgctctgaacaaaaagatgattcttggttacatcacagcctggttcttctcgctcgagttccagcttcggtagtattacattggattgggaatgcatccgacttcatggcgtaatccagagtccagaagattacatgagtgagtacatttgtgcggacgtcccttctatgccggaaacgcgacttcagtcagcagaagaggcaaagaggatgcgtgaactctacaaaacaatcaccacaaagcatacccattcatactcagcccaacgttatcttgttgatggaaaatgcaaaaaacattttccggctggaaatccttctttgggtaaaagataatattctgtatattaaagaagccattctcttatggctatgtctactcggaaatgcgtatccgtgttatttacgccgaccgccagcaccaaacgaaaccatgcgtcaaaagcatccacattgcatttctgaagtcgaatgactttacatttttgccaactgcgacaataggaattgctgcagaactactgtatgagggccaaacagtacataagcgaatttgcatcacaaacatgttgattcttcaacgccgattatcttggactacgacagccaatttgcgaacttttacgtcgaacccatggcatgaggaaagaagaacgaagaaaaatttaaggagatgagattttgagtatttttgcgttgtaagtccccattagtttcacaatgtttgtttgccttgttgcccgaaaacactcgccactttttacacagaatcactgaatgaattttcggaccataacttttttctttctcaaccaaggtattttttgatttttggaaattttttgaaatttaattgaaatttttcgaattttccaaaatctcgcaatcccgcgcgggatcccgcaaattttaaatgcgggattaagggtatttttgcataaaaaatccaaaaaatcttatttttttatcattttcgcccgaacaattgcaaaacaaatacatttcaaggtgttcgaaagtaaaattgatattttttcagttaaaaatttttataaattaaaaactccagcagagaatttcgaaatccaatgacaaaataagaatttgagttagttactatcagcatttgaaataaattttaaaaaatttgaaaatgttgtaagcaattgcaagaatgttgatttttaggagtgtatttttcaatttttttctgttttttcaattttttctgtttttcttacaaaattttcctaaaatgtcaaaatatgtgccaaccccgaaatatgtatgtgccgtgatgagacatttgcgccgcgccatttgcgccgcacagcaaaagtggacacttgcgccgcgccacttgcgccgcgc

SEQ ID NO: 11150 - DNA, 2759 bp, Heterodera glycines
cttcaataaaaaaataagtaaagttattcattttagatttttattttcaaatccaaaataagaacgaagtatgcacgtcgagccaaaaagaagaaaaatcttagaaataaggacattttcattttctaagatccggcccttccaaataaggacaaatcgtagaaataaggacacttggccaccctgaacaaatctcatcaaaaatttttgcacctttttttgcttagaacatgaaaaattactaaaaataaatatgcttttaaatcagtaaacaatactctcaatttgggggggggggtttaacggtaatggtgcgtttatcgataattgctgctggtttatttaaaaaataaaaagctcatgcaattgtgggcgaagcgttttttgaaacagaaaattctaattcataatcaccatttaaataattaattatattcacatccatataaattttactttgtttttatatcattttcgcttcctttttttgtatttagccggtccaatgtcacccttttggctttctcatttgtcagcagcaggaggaaaggccataggacttcgtttgccacgaccaaatgagtttcgattgcgtccattcgaatttcgattacgtccgtaagaatttcgttttcgacccgtcgaatttcgccttcgacccgtcgaatttcggttgcgtccattcgaatttcgttttcgacccgtcgagtttcggtagcgtcccattaaacttcgtttgtgacgtccttccagcacagtacgaaagttttgtagtggtcccgattcatcggcggaaagtactcgcttttcctcctgattatctaaagccggtgaaacatcaccggctgcagcagaagaacattggacgacgagcaatgccatgaaagccatcaccagcaggaacagtggagtaagaagcatgccttgaacattcatctaaaatggaatcaatttaaaaaataatttggtgttttctcagctgtgtatagaattggccgcctaaaattagtccaacaaccatgaaacattttaaataaaaattttcgaacaaatttggtatcattcgaaagctcctgacgagctaagtctaaaaaatcaaggatgaagccgaaccgacgcgtgttatgggtcctcaaaattgttaaaactatttttaaactagtagtcagaaaatggtaaaagaacgtcaaatataaaagattgaattgcgcgtgatccgaaataacgaaatccttcacatttcctccacctcatttggcggggaaaataaatatttttttcaaaatttactaaatataaagaaagtgatggacagattgaataaaatggaggggcccaaacttgtctcattcttttaccatgatcagacaaagaatgcagcagagaagcggcagaaatgaggtggagcatacggtaaatgcttgtaattttttgcaaaaataaatataggtaattgaattttcttctacacaggtggcaatgaacccagacagaaaaacgaatgcaaaacgttttaaatttaagtaaattattaattaggccaacaaaaatttcaaagtccctttcacccaaatttttaatgaagaaattggcaaaaagttggaaaatttaatattttgatattcttggatatgggcgtagagtcaaacaacttttttcactacaaattttttaaacttgggctgctctttcgtatatgacagaaaaaggcgaaattcaagacacaaaaaaacaatcaaatttaccaaagaaaaaaacgaagcaaaagaatgaagcaaaagaacaataaataataataataacaaaacaaaactattcgggcgccagcttcatctcggcccaataatcaattccctccggcgcttttctcttcaactacaaaagataaagggaaaatgtatataagccatggatcggatcagaggacgatgaatttgagcgtgatcgtggcattcgagaattgcgctgaaaagacttctaattgtgtgctggcgaaatgatagacaaatagcataatcggaggttttaattgacttcgatttttcgtaatacgctaaaaggaacaactaagaatttttcctagaaatttagtatccttgaaaccaaaatgtctattaggccctgatttttggctttacttttttccttttcggctctaattttgaaaatgcttagtacttaaggcatttttgccttacttttaattttcaaaaatgagacattttcaaagccaaagaacaaacttgtatatttcccagtcgaattgaagtcgtaagtacgtggcgctgatgttccgcacacagtacatacaacagtcacacgaacggcacggtgccgaaatttcttgaattgatgatgatatgtacgtattatttgacgactaataaaaataaccgttggccataaattctctcgaccagtcctgacaattgaatttgcacaggttatatgtgtcaagtccgcccatgccgcggaagatgtcctccatcgaagcgtatgacagtgtaatgggctggctatcaatcaccgctcgatgtttggcatattgtccgaagcttaaccattttatttcttttttaataatcattaaactttttttcactttccattttaagtatgccattttttctattttttgaaagaagacgctattaataatcaacaaataggcgatactttttgttgaccaaaatgaagcaatttgtgaagcagaacaaactttgcatgctttccggatccgctgaagtcggaagtccgag

SEQ ID NO: 11151 - DNA, 1675 bp, Heterodera glycines
  unsure (1)..(1675): unsure at all n locations
tcattactagggacgtgaattttaggttttaactattttttttgctcaattgatttgaagaaagtagctcaaaaaacgcatttccgcataaaaatttttcgattctgatgtcattatcggtcactagaaatcactattttgggattttgtcactaaaatagtgaaaattcactattttggagttttgtcactatttcgacattttttggaaaattctttaacaaaaatgcaataaaaccaaaaaatacacccataagaatcgacctaaaaaaattcaaaaaaatatacccctaagaatcgacaaaaaaaatttcaaaaagcgctcctaagaaatgaaaaaaattttctcaaaaaggtattttcgtggtcactattcgtcactatttcggactttttgacactattttggcatttttactcactattttagttaactatttcgggatttttcttcactaaaattcacgtccctaatcattacaattgtacaatatttatcgaggaatttatttctttaaaaaaccttaatttctttgatcttgtttcaaatcaagcacatatgttttacctgtttttttcgctttaaattttaagtgcttagcatgattcccggtttggattgtttaaaaaaccaaaaacatgacatagcatccccattaattatgcatgaaaatgagggataaagaaagcaataaaattttcaaaatgaagagaagaaccaaatgcaaaagggaccaaataaattcatgtgtcaattaatggtaacactcgagagttgacttttggcactaggaggtaatttttgcaagccgaaactcgggcaccacaacattaaatgcaaggcaaaaataaataaataaatcgatcttccaagagcacaaacgctaattttaaattagaatcgactcactctcgaccgaataaatattttctttcattttatatcccttataaaatgctatttttagaaacgatttccgaagtattcgaataggtaaaatttaaaaaaatctctggcaaggctatcgaaagtgatgaactaataaatgtgattatattaaaataatcaaattgcagcatataatttgattgatcagcaaaaaaaaacagcaaaaaattgaatggtctgtaataaattcgttatgcaaatgtataaaatacaaataatcgccccaatttggcattgagtcaatcaacattttaaattacaaatcacaatcactttggaattaataatcgatcggtccaacaacaaaaacaatagccaaaaccatcccccgatcaaaacaatcaatcaatcaatcattcatcattcaatggttcccatttgcaattagagcagttcctccctccctccgtcagtcattcagtcctccgtctccgagtcggtgccctccgtgtagtcgtccgtcgacacgggctcgtcatccttgtccacctgcgcctcgtcctccgtgtcctcgtatttgacgggcggtggctcgcgtgccgggtgcacttccatctgcggacggagggaaaaggatgatgggattcaaaataaaatttataacaaactaacaaaaaccctttaaataatgttttgctatttcttggttcattcgcaaattttaaaaaaaactgaacagccattagagggctnntgaatatgtaanaattagtcnaactaaccatt

SEQ ID NO: 11152 - DNA, 1747 bp, Heterodera glycines
ctcagtgtgggcgttccacaaaaagctcagtgtgggcgttccacaaaaagctcagtgtgggcgttccacaaaaagctcagtgtgggcgttccacaaaaagctcagtgtgggcgttccacaaaaaaagctcagtgtgggcgttccacaaaaagttcagtgtgggcgttccacaaaaagctcagtgtgggcgttccacaaaaagctcagtgtgggcgttccacaaaaaaagctcagtgtgggcgttccacaaaaagctcagtgtgggcgttccacaaaaagctcagtgtgggcgttccacaaaaagttcagtgtgggcgttccacaaaaagctcagtgtgggcgttccacaaaaaaagctcagtgtgggcgttccacaaaaagctcagtgtgggcgttccacaaaaagctcagtgtgggcgttccacaaaaagctcagtgtgggcgttccacaaaaaaagctcagtgtgggcgttccacaaaaagctcagtgtgggcgttccacaaaaaatgctcagtgattgataaaataaaataataaggttaaataataattttgaactgtaaatgtaattttgatttaattttattgcatgcttttaaattataatttttattacaaaactaaaaaaggaaaaacaaattaattgaagacaattgataaggtgctaattttctttgcatttcatgtaaagaatttataattttattacaaaactaaaaaaaggaaaaattcacaaattaattgaagacaattgataaggtgctaattttctttggccaaataatcttgccttctgactcacatttataattttctcttctttgttctctatcaacctgttctgcttccagtttctctaatttttcgggcttacagttagcattatggtttgactgcaacataacaagttgtgttccctgtcgcagaacagctgatgcgacgatcgatttgacattaacatttttttcttgttcgcgaaaataacgacattttgaacaagaaatatatatgtcttcattattctcatttgtttgaacatattttctccaagcagattcatttccaattataaaaacattttttcttaaagtttttgaaaagcacttttcaaatctaagttcatgttttggcatttcatggcttgaagcattcgagtttgaagcatcatttttatttgtatgcgcagaaacaatagttagtcttgacacgtagcgtcttaaggtacaaaaacttaagtcaataccttttagttgcatttgttcatggagtttttttaatgttttaatttctttattttgatagcttttgacaagttctatagctttgtgattttttataaattcttcaaaaccggaattggtagaggtcgaatactcaaatcgaaataacaaaaaaataaaaataaaagtcttattcattttctaaattataattttattaaacatataaaaatttattgtattaattttacattttcagtggtagcccaaaattatatgtattgatggttattgatttcaacgtggatgttaccaatacaataattaaatttattattttaaatttattattttattttatcaatcactgagctttttgtggaacgcccacactgagcttttttgtggaacgcccacactgagcttttttgtggaacgcccacactgagctttttgtggaacgcccacactgagctttttttgtggaacgcccacactgagcttttttgtggatcgacctagcacc

SEQ ID NO: 11153 - DNA, 2089 bp, Heterodera glycines
aaaaagcatgataaaatcaaataaatcttcttttttctccctatttaaatggtgaaaaaataaaatttattcattttaactcttggaaaaacgagttgaaaaatccgataggaaatgtcattgtcatttggcacacagctcttttttgaaatagcaattcatttgttcatcgccttcaaaatattcgcctactccaaaaaaccaaaagtcagaatttttttacatttaatcccaatcatatgacacattttcaaaagttaaagaaataaaaaatattattatcatttgcttagttatgatggaatttctccccattttaacacccataaatgccgttaattttctttccgcatggatggccctttttcagtgattcgtccattaacaaatccacctaaacaattaagcatgtcaatgtctttaattatatttttcaccgttatatttgtggacatctcatccgttgtgctcagatgcgcataatttaagctggatagcccatcaggtttccaagtgctgggtcaaattgttgatcaaaagctgccgacatgcgcagtccatctcggcatttgtcgtgtcgttgtctttatgggccaactcaatgcttttgtaatggccgatgggtccgtgaacgaaaagcaccgatttattgctaatttaaatcttaaaaactggaaaatgtgtgtggtaatgggaattataaatccgccaaaataagcacttactggaaaaatttcataatttcttagaagcaacataattagtaaaagaaaaaaaaattaacaatttgttgtcgaaaaatgtcctgtcttagctgaatagaaacactctattttggaaggatttagcaaagtaccaaaaaatgaataaaaatgccaattttttaacaattttcattaaaaattttaatttttagtaaaatttgaaatatcaatcaaaaatgtttaatattatgattgtacatgaacatgttaacattcgaaattaaactttttggataaatgtgctctgaatatttgtaaattgaaattctaagtaataattaaagctgggattttcatgtgctaaaaatcccaaatatgtaataatatgttctaaaaattaacaattttctcactggtgtttcccgaaactatgaaatgcgaccttagtttgttctgaaatttgatattttttgttatactatctatgtgtttttataaaattttaattatttttttccgtttgacgcacatccgaccaaactgaccaattattgtagaagatactagccgcaagaaataaaaaagttaagaaatttgtccgaattcgggttcgggattggaaacatggatgttttgcacaaatccgaccaatttcagtcctaaacaggtactcacgcgaaaacgtccccacgcgaaaatggccacgcgaaaacgaccctgaccgccaaatatgtaataatatgttctaaaaaatgctgaaatatggataaaaatcccaaaataaaatatgtgttaaaaattggatttttgcataaaaacccaaaaattctcattctttatcattttcgaccgcacaatcgcaaaccatatacatttcagtgttcgaaagtaaaatttaccttttttccgataaattttttaataaattgaaagatccagcagagcagttcaaaatcaaatgaccaattaagaattcaactttcggcattcgaaacaaattaagaaattttgaaaattctataagaaatggtaagaaattttgatttttaggggtgtatttttcaattttttgtgtgtttcttacagtttttctcaaaatgccaaaatatgtgccaaactccaaaatatgtattttatgtttttataagtgcactaaatcaaaaattgttaggtcaaaactatttttgggcttctcttgacataactaagccgcgtaaaaaaagtgtaacaacataaaaacccagctctaataataatgcaataatttataagttgatttgttgtttctttggcatttgattgatttaagtaattacccaaattaatttataatcgtttaatatgtagaagaaaagcattgctgactgataaaaagaggaataaac

SEQ ID NO: 11154 - DNA, 2772 bp, Heterodera glycines
  unsure (1)..(2772): unsure at all n locations
tgcaggtccnctttgatcattttgacaataaaaaacaaaatttggaaagtcgaaagataaatgataaaatcagacgaaggcataacggacaaagcatcgaccgataacaaaaattaaagattttgtccagcgccggtcggattcgaacgctcgcccacccaattccaaaccgcggatttctcctccgctagccaattgtcctccatttcccctcattttactttcatttgtcattgttagtgggttaataatcaattaattattcaatgatgaatcaaaaaccgggaagtgtcaacagttcggtctctccgttctgtcagcagctgaccgttcccgcgtcttcccacgccgccgcctttttctgctccgcgcgcttttccgcgtgccgtcgtccgtcgcgcggtctccgctccgccgttttgtccgcccctcctctgtccgtctcctccgtttctgtgcccatttttgttttggcatcgttcgtcgcattttgacggcattcggctgactcgtcgctgcctcctctcagtcttctgtacttgtcgccccttctccgctgtcttatcgcccttatgctaacgctcgtccccgttggaaatgccatggtttccgtctcaaaattgcgcgtcaaaagtgtcccccaaggccttcttctctccaaactgccgtaatttgcaaccgaaccgccccagtgtgccattggctgttgcgtcgttggcaatgttgcaaattcgccgcttttctctcccccaaattcattgcctttggcggccatcgattccatttttgccggcacagaatgaacaatgccaccaatttgaaacggtcttcctgaatggttcatttctcacatcttcgctttcattgcctttacccctttccattttttcgtttcttcctccatttttttcggtttgtccactaaattcgcttgggtcgtcccttgccgaatttgggcccatttgctccggcaaatttgggattgcccttttgctaagggaaagggtgggccatttattgccaaaatgagggaatttgtttcccttttccccggcctgtttcggttggccgggaaaattccatttttctcttttaccccacaaaacaaaaaaaagggaaaagggcggggcccggaaattgttatggggggagagaaaaaagacaaaaagggggggaaaaaaaaaacaaaaaagggggggaaaaaaaaaattcaaaaaaaaaatattttacccgcggggcccctcttttaagagggggggggggggggggggggggagggggagaaaaataatttattataagaaaacaaaaaagaaaaaaaagagggggggggggggggggggggggggggggggaaaaaaaaaaaaaaaaaaaaaaaaaaaaccccacccaccccccccctcctcttctctgatgagggagggggggggggtgttgttcgccccccccccccccccccccccccgttgtggtgggtttccccccccgcggcgcagcaccccccccccccccccccccccgggggggggggagaaaaataaaaaaaaaatattttctcgttttttttttggtgggtttttttgtttttttttttttttcaaaaaaaggggaaaaaacaccaaaaaaaattttttttttttttttttttttgtgtttttttgaggaaataagaaaaaaaaaaaaaagaagaaaatattttttttttttttttttttttatttttgcgccggggagcaccccccccccccccccccccttaaaaaacccccgaaaagaaaaatttttcccccacaaatttttttttggggttttttttttgggggggggcccaaatataggggggcccccgggggccccctcccttttattgtgtcaaagaaaaaaaaggaaaaggcgggataaccttggcaaaaaaaaaaaatggcaaaattgtcccttttgtttttcccccctaaaacccctgaacaagggaatgaaaaggacttttttttttcaattttccccaaaacatgaacaatttctgggttcacccgccccagctggggcatccatggccagggagggcccccccccggggggggggggtcagaaatggggaaaacccaactcgtactgccccaactcgtactgtttttctacaaaaaaatcgtcataacttttgttaaagacgcaccaaattaaacatttcttggtctaaaacacacacatttgtttgcagatttcttagaaaattgttggaacaatataatgaaattggcataaaattggtaccattgtcaagccagtcgttgcacacatgtggccgtataaggcggcacataatcgctgagcattttggaagagcacgtcatccgaacgcctttgaccctaaaaatttggaaagttgttaaacaaaatggcagactacatgatcaaaggatctgtcgcggttttagagccaaaaaaagcgttttggcattccaaacacaaaaaatttttcacgaaaattttttttttttgcggacacatggcaataatatgcatttaattaaattgaaagcttaacgcataattgtccttgatggtcataatgaagggacgctggcgctttttgagcgccgtttcccactgcgcctcggccaacccaaacgtttcgctgatcaaaaaattcaaatggcgaaagcgacgagcgcaccccaccgattgcttgacacggtgcgttaataataagcggggctgcaaaaaaaatatggatataaaatggcgaaatatgatcaaaaatcgcaaaagacc

SEQ ID NO: 11155 - DNA, 1252 bp, Heterodera glycines
agagggagagatgatgagtaggaagacagaggaagagaggaggggagagaggagggggagagagagaaagaagagaaggagagggaggaaaacagaggaagagagggagaaagaggaagacagagggaagggagagagaaagaagagaaggaaaaaaagaagacagaggaagaaaggaggggagagagagaaagaagagaaggagagggaggaaaacagagggagagagggagaaagaggaagacagagggaagggagagagaaagaagagaaggaaaaaagaagatagagaaagagaggaaggtagagagagaaagatagaagaggaagagagagatggagagagggagagaaagaaatggcacagcacaacgccaatttggccggattgaaccaaaaaacggacggaccacaattgggtcacgaaggccgaccatgtagaagattgagcacagaataacagcagaacacatcaaatagatggcttaatacaaataatgatcagtagagcctggatttatggatttttttgcataaattattcgaccaaatatcaaataaaagtatttttagccttggtttgatgcttcgatgcttttattttttccacattcatatttttgtacaaaaatatttccattttttatccataatccggcactttcacaaataaacctctaacaaaaatttaaaaaaaattcaaaaattaccaagacttttttcatgttcaaaattcctattcaatataaattttatttaaaaattattttaattaatgagaaaaaaaatattttctcagactacaatatgcgatattagggttgcaaccccgacgtcggggttggaagcgtcggggttcggggttgccaaatcgttcggggtcggggtttttcaaaaaactggattttcggtcaatagcacctattttggcctttttccagaaatttcatagcaaaaatgcaataaaaacgaaaaatgcaccccaagaatcgatctaaaaaatttcaaaaaatatacccctaaaaattgaccaaaatttcagaaaatattcccctaagaatgaaaattttccccaaagattcgtttccaaaatttttgttcttgataagttgcaattgtaagggcgaaatgaataatgaatgggacttaggtaaataagattttttgcataaatatacttggtttttccaatttttaatacctattttagtacctattttgggatttttagcacctaaaaatccgggctcta

SEQ ID NO: 11156 - DNA, 4860 bp, Heterodera glycines
  unsure (1)..(4860): unsure at all n locations
ttgtagaaagctgcacagcgtgtcgtacgcccgccgccgntgccatctgattttgtgccaattcgtctgcgctgaaattttgaaaaaaaaatattaaaattccattcaatttttcatcagacaaaaaaaacactatataccttcgtattctgtccaatagttccgctttggccaccaattggtcatttcgtgccggacatggcaagtgcctgtggacgggctcgtaaagacgaaactgcaagaaaattgggagaatgattagatatgcccttcaaaaaaaaaatttttttttgaaaaaaaagattcaatggaatttttaaggccaccggcgatgcgccacagttccgcaacacactccacggtggtgtcagcagttttgcgcgttttctccaaaatcacacacaaattgttgtggcgatggtccccagcagcagcaacgagggcaccagccaatgggagaacagcagcagaagttgaagcagtagcagcagcaggacgacgaaagatgcactgtaaaatgacaaaaaataaaaataaacaaaaaaaatcagaaagacaatcatttttggcacaaaaaaataaatcaataacccaatttttaattggttggcaattaaaaaatcacgcatattacgctttaaatggtccaaacagttatgaattgatgagggcacaacagagtgccacgggatgcccgaaaaaccctttaggccaagtcgactcgaacccatcccaaacgattgtttttggaccaggcaagtttcgtccgtcccccccccccccactcaccgtccgccaccaattgccgctttggactgtccgccgttgtcaatgatccgcgcacgccttttgcgattccctcccgcgtgacaatgcccggcgcttgccccaacgctttgcacatttgacgcttgaagagacgacccgcgccgacaatgttcactaaaaattggtcgaaaaaaattaaaggaggtcacaaaaaatgattattttacatttaaataaattaaaatttaatttaattgcaaattaatgtcaataacaaatattggcacacgtttaagcaaaatgaatgaaacgaaagagtcaaatcgatgaagaaattgcggggggaaaaaaagaatgatgaaagggggggggcaatgggattgtttacgcgtcagtcgcccttcccctctcccccccccccgccccatcggtccgccattatcagccaatcgtctatcattttttattccttttttgcactgccgttatttaaatagtgcactctttctctcttttctctctctcagtgtctcctgttttctccccttttctctctctctctccctctctctctgcctctcctttttccaccgtctttctccttttctcgccctgtctgtctcttttctcacaatgtttttttcagtttgtcacttctccccccccccctctcgcttctttctcaatcattgattttacagtactttattgctttttgcatactgtatggaaatgtcgagctgttttctgtacaatattcaaagtaatagggaattaatttacaattttattaaaattttatcggtgaaattgtgatttttttatcaccgtttgactggcggcgatccccccggcttttaccctaattacctaaaattgaatgaaaagggatttttataaagcattttggggagagagagtgcaaataataaggaaaataaaataggattaggtatatatatttgtaaattttgattcaattaaagagaaatcattcgacggaggaggggtaaatgacaaaaaatgattttatcagcacaatttgttgatgaacccatctgtttaagacaaacaaatgaaagaatgaataaacaatatatatgaaaataaacgaatggatgaaaaatatgtaaaaaatggacaaataaatgcaaatgaaaaggcaaatgcaaaaaagggaagaaaaacggtcgacgccaattgactcaaaatattatttttcatttcagctgggaaagatgaaaatcgcccaccaacaatccgccaaaaaaaaatttaaaaaatcttattgaaaattttccatgaaaatggattaattttttaaaattaaaacattggtgtgcagcaccaaccaccacatacatatacacctacctcaaaacgaacagaatgaggttggagcgcacgcgttgaggccaccaccgccaccggacgacccgagtccatcagagtggcagttgctgttgctgtacgggttgaacttgttgggctggaatggagagaaatattatttttatttatttaaatcacaaatgtttgtcttttgaaaaagatcagttgaaatttgtttctaacgaagttggaaaaccaataaatcacaaggaaaattttaatattttagaaaattaaaaaaaaaaaaattaaattcatcataaagttttgaaagaagaaatcgctgatattttcaagatgccttttctttaattttccttaaattcctgtttgaaaaaaaaatttcgggaggggaggacgtactgttccccagatgaccctctgttcattctgctcaccggtatgagcatgtccgacatcgtccggtgtccgggtcaatttggggatgccgacaacggatggtgccacttctgctggttgggttctaaaaaaatgaataattttttgacgaaatttcttcaaaattaaaaaaatttacaaaaaaaaaaagtaaaaaatgaatgatatattttgttgactcacaagtgctgattgtgagtgagagcacatcagacaaactgagtaagaaattttcaaaaaattgtcctgtggatgccctcggcaccgccagaaacactcaatttccaaaacaaaacaaaaaacggcacaaaaaaatgaaattactcacatcgctgcccagtgccgagtcccggttgttgaagtcggcaccgccgccgcaaagttccaattgtaatgcggcaccggcatccgccgtatgcaatgcccgcacctccgccgcttcggctctgccgtcgcggtgtgccaacggcaccgccaaccgccgccctgaaaccaatggcacccccacccaccgaaatgctcaccgtgcccgccgatgtgccgttcagcgacgcggagcagtacagctcgtccatctccgggtccaacacgggcaggttcagccagtaccatttgatggactcgcagcagtcaatttctgtttgtttggaaaaattggtcaaaacaaaattcgagagggacaatcatttatttatttatgcttttcgggccaaaaaaatatttttccattacaatttttcaaaaacttttcggcgccctgggagataaataagaaatttttacatatttttaccatgtgattgagaaaattttgaaaaaagttgggaccctgtgattccgttagacgccatgagggaaattttgaaaaaattttggtcaaatgcatagaaatctcagtttaaaaagttttggtttatccacacatttcggggttgggccggagactgaccgtccaacatgattcggttgtcctcccggcacaacagtccgaccatgaacgacttgagcgagacgtacactgccggagggtaaagggcacggaccgactcattctttgaccacacattgttccaaatgcactccaagtccaggtactgctgctgcaactgttgttatttttgttggattcgattgcctaaaaaaattcaaaaaattattattttttctaaaaaattaataattttcaaaaaaatttatcttcggccgcggtggaaaaggcgcgataagtggcaaagaaaacgttgaaataaaaaaaagaggggggggggagggatttttttgaatttaggcgccgacaaaaatttgaaaatttatttttaataaattggaaataaaaaatagtgccgtctttatcttgacaaaatacattaaaataaaaaaattctcggcatttccgtgcccccattttaccatatttgaaaatttaatggcaaaaatggtcattttttggcaaaaaacggcttcaaatgatcaatttcagccaattctggattcttaatcaaatttcgaaaccaaattcgatagttcgaaaagtcatttgtcgactctttgttcgaattcgggttatgccatctcaaaaagccacgggaatacaatttcaagcgcatttttctaatattaaaaaatggctacccaattttaaagctgggccaaatttttccaattttttttttttgtaaaacccaaaattcccccgcatttccaaaaaaacctgttttgagtccatttgtccgtccgcgtcgatcagactgtccaccagccttggcacagtgtccgctttgatcacccactcccggatggtctcccattggaggtggtccatcgccacggcagaaccatcagtcagcgctaactgttgttggccaagggctaaataaatgacaaaaattgggatttggttttttagtgggaaaaatttgtaaattattattaaataatatttattaaatatttgccataagtaaaaagtagcacaaccaaacaaataaaaaaggatttaaaggtaggatttgtgtgaatttacgcgcattttttttttttgttttttaaaaacaaaaaattccaatttaaaaatacgaattcatttggttaaaaccgaaaaatgaaaaacgaaattccgctcgtaaatttaacttatgacctcctggattaacactgaattaacagacattaatggtagaaaatttataatttttttgagtattttttgttacttactaaccctccgnagacacgacaccccctacaaaaaaaaaactttgtggaaacaaaaaaattaaaatatttttctaaagtattatt

SEQ ID NO: 11157 - DNA, 698 bp, Heterodera glycines
acggaaaaataaaaattttgaaaaaaaatcaagtacttgatggtcatagacaaatcaatgatttttcaaaaatagaattcagattcgtaatcaacacatttttacatcagaaaaaattatttttaaattttactatttttttccatcgaacaattttaaatgtgctttcgtgtttattggtgctggtggtggcaaggcaatttgacaatgttttgcaatctcacacaaacaaaacgacgctgtgacgaacacaaaaagcgtagcggaaaagaaagagagaattcaaaggggaagtgagtgagcgagtgagtgagtgagagaaaacaacgaacagacagatagctacagctacagtgtgcattcaaagggaatagagagagagagagagagaaaataacgaaaggagagagaaaggtggcagacaaataaaagacagtgtgcattcgggacagtcagtcttaaaggcccgtgaagaagagagaaaaattgaaaaagttgttctcgctcttcctctctctctctctgccccgctgcggtgtttcacgcgcgtccttttgctgctgcattcaaaatagggagggaagagaacaaaaaataagaaaacactaatcattcacgttggaaaagaaagaggaaaacatgaaatacaatagaatggtgcagtgcaaaaacattcgtttctctctctgtcacttaaa

SEQ ID NO: 11158 - DNA, 2345 bp, Heterodera glycines
acgcattagcccgtaaaaattcatattggtcgatgaaattatagattacgggtccaacccgtattcgaaatccagatccaacatagaatccatgttgtccagactttttgcaaaatgccgaactctaatatttacctaaaaatctaatttcaattttaatttgctgtggaaaaactcattgtcatgactacacaccacatacataatgtatgttttatgagctcggaaaactttagaaaaatcaaattagttgaaaaatgaacaatttaaatatttagttatgttcaatgacaaaagcagggtaaataatcaaatgaccttaataaattagtggatgattgatagttaacaaaactattaaacaatgaaatttgcatagccaattggtcgtgaaaaggaagtgaatggaagagagaaaaaaagtaatagagagaaaggggagagagagagagagagaaagggagggagagatagagagagagagaaagagagagagagaacagagagagagagagaaagagtagaggggaagaataaagatagaaccagagaaagtaaagagagagagagagagtgagagacagggggagagagaaggggggggtgagaagaaagagagaaaccgagaaaaatagatatatatagagagagagagagagggaaatgccagaaaataaagagagagtgccagagaaaaataaaactagagaaagagaatataaaatggattaacataatgatgagatagaagaagaaagagaaggaatgaatgaaatggaaaagagaaagaaaatagagaaagcgagagacccctcgtattcaaaaggaatacaaatccgtatatatccctcccatcgagctgtgtggctctagggtaattgcagatcgagaaatctaaaaacattcaaattaaattcttttaaagaaaaaataaaataaatttgtaagtttaattgaatttttttttgaaaaattaattaatttttcaatttattttgcttaaaaaaatcaacaaataaatttacttcattagtaatttaagtaatcaattaattaggaaaatgctaaactatttcccatttttttgtacacaatttacaatttattttgtacatatatttttagttcgaaaatctgttttaaaactttttttttaaattttgtcaaaaatattttttgtataaattctttaactcttactaaaaatttaaatttatcgtcgatacctacagcttattagtgggaccgattcaattaaaatttcttaatttttttattcagtacaatgaatacatattcaggattttaaaaaatcttgaaattcactttttcccactttttgacagccacataataaatactattttttgtttttaataatcgtaagccctaaggaattccgaaaaagaataccatgctgactgttaatcgttttatcaaagcattcactccaattaccataattgaaatggatgaatttgtgagcaaaatatacaactgcatatacatatacataaataatagtcaaatgacaacatttcgggatcacaaacacttcgcatcaattaattattcattcacttctttctgatgctgaccactcggcccagggaaagcgttgagaagtctgaaaaaaggacaaaaaattgaaaccgaaaatcttttggaattgttcacccattttcaatccgtccgctccaatgccaatgaaaattcggctccctcggctagtccctgctttcttaaactgttccaatgccatctccttctgcccaattgggcaacggatgagcacaaaacattgatcaaaatcataatattgtgacagtgtcaattgctccccagtcaatgcgttggtcaactcaaatggcacgacgaagtcaagcgaagggaacgtcgaaaattcaaagtaaatgatgaagcaaacatgagaagatgcatcggaaaatgcctaaaaatggggtaaaatcataaaaaatgtaattaaaaatggcgtgaaaatcaccgttttgatttgttccattcttgacgaccattgcggaaccgaaaagtcatgacaatgtaacaaatttggtacaccgtccggacgaggcgagaacagccattttgccaccgcttggccatccgtcgcattggcactgtcatcgggcggaaattccgggagaatgtcgccttcgaaagagacacagcgaagtggtggacaatcgatgagcatcgacggggcaaactgacgcatttgatgaagagccgggaggtggtcgaccccgtccacatgagaggagtaaccgaaccttggccgagatggtagaaacgaaaaacaccggaagtggaatttttccagtgac

SEQ ID NO: 11159 - DNA, 1121 bp, Heterodera glycines
ttttttacattcttttttgtgggggcgtcgtcgttttttgacgttgtcccaaaagaaccaaagaatggtgcaacagccaaccaacagagaaaagaatcataaactggaattttttatcgaaaagcaacacccacaaattaaatcctactgtatttgtactgcccctagttcaatgtaattacatttttttataaagtgtatttcgccgaatatttctaaccatacagtgccacgtgcttggcattttttttaaaggagtacaccccctgattctttgcagaaaagtgcacgcatttcgtcatttccgatcggtactaatttcaatggatgaattaaaactttctgggcattaaataacaaaatttaaaacattttaagaaaagaatcataaactggaattttttaacgaaaagcaacccccacaaattaaatcctactgtatttgtactgcccctagttcaatgtaattacatttttttatcaagtgtatttcgccgaatatttctaaccattcagtgccacgtgcttggcattttttttaaaggagtacaccccctgattctttgcagaaaagtgcacgcatttcgtcatttccgatcggtactaatttcaatggatgaattaaaactttctgggcattaaataacaaaaatttaaaacactttaggaaaaaatcataaactggaattttttaatgaaaagcaacccccacaaatgaaatcctactgtatttgtactgcccctagttcaatgtaattacatttttttatcaagtgtatttcgccgaatatttctaaccatacagtgccacgtgcttggctttttttttaaaggagtacaccccttgattctttgcagaaaagtgcacgcatttcgtcatttccgatcggtactaatttcaatggatgaattaaaattttctgggcattaaataacaaaatttaaaacattttaagaaaagaatcataaactggaattttttaacgaaaagcaacccccacaaattaaatcctactgtatttgtactgcccctagttcaatgtaattacatttttttatcaagtgtatttcgccgaatatttctaaccatacagtgccacgtgcttggcattttttttaaa

SEQ ID NO: 11160 - DNA, 2497 bp, Heterodera glycines
aaaatgatagaattacctgcctacctttgttttgcctttttctcaatttttaatatattcgtttgctcatgttccaatatgaaaatgaacaataccgaatgaaaaaaagaatgaaactccgcatatattttgtgagtcaatgaagaaaaagtacaaaaagagagcaaaaagaaaacaaagaaattgaggcgaaatgctttaacatccgtcagcatttcatttgcatgcaatgctttttcgtgatgttgcgatgataaaaaataaaataaaatacacacaaattattggcctctgttctgactaaaggtaatttcagatgcctccgatgatttgaatttgatttggcaaaatgtattgacaagaaacagaagggcagcagcaaacacagcttttaccggcaaatgcaaaggcagtcaaaaagacgtaccacacgaccaaatcctaaaagttcgaatgtttggctttggcgtcccctcccctcccccccccccactttatggttccgtcatcgctgcccgaggccaccattgaattgtccaccgggttccaactgaccgcgttgaccgtgccttaattctttatttaataagtcatttcttccgctttcgcccacttgtgtggccgatcagtcgcttgaccgggtgagtccgacgcgtattccaaatgaccacagtgttatctgatgggaagcaattaattgggaaagaattgggcacaaaaacaccttcggagccagaggcaatgaataattcatcaggaccaccgaaagaagaagtgatcacctgaagaagagaatgtttcaaatcaacaggtttctaataggcattttcctggttatttttaaacaattccattatcaaaaagggggggggggctgatgcaatatgaacccgttaaacccaatttaatgaaaagccaacaaattcgttgtgttttgagccgaaaaaagagcggacgaggtcatttgtccgcaagtcccacaaccgaatgccctcggttttggtagtcaccagacaatacttctcttttcggtcaacgctgaagaaacgatggaaaattagaaatggaggagggaaaatggcaccaaaaagtgatgatttggctggcctcttgaatcagcgtttgctcgtgcatcgtttcgaaatcgtaggcccttattctgaaaatcgtatatggttaaaacttactttcacgttgtccagcctaccacaaagctattttgctttcggatcaaaaatatttttctcaagtggattgtagtcgtttttcgccaaaaaaatatatcaaaatattttatttttgggtcaatttcaaaaattatggttaagtgagaccacggggtaccgataggtgccgccgagtaaaatttagtgaattttaatttgttaaaaaattgaatataaattagcagtgtcccttcccctttattcggggactggacaaaatctcgccgccgaaatttcgccgcccgaaatctcaaatttttttttctaacttagaaaattttcaaggaaaaaattcttagataattttgaaaaaatttaaagaaattattttttcttaatttttatgataattactgttttttcgaaaaatttcaaaaaaaacttaataaatatttttttttgaaattttcttataaaaaactttctaagaattttttccttgaaaattttccgtttgaaaaattttttttgaaatttctgcggcgagattttgtcccggcgagatttcggggtgtacccttttccttctcccctcctcccacctgttgtgagtgtccgctgccaaaacagttttcccgtccatgcacgcgtataaacaacgaattcgaaaaccttcgaacattttggcactgtcctcgggccgatggatgtcctaatttgggaaagtaccgttggtcagtcagtggccctccactttacggattaaatttattttgaaattgattcgctcacataaacatgaaaatggcctttttcgccggcacatgccaatttgtgggagccgtctttgaaaaaggcgacggtggtaaaggcatcgccggtgtaatggacgtactcctaaggacaaaaagtcttgaaagggaagagaagcgggggaacgaatgccttgacgagacgaccacttggcacgaagtaaatgaaacacttaagggggggggggggtgaaacggacgaagggactgaaagaccgaccccgactccgttggcctgctcagtgctggtcaccgccaagtagcgactgtcctgactccaggagagggaagaaatgccaacaatttcctgcagaatgtggatgttctggtggatgtgcacttgggtgggactggaatgtttcggtcggttgattggccattgttgcactcgcccacctgatcacccgccagatcagcacctgattgcctttggcccccgaggcaaggtaattgccgcaggggaaaaatttgacgcaccaaacttcggcattgtgcaggtaaagggtctgaaaagggggc

SEQ ID NO: 11161 - DNA, 1785 bp, Heterodera glycines
ccccccgaaaaaattaaaaaaaattttcgtccctagaaatttttcataaaaaatttcttagtaagaaaatttcattttcagcgattttttggaaaatttttgaaaaaacttagtagttcatcataaaatttcgaaaaatcgctgaaaaatttttcaaaaaatttttttcttgaaattttcatattaagaattttcctaagtttttttatgaaaaatttttttaaaaatttttcgggggggggaacgaagtggggggggggggaaccggcggtggggaaacgaagtgcatcccccaaaatgaatagcaaaaacaggtgcttattttgcggtatttaatgaactgacattgcttcatcagttcctgcagtctgttcgggggcagcatcagcgaaggcggaaggacttttctgagagtgctcagcacattctgtgcacttccgcccgtctcggcgccctcccgcggtgcttttgggccgatgtcgcgcgagcacacaacggtggcccaatgttcgtgccggggaagtaactctctgcatttggggaagtccaactggagaagacgaagtgccaacagaaactgagtggggttttgctcttatatttttcaacaaaaagaagaaattaggcgatgcgaaaaaggccgctgggattttaatcggaacaggacaaaattcgccgtgaatatgaaaattttcagaatttttgtattcaaataattaaagcttaagaaatttgaatttacctcccaataacataaatagtaatcccttgtctaccaaaataaaccatgtatcgtacaaaggcaattcgtatataggcaggcctaagcttaggctttattttttggaattttttattgtaagagttgcctgtgtacagttagttgcctttaactcaaaatcgctgaaaatttttcaaatgtttttttcttggaattttcatataaaaatttttttttttttgaaaatttttaagaaaatttcggcggcgcaattttggagcgccctttttaatctgatcatctgataacaccgtgttattcttctgctaattcaatttcgctttccgatgtttttccctttttttcttcgccctttccaaagtgtccctttgcttttcgttttttacctcgccccgttcgatcagctctttgaagcgttcctccagcaaaagcactcgcaccgtcacatattggcgttggctgagttgggcccgcaacttttccacaattccgagtgccttttgccattcggccatttgcactaaatgttgaatgccaaatttgcctacatttctccgccccaaatttctgcaaatgattaaactgaccgtagtcgcgcagtttctgcgacaacggattttcaatgcggcatccgctctcctcgaccagcgaatcgaccgtttcccttaattgggttggccatccattggatccttcgcctattggtggtcccttccttctcacatcattcccaactcgcgcagatactgcccgatgatacgcacggtgttcttctgcagctcagtcagcgcaacggactgatgctgccgcaaaaattgcgttgtctgacacgtgtggagagcagagactgaaaaacgaaagcaattaaaaaataccaaattcaacaaattttgggatatggggggattagtcacttcactgtttgcatcccgatttttaatttgtttttttttcactggaaaattggcccttacgaacgacaaattggtgggagcgtgggagaactcttttcgacttatattctggtttttgtcaggaaaaat

SEQ ID NO: 11162 - DNA, 1861 bp, Heterodera glycines
tacaaaattacccatattttgcccatttccaaatggccttaaagccgtacaacgaatgtgccgaattcaattttccaaatttccaccccctcccactaataaatgttgaaattcgccttagtccggtcacctcgagattgtaacgcatcacggactgctcatgtattttcttgtagtgttccttgcaactgacgccgagttgcagcatttcgctttgcattttcaggatttgctgctgctcttggaacgccaaaggcatccgcgagtcgagcgactcgaccgcctaaaagagttacggaaaagtaagtgccaagagctgaggagtcaaacctcgatcaaattgttgacgaccgctggagtcgaagtgacggtcgggtcgatgtcgggcaaaggcaatatttgaaaggcatcgtcggccaatttcctgcaaagaaacaaaatcagaatccgaaccaaatttctcattttgccggacttgaatatttctggcacttcggcacactctttaacgctgaactcagactccgctaccgacgatacattggtggaatggacatcgtctccgatactcggagtgaacgtgacgtgttttttcatttttaaaaatcaaattgcaaacttaaatggttaaaaattcataggttatattgtaatttgcaataagagcgaaatactaaaaagttataaaaatacgtcgcactgaaatgtaccgcactaaatgaccctaaccgtaatcttttgattgactaccgtaagaaaagaaatttaattttggcagcgccaaatagataatttgagtaggtggtatgcacgtctaatgctactgctactacgactgttacatttatttcttagtgtttaaatccgaacagggggggggggggggtgggggcaaaaaaagaacccaaaaacggggtcggttacataaaagctgcatttagcggtttcttgtttcttaatatcagtactagctcatttcttaaattataaattacagagaaaagtcagtattaccgaatgtctgatttgaccacaccatctccggaagtgacaactgatgatggcaccacgccacaatcatcgaaggtagcaggtttaaacttcacgcaacgggctgacttgtcctgtttaggctgctgagaagaccggacaagatggatgcaactccgccgccgcctctgttgatgatgatttggcatgtgcacagatggtaagaaaaggcatttaatataaacgtttgcccccccctccctctcgcatgtaactgcatatagccacgaaatggggactccttcgaatcaggtgtagaggtgggggtaatttttcataaaaattgtaattttttctaaccaagctaggtaacaaaaattttgatttaaaaaaaaaatgatgcggcgacgttttgtctacccacgcctctccctctaccccgctagccttaattcataaacggccagaccgaccccccccccccccccaccccatttaatccgttatccattcaactgccaaacccaaatcccttttcgattcgcattcatattccatttccttttataggttctgtcgccagcattcgagaacatttccgaagattcatcaagtcctacaactgattctgcacacattgtcgacgcgcatgctcagaaggttgttttttgcgattctgagaagtactcgggggtatcgagggcgctgatcacgaatctgacaccaccttgtcataaaaataatctaatctatgatttctcatcgtgatttttcgtcaaaaaattgttttgatgggtttttactttttttcatcagttccttttttagggctcgtcggcagcactgaatttgttcagtattttggactttg

SEQ ID NO: 11163 - DNA, 4325 bp, Heterodera glycines
  unsure (1)..(4325): unsure at all n locations
aaaggtcatcaaaatattggcgncgnaccatcattcgcnaaaattttgacgaccancctttttttaatgtatgaacgggacatttgtttatatattaaaaaacacttaactatttcattataatccctttttatccctttcccatgacttctcttctcattctctctctctctctcccccctatctctctctctttctctccgccttttttctatttgaaaatggcaaatgcgccattctctcccactattttccatttaaaaaatgggccataaaaatgggcgaattccgtccgaattgcttttcgaattaatttctgctcttccgtttgacattcgatgggccgttacccgggtttcccatgcttttgatggttttttgtggcagaagcaattttcatggattaaagctgaactgatccgcaaaatgcaaaaagttggctgattactcacaaattactggcattttacataaaatttaatattggcaaaataatgttaatattgagcatgtttgaaatgtttttttcatttagaaatccgtgtttcttcaatcactccaatcgctctccaattcggccaaacttttgccagaggaaattttcgagcaaaatgaagtgctcttccacgaccgtattcagtgtatgctgacatttatttatacataattgttattttcttctaacaataactcttatttattttcagatttccattcggtacgtaaagcgatcgacagaatggcagcaaaggttggcaaatctcagatattcaggattctcgcccatggctcccctagttgtttcatttgttttccattttctcgtgtttaggtcgcaggggccttaattagaaattgaaaaaaatgttttattaccatcacattatcaattatggcttcattagcattaattgtcgtaaattacctagttcttccccatgcccttttcagaccactcttggctccggcttcccctccgacttgggcggactcggcacgggcaccggcaccaccttcgtccagccccacaactaccaattcggcaccgcccttttgggctctttccactcgtcggacgacagtctgtccgtcaacatgaactgtgccatgtttgcgcccgaagaactgacggtcattcatttgttgccgttggcattatcaatgaaattttctattttaggtgtctgttgtgggcaaccaaattgttgtggtgggaaatcacggcgaaaagcaggactcacttgggtcgatgtgagtgtcaaattgaaattagccaattaaaaccatttaaatttaattcgtcggattagtgagcgccgatttgtacacaaattttccatgccgcgcaacgccaccgccgactcagtgaaaagcaatttgaccagcgacggcgtgctgacggtgaccgccagcgcaccaatcgcaccaaaaacaaaggcaacaaactgggcgagatgggatggggggaatggaatgaaaataggaacaatacatctgttatatttagagttgctcggtaccggtaccggtactggccggtaattaccggttttttagcaattaccgattaccgagcaactctagttatattatttaaaaaacaaatcttttgatggtttatttggcattagcaatttgtatgggttggtgctaatttataagctaatccgcagcaaaaagtgggctaactcggtaattacggccatttttaagatttaatattggcaaaataatgttaatattgagcatgtttgaaatgtttttttcatttagaaatccgtgtttcttcaatcactcgaatcgctctccaattctgccaaacttttgccagaggaaattttcgagcaaaatgaagagctcttcaactaccgtattcagtgtatgctgacatttattttgacaattgttattttcttctaacaataactcttattttaaccattttcagatttccattcggtacgtaaagcgatcgacagaatggcagcaaaggttggcaaatctcagatattcaggattctcgcccatggctcccctagttgtttcatttgttgcatttttcaattttcccgtgtttaggtcgcaggggcccagcacatcggtggagacggcgccggaggaagtgggatcggccccaccgcaccgaagcagacacgcttggccagtgacgaatcgatttaagcaacgattatgttgagaattttcgggaacggctttccataccaattctcgatgtcctatttcaatgacttatttggttttttacgatttctttaaattttttaagtaattgtctcttctcataatcagacgatgcattagagacggataaattatttcggtctctgtccatttaatttgcttcggtaattaatctattttttttactattttttattgtttttttaaattgttttttcaattttgatgccattgaaaattgttacaattgccgtttcgccctctttcaactttctgcgtcgtccgttgccttcgttggactttcgtcgttccctttttaaaccgccattggactcgccgttctgtggcatttacaggacaaatggcgaaatttgccggacggatgacattttggtgtgccaacgcaagatgaactatcaccctggagcaaatgtacccaggatttttgatggattgaacacaaaaattccacattaacctcaatgttcccgtgtttcaggtccgccatcaacgggaccggaaccagcacttgttgaaagcggtctgtgacggaacggttgtgatcacacgcgagcactgcgaagtgaacccgaagaacgagtggatgtacgcgcagtacgcgtaccgcgactttgagaacatttacaagctgaccttcaacgtgataccacgacggatgtccaacacatttaaactgatcagcgaagaatgaatgaccgacccgaaattttgtgtattttcgttgttttttatgaatgaatagtcactgattttacactttattcctattttcattcgggcttttcttgccatttaatttttgtttatttatatatatatatttttgctaatttgaatattttccattcattccaatggaagcgcctaattcgccgatggcatcggcacagaacaggggccatggcgttgacccgtccactgtcagtgccgatttaaacgacatttgtggggacaccgacggaatggcaaatgaagaagaggcggacgactctattgtgaaggaaattgtgacggcattgttgtcgggcggaccgttcccagcagcggaagagaacgacgagcaaagccaagccatggagcagcaacagaccaatgggacagcgatggatggtcagagtttgttggcacaccaaaatggtgtcaaatgaaatttgtttttttttaaatagaatttggttggtcggcttgcctaagtttatgtgttcagatgcttctttttcatctgggctctctcctcttgcgtccgatgctcatcaaccagtgctatttgcctcatttttcgagttaatttttttttgcaattcgttttacaccgaattagccgacaattaccgagtgatttggtcaattttcaggtcccaacttggtggaaaaaagttggagtgcggtggccatttgtatcgacggagtcggcaccggggcgacagcatttattggcgctgtgaccaaaaccggcgctaccgctgtgccggttcggcgcggacagtgggcgaaacggagggaaccgaggttggcacaaagctgcaaagaacttggcactccgctccgttctgaaattctttatacttttgaacccatccttctgactcccttaccaaatttgaaaatttatgaaaccaaaaaagtgctgcatttgtttcccgtcgtctaaaggtggagctgggcaaaccgcacaaccacgcgccgtgcccggcccgttgtgcggcacagcgactgacgcgtcaaattcgccagacagcactggctgcaggcggatgtctgcctccccgagcagtgatcgacgaatgcctcgcgggtgcgtcggacgatgtgcgtgccgcgttgccccatgtgagtgtggcacaatgttttatggggggacgggggtagagaaaggcggcacagtctaaaacaccggtggccaattcaatcccatacaaaatcaatgcatctgcaacacaaccacaaggttgagtcgctgaaacgtgccgtgtcccggaaacggcgcagtgcggacaatctcagcggcatcaatgtccatcggtttcagcaaccgacaaaacagcaacagcagaaacggcatccgaccgttgccgaccaaaaaactgattttgcaatggttc

SEQ ID NO: 11164 - DNA, 1199 bp, Heterodera glycines
gacaaatccatgcatttgccaatggatgaaagagtgccaatgcgaaagaagcgatgggaagcgatgattcatggcaatgccatgccaatccgccggtggaccattcattcatttcttcacccaaactcagctgtatttgtttctcatttgtcagtgttttctccttctcctccttctctccctgtttgtctttttgtccccctcttccttttcctcctcttttatttcacttttcttttctcctcttatccttaaattaatgttccttctgttatttaatcttttggaaattaattaattttcttttctttgacacggaagactctctttgtctttctctctctctttctctctctctctctttatctctctctccctctctctctctctctttctctctctcttttcttttttttcgttcgcttttcacagatgtttttattctgtccgttattcattcgattattaaattgtcagttcaaattccctagggcaatgttttgctatatttaccagtgttccaagtcaaaagtcttacagtttaattaattaattaagcaaaagtcagtcgatggatggaacataagtcgaatcattgaaaaaacaaacaaacaaaaacaatcaaatggaaatgaaaataaaaacaaatagccaagggaatgccatttgaaaagaggacgaacaaatgccatcccaaaaggggggggggggtgggcgtcgaatatgcttttcttgcaatccgatgcttctccgaatctctgtcccaataaaaattatgctaaatttcaatggcattctcttttatggcatttccctctgctgagaagggcggcactgatttaagcaacagcacaaacattcattttggtgtgcccgacattcattcttttcgtcatttgtcctcctcctcccattgctttggcatccgttcgtttgtctgtcattttcgttaaatattacctccctttttttgctaattttgataagctaattattatccttttcgatattttttcatttttttgtcattgcctttttttaatgatttagccttgtaaaaccctaaaaatgatgccgattcttcgcttgacaaatgggcgagggagtgagtacgttttgtttgaaatccttgcagcactcattatacaataattatccgctttttttcctgtcgctgatattacttcgctactggacgt

SEQ ID NO: 11165 - DNA, 2527 bp, Heterodera glycines
tttaatttcagcaaatttttcactatttgcttatcctcctaccgtttctttagcaaatatttctctgatttcacttctaaaatgcatttgtttcggcttaataattctcgcgaaaatttatgtgctttaaacgatggcatttttgacagtgatttacgactttttctcgttggattcattggttcctccgtttccattgtgagaattaattgttggctatcatttggccaatgttttttcccaggcgtcgattttgcagaattcgcttctcttttatgttttttccacttcccgcaaattgcggcgacaaaactacgtgaatccggtgggcactgttcaatcaacgcatccctttaacaaatttttctattttgtttaattttccgttgggttactattattagagcttggaattttgaaaaattccggacccgatcgggaccaaaattcgagaaaactgcctctgctagaccggatttcgagattaaaatccatttttttgggatctcggtccgggtgcatcctttaaaatacacccgggtcccgaaccgtccggcctcaattaattgtagtcaaaagggggaggggcgtgtttgtcagcacattaaattttaatttctggatgtttcgccaattattgacctctcttttttcaaggtgttgttggcctttttcgacattttcgtctctctcatttatttgctcatttcgcctgtccatttcgtcgctcatcgcctccgttccccctttttggcctccttttggtcgtggcatgttcgggttttctactgccttcaggcatttccgcttttaaacattttcaaaattcaaaatcattggcaccgtttgctttcgcttcagcacttcgcgctgaccgtgtgcaactttctgctggttgtggccagtttggagcggtttttggccaatggtcccctccagtcccaagtcctttggccaattagcaaatttaattgacttggccatttcaagatgtgtgtgctggtgctgatcgtgcgcaacaaatcttgcgtgatcatttccattctcgcctttgcttttgtgttgaaagcaacactttacttcgaaattgaatttcttccgctgccgaactgctcgaatttgacggacatcagtttggactttgagcaaaggtgggacatgcattctgatcactttggctttctgaattgattcattcaccgatcatttgctgtttctccgttttagcgttgtttccgtttgggtgacggaaagtggcggactttttcaaatctttcgcttttgggcccgaaacattcttacggtcattctcccattcgtcgttctcgcctattgcaactgcaaaattgtgcaaaaactgcgcagacgccgtcggctgactttggggggtggggagagaaagtaaaagttaggaaagtgagcaaaattcaggggaatattctgagtcggtgataattagccaaacaaacgaagttggccaagggaatgagcagcagacgacgaggagggcagagacacaactgacaaggagcccaaggacactgatcatcacgcagagaaacagcgaaaagtgagtgagcattgacagacggacagataaaatggccaattaacgatcagagaattaaaggaaccctacactccgaataatgccaaaggacacaacggcatcgaatgggaaaggcatgctggagccgaaggcaattgcgagaagcaatcagcagaaggaacagcaagcagacagaagaagagacgaaaagccaaagagggagagagagaaaaggcagaagtgagagagcagagagacaataaaaacagagagagagagagagtgtgtgtgaaagagagagagagagaaaggggggagagagtgagacagagaggggggggcgagagagagagaaagagagagaccaaaatgaattaaaacttggaaaaacattaaaagcaaaattatcatagcttgaaattggagacaacagaacgaatcagcttgaattatttaatgaaaactccggtagcgggtgataaaccaaaggaaatggccgaaataatcgaagcaaaacgatcggcgaagaatagcacggggacggcgcccatcacaaacaatttcggagttcgggtggcaacgcgaacgctggtcatggtgggaagaagcgaacaattaattagggggtcattaagagcaattagtgaaggtggtcggctgctatttgatctccaattcgatgagcacttttctcaacatttgggaattttttgacgcacagtttttgcggcataaaaatctgcgcatttatttgacagtttcggacgttgcggcattggtcggttttcagggcattttctggattaaacttgtttattgtcgtcagttgaccatttgtggctgtgcccttcggctgcccatttacgtatgcaacgaccggcgaattcgaagggccatttgcagggcgatcattcgctttcgcttttgctgttcgaaagcgaagcccgaagaaattgtgcggggcgaagaagccgaaca

SEQ ID NO: 11166 - DNA, 1859 bp, Heterodera glycines
cagagagagagagagagagagaaattggaacgaaaaaccgacagacactccccggggacatttggccaatgactgagtcggcatgggaatagtttcttcagtgggagcgatctttccgcttcgtttcacggaagaaagagcactaatcagcattagtcctcataaatcacttcatcatctgtccagcaacagcaaaagtcccactcattccaacgacggacggattagtcattagtcgtcgctctcaaagatcacaccgcccccccccccctctccccatttttgcctgttgtccttttaatttgtcattaattacataattactctcttaaatggccactccgctcctcaccattgatgcctgttagtcaatccttcgtctgtccgtctcctccaattcgtttgccattggcaaataaccctatttttgtgccctgatcacactgtatcagcttcccattagctaattgtgtccacaaaaatgttcggtcgtcgttggatttgggacagttctaagccgacgtgagttgccttcgttcgttgggtgcttctctctgctgatcagttctgtcaggaatcagttggaatgggctcctccgatgcgaattatcgccgtgatcactttgctcgcctccactttggatctgatggcggactttctgctctgcagcagattggccgagtaccttcacaacttccaggtttctgtttccctttgtgccctttgcccatttcgactttctttgccctttccgacggaattcgcccgttattgcgccctcggctatttctttttcaccggtgtttccattctcgtgtacgtcttcgaaatggtcgacgtgtgtctgacgcttaaatacgacgaggagaatgttttcttcgcgcgaatggccaagtcaatggttttggtgctggaagaggttagctttggttggtggacagggcagcgcatttctggccaatttccaaccgattggtctctttttgccggtttttggtgccactgttttcaaatggttgctgatcaatcgcttgttcggtttcattttgcttccctcggcaggtgccgttgcccgccctgctttaccttctgttcacttccgagccgcgtctgtccctggctaatccgatgcatatcgcctcgtggatcaaactgatcactctcagctgggccatagtcaaatttgccaagctccgtttcttctggccactgctccctttcaatccgaaggtgcttcttccaaccccccccccttttctgttttcccttttttttagcatgacaaacgcgaaaacattcggcgatgtttccatctgaacctttacagaatgacaatgatcgtcgtcaacgctttccatctgttggccattttcattgtgattaacaatttggtggtgtcgcggaggggcggaaggtcaatccaagcgcaaagttcgctttgaatgaacgcccttttccgtccgtttttgtttatttggcgatgagttgacaacaatttgtccaaattaatttttgttaaaaaattcgtaatttttaataaataaaaattgtttccttgccaaaaacactgacaatgagtaaaatgaaggccattttaatccaaaatgtttaaaatagaaggttgcgttttaaatttatgagataagaatttaattttattttttattcgtccgtcgtttattttgtttatttatttttacccgcgtcaaacgaagaaatcacaatgattagcgaattggtgccattttatgctgcttaacactacgtcaaattgaacattcgcttcaaattatccccaatttcctccacgttcattccgtccaattgtaatgattcaacctgaaaaatgaccgattca

SEQ ID NO: 11167 - DNA, 4699 bp, Heterodera glycines
  unsure (1)..(4699): unsure at all n locations
tggtttgggatgcgtttggcagccacaagagcgagagaacgacgaaggtggtgaagggattgggagtggaaacagtttttatccctggcggctgcaccaaattcatccaggtaccaaagcatccttctcaatgaaattcacttttcttccctaggctcccgatgtctcgtggaacaagccgttcaaggagcgaattcggcatttctacaacacttggatgtccaatgatgcagaaaaagagttcacaccggcaggcaacccgaaggcaccagcgcttcacatggcacttgactggatccaccgatcgtggcaggaaatttcgtgatcatcaaatcattcgagggtcagtttaaaaaataaaaatgcctacgaaagacgcagaaacttttaagtctgtgggttgactacgccattggacggaacaggagacgaaaaaattgcttgtttcaagccggaaggagcaattggactgattgggatcaaatttttgcgcgactttagagcaaatgagacgatgaaagatggacgaaatgatcaggaggacgccggcctatctgttgatgatgatgtagagttgtatgcagtcggagatgatgatgaatttttcgtttgttaagtttttttatttactgttgatttggttttgttttttgaaaaaaattggtgccaaacaatttcttaaaattctatttatatcccatgggggataaatagagactgggggattatttttcgaactcctcagaaaggggggggataattggagactgcgaaattaatagagactgggctataattagagcaaatacggtaagtctgtttgacaaaaccaacctgaacaatttaaaaatttcctatacatattaacattataataattctcttggaagcgtgtttttccaacaaaaactttttggaacgtgaaaaaaagaaattttgggggtttgggtggtgcttatcactgtcggtggtggaaaattggtaatttttgacatttaacagatttttactaaaagtttgcaatttttaggtcaagttttgaaaagtttaaggaaattttgggctgattgtgccaataagctaaaaatggccattttgaggatttttccaaaaaatcagcaaattttcacaaaaaaatatcccgaatgcaaatttaaatataatttttttcttataaataaataatttttataatgaataaatatggcataaaattaggaaacaaattcataaaataaacattgatattatttcaattatttaaaaatgcaagaaaaatatcaattttcatcaaaaataaattaaataattaaactttcttaaagtaaaagaaataataagtgtaatttcatttataataatgtcaacttatttaatttttaattattatttttttcaataaaattttatatttttcgtttgattaatttacttttgtattttttcatgtattaatattttttattatgtgtcattcaaacattgttcatagattttgcacttcacatttaaaaatttggaaattgattgatcgttctattttgaaataataaatgaataaagaaaaaaaatattacaattaattaacaagttcactaaaaaacaatttcattattatatttttgaattaatatcaaattaattatagctatagttggctcttatgagtttctctttgtcaataataatttcaattttttggcatttattataaaattttgttcgggcggtcctcccctctgctgaatggttgagccaatggcgccgcgccttaagtacaatatggtctaaaattttactttatgattgttgaattgaattataaaatttaattacttacattatattataattatatttttccgaaaaaaatagataatagtcagtatattataaattagatttatcaaaaaggattattgagtaaaaaaaaattaaattaatttgttaaatttataaaaataattgtcttaaatacttttagtttgctatcttttttggttttattttttaaattaatcttttatttttttattgataatacaaaagtattaatctgattctttttgagtcagtattcctttttgtaattcattgctttaatattcaagttttacattaaaatcttttttttttttgtataaagacccaaaacatagtttttagggaattatcataatatcaattacgtgaaataaaaagatataatattattttttcttttattatttttatataaggcttaattgaattatgtaaactcattcgaaaattaaatttactaaattttttatgtaaaaagattataattagtttaatttgtatttttttccgtttttcaattgaaaatatttaattttatcgtttttttttttgttttacttcttttctcatttctcgtagatgttccgttttaggagtcaagtctacttcgcttcatacatttaatatatttatgtttaatagatatttataatttaaaaccaatcgatcattcaatttccgctacttttttgtcattattttagaattttgctaaatattttaatcctttttagattgaataaaatcattgttaaaaaacaaaattaaaaattaaaaatttaagcttcaaaaaaattaattttaaacgaaccgaaaaaatttctaaaattaacataacctttaaaacagatttaaaaaaattcaaataataaacattttctataattcaattattcaataaattctttaaaaaattaataataactgacaccctcttgtataatttgtgtaatgcataaattactaataatattaataaatatttttgtttttaatagataatttgaagaaattagtttttttatgctgatgacaatatttttaaattgatgttaaattatattatgcccatgaaaacgatgaccattcaaatcagttggataaagcaattgaggctttggaaaaatggtcaaaaataaatgggttagaaatttcaactgaaaaatgttttgttctttatttagggaaaaataatatgaaaaaagaatattttaataactcaaaaaaagatttcagaatcggataatgttcgtgacctaggcattataattgactcgaaacttaatttttcaggacatattaacaaaattgtacgaaacgcttatcttagagttttccagattttaagagtcttaaaaaccagggaaataaagactctaacagcagcttataaaacttttgtccgacctcaattagaatacgctaccgaagtgtggaacccaaatttaaaaaaggacattgacaaaattgaacgggttcaaaaatttttcacaagaaaagcatttagaaaatgtggtttattgtacaaaaaatataaggaaagactaaaaatcactgatttacacaaattagaagaaagaagaaaaatcaatgatttaacaacagcttttaaaataattaaagggttcaccagcctagaggctgagcaaaatttctttttctcagaaaggcccaggaggcctttacttttacgggtaaagcgccacacggccaaaactcaaaataatttttttcataggatagtaagaaactggaataaccttccagtggtagcggtgcaaattaataaggcaaaggaattcaggggtttactaaaagcaatgagttctgagtaggattttccatgttgccatatttacactatattttaatcacctgtgaatttttaacatttgatttatttttattcatttttattacggtattcattttgtattttttatttgatcacttttatttgtttgtttttggcaccatataagagcactaatgtgcctttggtttgctcgataaattaaattaaattaatatttttattattatttttttttaatttgcataaataaacctactttattttgaaaaattttaatttcaacaattcaaaaatttttgttgaatgattaatttttaaatagggtcggatttttatattttaaaaattcatagagactttcgtagtaggtgagtaggaagataaaaataccagaaaaaagtaataaaagcttttctgaaccataaaacatgtgaaggaattacttttgaaaaaatttaaatgaaattatgaaaaagaataaatttacgaaccgaataaatgttgcaatgaaaatgaatgagtcttaaaaactgattaaaaaacttcataaataaacacccataaattctttaaaatgatacattatgagaatgattattgatctaatttatttgatgaataatttataattatttaaatatattttctatttaattaatgaagtaagtttttttttaataattatgctgatgaaaataattttttataattatttaaattataacttatttttcaattaatctatttttgttcctattcaaataataacgcaaatattttgttttatttattttcacttcttgcgctcagctgtttaatatctttcaacagttgcactcaattgctttattttttgtgttattttgatttataatttttctattcattttcattatttgagcattagtgctttttaggattgagaataataatataagaattatttattanattgaaagttttcatttgaatttaattntgttgacaaagaacccacnaataatcatcagnttgggcgtttttgtatttaaatttttgtttgtgctattttactttagt

SEQ ID NO: 11168 - DNA, 1726 bp, Heterodera glycines
  unsure (1)..(1726): unsure at all n locations
taaatatgtgttcatattttacnaaaaagcagtcttgaatgtcgtcgaaatttgtggtaattccatggctatagccccgaccaattgcgctggaattttgccatgaggcttattttttgtgctggtttcgaatttacaggcgcccatgcaattggagcgcattaaattttttgtcgatttttcttcaatacccaccttaaacgataagcatttcctcgcacaccgctctatttgctctgttttaaacaacaaaattttcccaagcattcatacctactttcttaattgcactgggatcacatctaaacgactatgctaaaacggggaactaaactgtattaatatttttaacaaattgcagcccttttcgcctaccctgttaagagaaatcttaatttcactaataatttctcaattttcttctataacagattaactcttctatggtgagtactacaatgtacgagtactttgattatcgatttttttcaatccatattttcggacccccccccccccgccccatacctattggatgatctttgatcccttcaaccgaaacctattggatggacttgtgcgcgagaatttaattaatttaaatttaaattaattatttaaatatttttgtgcgcgactttttccgataaattgtggaaaatcaaaaacatggtcgcggtctcgaaccgttgagagtggaagcgaggagcttaaccacttggccacaggggcagttgaaaggtatgggataattgttgactttatgatgaaaattccgaaaaattgtgaaaaatcaaaaacatggtagtggactcgaaccgttgagagtggaagcgaggagcttaaccacttggccacagggtgagttgaaaggaatgggataattgttgactaaatggtgaaaaattttcccctttgcttcaccacaagcgctgcggaggcgggcgtgtggcggcgagagaccaaacttttttttaataacaggaattaagttttattataaacaataatttattatttttaaacagttaaatgtttaaaaatttgtctttaacaaaaaaaattccaataacaattaaaattataccaaattcttataagaaaaaaataatgcattgtaaaaaaagtaagttacactactttgattgaaaaaatattggtggttgtctttgaatatttttcatttcttcaatcatggtttccgcttcgcttggggatatatgacctctcctcttgaggaatttaattattatgaaccaacagagtagaaaaacagggaaggcaaatgcataatgtgaaaggagcaaaagagtgtcattagtctcatctgatgaacgtaacacctcaattccttctttcgtcgtgttattcatttttctcaaatataattttgagctttatttataaatttacccaagcttcgagtcggagacaatgtgtcgattataatcaatcataatcatttggtcnnattctccgacacccctcatccccactcctccctttggaattggtgaatcaaatgtggccctaatactggttgtaccgcttctcaacagctcaaatccacagctatcgtctaaggttgaattcaaagagatgacaaaaaaggcccatccatttttgaattgattcattgaaacgtcaaatgaacgttctgaattagccatgcccaacgcttcatacatctccacgaatgctcttacatagtaattctttgaaaaat

SEQ ID NO: 11169 - DNA, 2131 bp, Heterodera glycines
ggtagagaagtgtcattagacaagctcccaagccatccgctggagagcttctttgcccgtcggattcgtgaggcccaactcatcatcattgatgagatcaccatgcttcacaacacggtgattgaggtcatcgaccgagtgtgcaaagagatggcaattcgccagcacaaggatctcctcttcggagggaaaacagtcattttcagcggtgacttcaaacagtcgctgccggtcgtgcctcatgaaggcttaaccgctcaggtgacagcctgttttcaaacatctccattgtttggtcaattcaccacgatgaaattgaccatcaaccagagattgggcaaaggtcagcaagcgtacttgcaaatgtgccgccaaattgggctcggagaaaccggagagcacttctggattcctcggcagttcctcgttaagagcaaggaagagctgatagactatgtctatcctaacttccaacaactccttggcaatgacaaggagctgctcaatcgtttgattctcgctccgcacattgacacgtgcgacgaagtcaacgacatcatgatggcgaatgtgccaggtcatatgcgggaatacttgtccacggataagccccttgacgaccgcccactggacatcgatgagatcgagtccgaagtggctgcgttgaaccggcgcacagactcgggcatgcccccacacagtctccggcttaaagtcggatgcgtcgtcgtccttcttatcaataaaagtgataaggaaggactgatcaatggcacccgcatagttctggaagaacttggcgatgatcgcctcattggtcgtgttatcaatagcaatgctattggcggccaagtgaagttctttcttgaaagaacacgaaatgtctatgaagacaaatcgcctggcggcataaaatatgagcgtttgcagttcccaataaagcctgcattcgctatgaccattcaaaaaggtcagggccaaacaatccacactgtcggcattgatcttgaaagggaagtattttcccacggtcaattgtacacggccttttcacgggctacggacggaaacaatgtccgtgttcatgctcccaaccgggatgttgacgcccaaggccaggccaaagtgcttaatattgtagctactaatatgctcaagttacaataaatagctatagtccagagcagttgggcacatggtttttggagagatgccaatcccattcccatctgcactatgttgggtgcgaaaatggtgagaagcttggatccgggacatggaccggtcagccctctttagggcctacaggtgaattgccatttagcgctcaacccaataacgtgccaacgcctggactaagggagggaggagggccatgacgtgcaacgttagggcacttccggtttgagtaccggggactgatttgtcacttttgtttgcatttgaaggcccctaactttttttgtaaaactcgaatcaaaaagtgcccgctgaaagggcactccgcctaagggtcctctacaaggtggtattttttaaaaatttttttgagcaaacccctggcctgcaaaaaatggcaactgaagcgtgctcaaaaagtacacttcagtaccaggtgaataccgcgccagggtttgatctgagcggggggtggtcagcgaacttattgtagagctttcaaagctcgattttttgaaattttaaaatttcgaaaattttcaaaatttttcgagttaggcctaaaaaacggttttcgggtttttgaattttaggattttttaacgatttttcccagagaaacggagaccacttccaaaacatagtttttcgagctctatcgactggtatttttttcggaaaaatttcgatttttttccggaaatagaaaaaaattttggcctgagcgggacatttgagtcccgggcccataactcgtcaggcgtcggttttagacaaaaaatgccttagagcaaaattgtagagctttttaagctctatctaatggtatactatatgtagggaaattttcaaaaattttcgagctaggccccctagaaattttcaaaaattttttttgggttgaaaaagagggagaaaaatatttttctggggtaaattagggtcctgagca

SEQ ID NO: 11170 - DNA, 2071 bp, Heterodera glycines
  unsure (1)..(2071): unsure at all n locations
catccactcgttcactctcatttccccctatctttggggcgaaatcactctctttatcccacactgccacataggcacaagggggaagagtgccgcatttatcacaaaatggaattttattgcatgatgagtcaaaaggtcattttcgtgatcagcgccataaattaccctagaatgactttttatttgaaaatttcaaggggagtgggtatcataacagaaaagtaccaattctctctcgcatcatatttacattaattttttttttgtgaaaaaaaaaattcaatttatccattaaatatgtaaagttaaattttttgatattgtttcttatagtcttttacaaaaccaacataagaaattttcaagaatttaaccatgtattcgttgtaaacagtgtactttttgatccattttgacccggactacggaactactgagtcgggtaccggctattggatttgcaaaaaagcgagtcagggtccgggtaaaccgtgtaaccgggtctggaactcggtcgggcacccggacccatgtaacccaatgcaatttttaaattttgagactgcggaaatctggatatattaataagtaaagttatttgaatgcagatttttaaatagtttgcggcctgggtgtaaacgcaggccaaaaaaaaattggaaaattatgaaattcgggccaagtaaaaaaaggatggaattgtgctgggtcatactcagaaaccaaacaaaaagagcattactcaaaaaacatcaaatggaacttttttgacaaaaaattaatcataactttgctcaagaataaccaaattgttattcttgatacagtggcggaaaaaagtcttgactcaagatgataaaatttgtagaattttaaatttcgactggaaatttagctgattattttttgtttatgtatatttatttaccccgatatatgggcctttcatataccacaaaatcatttcattccgctttatcattctcgtgaataagtctcctaatcagaccttgctcaaaaaaggggcggaaaaaagtcttgactcaaacttgaaaaaccaccttagagttcatttaaaaacctgaaataattcatgctagcttatcttttgatactgatctaaaaaggcttttacaccaacttgatcagatcactccttcatggtgatcaggaaagtcaaaaatggcttgaaattgggaaaattttagaaaaaaattcctagggggctgggaaaatttttctgaaattttttgattgggctaccagaaagagcacaaaattctctaccgaattgccttttgaatggtgggtctacgacttgtagatagaaagttatacttggattgaatttgatgacgataaaaatcactattttctaccgtatttcaaaggaaaatgatcaaaaatttgatcaattttgagttgtccaattttcaacccaagtataactttttatgtacaagccgtagccctagaggaggaagaggggcggagggagagagggaagagggcggaaaagaatgaaagaagaggaagggagtaagagaggaggaggggagaaggggtaataaagtgagaggaggaagggggtatgtgcagggttcccagatcaaaattttcaaaagcctcattttgtgtcaaaaagcctcatttttataaagtttattcaaaacacgcttaaaattttcaaatgatatatttttgagtgcatgatcaatttgagcaattttttgttagaaataagcattttgtgaaattctgagtatgaaaaatcgaagttgattttttgcggcgctttttccaaaagacttttagggaacagggggggttcggcggtgccgataggcgccgccgggaaattttttgtaatttttaatgcgatttgttaatactttttctacaaaaatgcccaaattttgtgattttctatcaatctttaagaaataaaggttttagggtccggcggtgacgataggcgccaccagtggaaaaatttagaattttgaccatatttttagcagattttcattnaaaattctaatttttgtggatttttgngaaaaaattg

SEQ ID NO: 11171 - DNA, 1874 bp, Heterodera glycines
  unsure (1)..(1874): unsure at all n locations
gcaaatgtccatttttgctgtgcggcgcaaatggcgcggcgcaaatgtcgcatcacgctctaatagtgacatntaatatatgtacaagtaatccgataaaattctgtcagatgaggatcaatcggcaaaagaatgtaatacatttttcaataaaaattaaggtagaaactctccttttttatttcatggactttacatataattttaaatgaaaatgagtgtttgtaatcatttttttgtactgcttgagggaattttcccatagattttccgattctttttatattattttttgttcaaaagtttgaaaaagatctgggtcattcattcattacataatcataaattttattggatttacgaaaatgaaaatgtgttaattttattttattttatgtaataaatcaatgatagaaactttgatcgtatgcattttcccaacatttcttaatccatttatccactgcttagtttctattatttgttattttggtctttttgttcaatttttggcttttttcccaacctttttttcttatctttcacttttgtccgaccattgccaatttagcagcaaaattttcaaaaaattatatggccataatattttgggtattatttaacgaatttaatatgagacaataattaatgataattttccatttggtagaaaaagaattgactaaattaaatataatttttttgtactataaaaaaattaaataaaattaaaacatcaatcaatcagttcactttctcataattgtgtgcttctgatgctgctgccactgaatgacaattgtttcacaaatgtcacccgataaggatgataaatgatagcagtgatgaacggattgatcacctaaaacaattttttatttttatttaatatttcaaaatattttatgagattttttaataaaatgaatttaatcatttgcaattttattgagaaaaaataaaattatcaaagatttcgaatttctacgttaatcccagatatcttaatccattttcaaacccaattatctcggttttttaaattttttgtatctaataattactgaccaatgtataaaaatttaattaaaaaaactaaattgttgtattttaaaaatataaattattaccggagaaagcatcaaaatatagtgcagaatccaagcagcaatcaccataaatcttaacagctcacagttggacaacagtgaaattgcatcaataaaattgagtcggattatgatcaaaattcggaatggaagcagactaatcgctgtccaaacagttgttgtgaaaatgaaaaccagagatcggagctgtaaaaaattaaatttaaaattgtaaatattttaaatttgtattttatcaattagtctgtttattactatttttcttatttattttattataaatgctacattaaagttttaataatttatgttgtccatattcatttaaaaaaatttttaatttaaaatatggaatttttatttgtgttattatcgaaaaaagaaattttaattgcctaactaaaacaatttaataaaaaaaatatttacaaaatcttcattaaaaaacttttaaagaaatctttttgaaaaatattttttaaaagtttactttgtgtgaaaatgctggtgccaatggtacaaaattggcatttttcactgtcctctgtgatgaagaatttgactgaatggaatctgtccgcaactgttggccccgcttatagcacatcaatcgaagcaaataacagctgaccagcagcgatgaactgatcggcaacacgcaggacaacagcacaaacattgagtagtagagagggtcataaatctaaaatttaattattgaaagataaatagaattttgtgtat

SEQ ID NO: 11172 - DNA, 1490 bp, Heterodera glycines
tcccggtcccgaaaaaaaaatcgaggtcccggtcccggcttctcaggtcccggcaagtcccggtcccggttttggcaaaaattcccggtcccgtggcactctattttgatgctctattaaaaacccaaattattaaataattgtcaaacattatgccaacttatcaaaattaatcaaaatttaaaaaatctgacgaattttcccccaaaacatcaaaaatcttcagaatttctcaaaaaaccacaaaaagcctcaaagcctcattttgaaaatttagcctcattgacctatcaaaaaaccacaaaatgaggctaaagcctcagatctgcgagccctgggtatgtagaagaagagggtaaaacgaaaaggagggaggaagaggtgaagggggttgtgaatttaaatattcgccgatttcgatttaaattaaagacttgcgcattcacttttttattttatttttttaactttcacattgctgctgatttggggtttcatcacaaaatgttcttcatcttcactctgtgctgctttcattcttctcgtctacaccatctctgatcagtagatacccggatttatagtttttaaacaaaactctttcggcattttcgcgtttattagcaaatattttgcactttttttggcaacaactattttagtaccagttttggaatttttagcaactataaatccgctctctctctctgatcagtcatggcgccagcgaaggcgaaagcgttggatgcctttgtacgcgtacaagctgatcattgcgtaaccgttggatgcggtgatgctcagcgttttgttggggcccccgaggtcgtcttggcaacacaaactacgggtggtaaaagaccaacgatcactagggctaacaaaaatatgcacttaaatcggcaaatatttgcataaaatttgcatccttaatatcaaaatatgcagcaaaatgcagaaaaaaatttccaaaattagggattcaaattttgaaaaaatcccaataacatttattcttaattttcctaccaaaaacaaacaaaacacaaactaaaaacaagttttcgtgctttttaagccattaccggttcaggaaaaaaaatgcatttgcatttttgcaaactctccttatcagtactgggttttacttttacaaaaacaacaaattaaaaaagtgtgtgttttgacctaaacgtatgtataccaggggatggaaccggattccggagttccgggcctttttgggtccggaattccaattccggattctgggcggcctttccttttcggactgccgttggtgacccttcaccaaattgtgtgctgttatttaactgtggagtaaaagtggatcatcttggattgagcggtcctcccccatttttaccacgtgaataaaaaattttcgaataaaaaaacgaggctactggaaaccttccgcttcccgtttttttggagtccgctccggccaaaaattcctcttatctttt

SEQ ID NO: 11173 - DNA, 1626 bp, Heterodera glycines
  unsure (1)..(1626): unsure at all n locations
gtcctttatcaagtgatttccataattttgttacccccccccnccagcaaaggaaatgattttttgcctagtttctattttgtgttaaatctgtaaaaggggatgttaaagcgcgttgagggattaaaaatagaaaatagtttcagatctgttcggccataaacaattttatgcgccatgaacagatcaaacagctttcgcctattctcaagtgttggcagttgcaggtattctaaccgattttggtatggaattggcggaaggctgcatttaaaaaacattctcgatttgtgtcgttgtgagttggtcttttcttcgaaactcaggcttgctttttacaacttcgtaatttttttgaattcatttccatttattcacaatttaatatcagtttaaaaatattgatttttcgtttataacttaggaaaataataaataatgagtgatttttggcattttcacttatgagtgataattttaattaaaaggtgttctttcccccaaataaagctttcttttagcatggggcacaagtgaaaagtgccggagattcctgtgttatgtaaattagtttttttgggacaattccatctcgccgttttgtgcttttacaatgccatgggctgtttgccgcgtgaccatttcttcaagccgtcttcgcgtccgctgttcctgttccaatgcctttgccattttgcttacttcctgctcacccgtggggaaagagggaacgaatggcgaaggatgggcaaataaccgttgcccaccttcgtcaaaacggagatttggtcctttagcgaatagaccgtgtccaccaaactcctctccttcactacaaattggtcgccctccaactcttcggcaaataatttctcgtcctccgcaacaattaattgcggtctgacggatatttcgtgttggtccgggtaggaagctgaaaagggacgggatgaatgcacaaaatcgaacaaacacaacgccaaacttcacaaaacaatcacaatcgaaaaatgttccaaaaaatcactaaaaaaatgttctaaaattttttacttggaatttttatataaaaatttggtctagtcggttttatgcgtcccatgccatattatgcgtcccatgacagattagctaaaggcaatatacaaaaaattatactcggaaaaattgaatttggtattttttcattgtaatttctttttttaatgccagtatttgctcttttcttgcatttataaaatctcgagacttttgtctttcgcttggtaccaagaatatgggtattgaccaagtaagaaaaaagttatggcctaagaaactgggtatggtcattcatgggacgcataaaaccgactagaaccaaaaattttttataatttgtaagattttttctttaaattttattatttttttaatttctttagcaaaattatgtctctgcgaaattttggggtgcacccccttacgcacccgacaaagggagggggggggggtaaagaaaaagattaattgtaatctatgattccaacataatttgagtcttgtttttttctctcaggttcatgtacagtcactgtgtaatttctctgtctcgcactacgaaaggggtgagacagacaaatagaa

SEQ ID NO: 11174 - DNA, 1122 bp, Heterodera glycines
aaaaacgaagaccaaaaaaagcaaccggccaaaatcatttccaaatggtgattcagccgtatattcacaagttctgtcgtaacattccgtgcaccatcagcggagtcgacaatcttatcatgccccacttcttccttaatttcaaaacccatatggttgttgttggttttttttgcttatgatatcttctgtatcggacttttgggcatttaaatccctccccgcccccctcacaaatgctgctgtctgctgttgttcgtcgctttgactcattgtcagatggattccctcgcattttttcatcgcatcccaaatttgcttctgttcgtctctcccaatggtccgtagtgttaatttcgttcccttttctgacggtttctttcttattaaaaatgttcgaccagtggttccgaagatgcggtgattcccatctcccaacagcttttagctttgaattaggacacttacccgacagttcatccatttgtatttcattgtttgaatttctcctccgaattgaaagatttttcgtctcaaattggtttctcaatgcgtttttatccgttgctgaacaatgctccaccagcaaaagtgttcgtccaaaaatggccacacatcttcaccaatttgggtttcggtgtccgtccgttcgctgttttaagccccagccccctcccttctcccacctgtccacttcagtcccttgttttttgtccgtttcggcaacggttactttgccgacgaaaaggaacgggccaagcgaccgctccaaatctctgccaaaatgctcctccaatccctcactttgcataaagtaaagctgcgcttccctttgtcttcgaatgcgttcgcattcggactaaatttactaattccgaaagaagctcaaaattctcacataaaagtcggcatagactaatgaagctctgtaaaggttgcctttgtcgggatgtccttcctaaaaaattgattaaataaattgggattgaaatgttcgaatggagtgagataaatttgctatgtaaagtacaaagcccagatttcctttctcccgactttttttttaaaatagtttggaaaaataaaatcaccaaccaggggtatttctttcaatttcctgca

SEQ ID NO: 11175 - DNA, 1814 bp, Heterodera glycines
  unsure (1)..(1814): unsure at all n locations
ccagccaatttttccgtccagcgacccttcccaccagaaataacctcgttattcaatgaacatttgtttctcacttaccatccgccgtccaatttttgtgttactgatatcacattattcttgtcgaaagaaagctaaaaacaaattccggttaaataaaatatgtaaacagcaaacttcgtcgttgttgcgtcccttaaagctatgctttgcaatgaccaacaaagggttgcgagctgaaaattcgtgaggatcacttgcattgttatattcattgttagtcgatggttcagttgttaagcatgaatcctttttcatcaagaatatgaaaatgaagtaatattaatgtaaagccatgcgcatgcgtaggatcgaatgatgatggctcttataagggacgaaattgtgttaggattaccgttcattagtccaagccctttctgatttatgtaaatattttgtcatttcgtttttaaaacatttttagttttcgtttgtaacttcgcgagttttattggttttttctttaaatcacattttgaacatttgtaggatttacctagtctattgaaatgtcataaatatgtaatactgttacacaagtttccgtaaaaatataaaaaaagtttcaaaaatttcttcgtactttagcagataaaacactgtataaaaagtggccccataattattgaggaaaaacatttatatacatatactaattgtagtaatcatacccattaatataatcttacaaattttagtatacgtattacgctgaacaaccctttttaatcgaaagctttgacttgacatgactgatgcgaaaactgagtattttgtttttaacttcattaattcatttttaataatttttaatttctttaagccaaaaagataatgtgaagagtgaagttggagatgtgcccaatggcgggacgtcattcactgcacagcttagcgacgatttcactatccaagtaaattgggattgggctgtgtgttcactttcattgtggaaatacaaaaatttggagtttcttttcttcagcctttgaaattaaaaattcataagcacttgcctttttaaaattaattttatattttgagtcgaatacgaatgaggtggtcgattcattcgacaacatgcaactcaaggacacattgctgcgtggcatttactcattcggttttgagaaaccatccgcaattcaacaacgtgcaattgttccatgttgttcaggttttttagattcgctttttcattcattccgattcttcttgaatcttccttggctggcccttttttattttttatttttagggcgtgatgtgatcgcgcaagcccaatctggaaccggaaaaacggcaactttctctatttccgttcttcaacgtgtcgatgagaatgcaccggatgttcaggcacttgtgatggcaccaactcgagagttggcccaacaggcaatcccacccactcttcccattggcactctctggacttacttgtctccgtttgacagattcttcttgttatgcgtgcacttggcgagtatatgggggtcaagtttcacacttgcatcggcgggacgagtgtgcgcgacgaccagcgcaaattggaggggagcgttcaagtgatcgttggaacaccgggacgagtcaatgacatgatcctgcgcggagcactcagttagagctttttgtaanatataaatttgcattttctattnagagactgacaaaataaaaatgtttgtgcttgacgaggctgatgaatggtgtctcgcgggtcaaagaccaaatttatgaagttttta

SEQ ID NO: 11176 - DNA, 5066 bp, Heterodera glycines
ttttcttgaaattttcttataaagaaattttgtaagatttttttcttgaaaaaattctgtttgaaaaattttttaaaaatttctagcggcagattttgtcccggcgtgattttggggtgcacccattcaaaatttggattccttgtgcttccccatctttttccttccctttttaccctgcactgttctgttgttgaattgtacgtccaccgtgtaaatgccaacttcgtggggtctgaacgaaatttcggtgctgtcgtcgggccttcggtttgtgttgtgtttgaccttcgcaccggacgggtcatggacatcgacctgaaaacaaagtgaaatttaaaaagattactttaattgcattgctttttaaaatgtaattttggaaatttgtcactttcagcataaattgtcacggactgacctttagcccacccgaatgattgttcgggtcgaaaatcatcgatgcttgctgaccacgctcaatggcataatcttaaaattattaataaaaattaacttttaaaaaaattaattttaaaatgattccgttaaaaatgccggaataaaaatgggattttgatttttatggcgattgtcttaaccaagtgccgctccgtaaacacacggctccttctgctcttcgaccaccagcgaaaagggtgagcctgaaattatatgtttaaatttaagctacgatcatttcaaaccatgcacagcaaagccggccaatttgagtgccaatttgtgaggcccaagacgagtgggcacaaaagtgaacgactcatcgccggatgaattcagtacctgaaaaaaacagcaaaaataatcaggtgattttaaagcaattgtcgaccctgtccagcttgatgggctcgttctgagggtctgtcaattcaactgccaatgggccggtgccagcaccttttcgactgactaaaaataaaaaattaaaatgaattaagcaaaatttctattataattgttgaaaaaaaaattttaaacttgccaacaaaattggccatcgttcgtattgtgaatggtctgtccgcaccgtgcacttggactcttcgtgggtccacaacttcgcaatggaacggtgagccgggcacgggctgatcgccgaacatcacttcgatggaatgggcacctaaaaaatattgaaaataaattcgaaaaaataaaatgataaaataaatattataaaattgtataataaatataaaataaatttaccacaaatttccggagtgaactcaacccaataactgtcgtcctgctgtttgtagcaacggaccggcaaaggactgccctgggggtctaaaaattgggcaaaattaattgcataatgaaaggcattaattaatacaaaattaattggtatagaattaattaaattaaaagggacaaaagacaattgcaaaagcaattaaaaaaagttaaattaacacaaaaaaaaagcaattagctgaacaaaatggcaaagcaaacaacaaagaaattgttgtgtagttagttaattagtaaagtaattaattaattaattgaaataacatcagaattaaatgattttcccaaaatgtaaatctattgaaaatctctatagatttgaagttttggttttctaaattttatttttcctaaatcgcactcgtcacgacgacgtccaaatcgcgcgacgcgctcgttgtgcccggcgacacttcaaagcgtgccgttctgccgcgttgtgctttggccaaagcgtcgccgcgtgccaacggcgccccctcagcaccaacaacgcattcgtagggacattctgccaaagaaatgaaaaatttaatagtaattcagggtttaattgatcgtttcacctggtaacatcatgccatcaatcaaaattgtctaaaattaataaattgttttattatttccaaatatattttgctaaaattaaataaaaaattttatattcaatttaatcataatataagtattaaaaaaatatttattgactttttaaaataaattttattatgtgcttttattttttaatgttctttttcatttcttcgaaatatatattttttttaaataattgttttttattttttcaaaaatcaccaaaaagtgtagcccgggaagtcgcggagtgaatgacacggcgttcacaccgcgtttctgccgtttcattgtgcacttcacctgaaaaggagggaaaattaatttatttgagttaatttacaaaattaaagtgcgataaataaaatggaggtcattaagggaaatttgaaataaaattcaatttcaagaaaaattttaaaaatagaaactttttcaatgaataaatttaaaagtaaaaatggtttttattaatgttattttgatttcttctaggttgtataaaggaaattaagaaaattatgaagaaattaattgacgagagcatgaccaattgtcaaaccaattcatttaacaaaggctattttcattgggcaaaaatgaaaaaaattaacggaaagcatattaaaaattattaccatttattacaagggaaatgaaaatttggtccttttataaaattaaaagaatataaattttaattttttgacattattgtacaattttaaatccattccattaatggattgattatatgaacgtttaaaaatgctaataattttcataattacaaattgctaaccaattcgccgctttcgtgttgcacaccgacggatgcccattggccgccggaattggaccaatccacttgaaaaagaggggacagcaaacattgggcacaacaattcaatattatgggggggggggtgaacaatgggacagcgaatggaagaatattttgtattttggagagaggggagaaaaaagggaaaaaggaaaaataaattaaaaaaacaaaataaattacttaaatttatatttcaaaattttacatgaaaaattctgctcaacgccggcattggcattccgaagaccaaccaatcggacggcggacaaatccaacacggagacgggcagcggagaaccgcaaatgtggcgggagccatcgcggatgagcacctaaaattgggggaaaaaattaaataaataaaaataaataaataccaataatttgtgtaatatcagtgagaagaaatgaatgcaatttttcacaaaattgagcatggagaatttaaatcgaagaacaaaaatcaaataacgtaaatatgttaatttggatattttttttatttttgaaaaaattaatctaataaatcaaaaataaaaatagaataatttcttcatattgttttagcaaaaagttgtgcgtgattaatattaatttgaaacatcggaacggaaaaaatagaaaaaatgtcagaattatcagccattcatcgaaaacattcaaatgggggggggggggggatgatttgttctcctcaaactgattaaaaaattaggaaaatggaaatatatggtaatataatttaaaaattttcatttgtattaatatccttaaaaataccaaaaagtaatttataaaatactaaaagtgattctaagcttattgaagtaatttttatggcattttgtgcctatttcatactttaagaaaatttttttttcccaaaaaataatcattttataaattttatttacatatttggggttttgtacatatttttgacagccctatgcattagaaatgctaaatatgcgcataaaatatgccctaaaaacccgaaaatgcccacaattatgcatttattctcggaaaccccaaaatatgcttttatatgcgctaaaaattaatcaaatcaaaaaatttttaacgtagaaatgccttttttgaacagttttcttcataacacatgcgcagaaaaatatatgtaagtccatacaatttatatcactggtaattacttacccggtgacggccttcgctggccggttgccattctgcgcgcagtgtgccgtctgcgtaagtgcgcgaaacgaccgcgatttcgttgccggatggttctgaaatgaaaaaataaattaattaattaaatattaaacgcttaatttaccaaatatttggactttgactctgtccacgggcccttcaccggttgtttccaatttcagctgtgccacatgctcaacaagaaggggctccggaaacagcaccagtcgcatcggttcatcagcagctggcgcctgtactgcttcaaaaacgcgttcctccaccgctgcaccgtcacgaaacagagtgaactttaaaggggacaaagatatacataattggcaatcaataaatgctaatttatttggccattattttcacctgatagcgttggggcttggccaatggcctaaaagtgcacacaatccgttggtgctgatgttgctgttcttcggccgacgtcattccgttctcgtcaactgctgacacttccaccggcaccgccgtttgtcctccgcctgacggcgtcattttggtgccgtctccaatggccaaacattcggcacggagttgggccggacgaattgggcaaggcaaaagcactgcaaaaatgcatttaataaattaattaattgaaaacaaaaatggcataccatcaaaggaatagtcatggccacagattgggccttgacgcgccgatgccaaataattgctggtggccacacagcgacacaccaccggacagatcgccaaagatcggccgttgatttgaatgtcaatgtgatgatcgcctagggaaaaataaaaatgcaattaaattaaattattttaatatgaaattttactttaaaattaaaattcgataaattttaattgcttttttaaattgttttaaaaaaattacagtaatttatttgcactgtattattaaataaatatttattccgttcttattaaatcaaaacttaatcaatgtttaccgggctgtgttggtgtgaaaccgatgtcgaagcttcccccgtcgacgcgttccttctgcacgggcacacgccgttggtcgggccctttgtatccgaattcaaattggcgccaaaattgttgccgtggctttctttcagtattattttttttgtgc

SEQ ID NO: 11177 - DNA, 1071 bp, Heterodera glycines
cccagtctctaattatccccccttttctgaggaggttgcaatataatcacccatgggctataattagagcatatacggtaattgggattatttttgtatgcatttttgaaaagaggaacaaccataaacaagaaagaaaaatggcaaaaatgtgaggaggatcaataacatgtaaattgaaaataatgtgaaaagggattaaattcgaattaaaatcaatctaatggttgtgcaaacgaattgaaatgccaaaaagggaatgataaaagcataaggctgatgtgtgaaaaataagggaatggtgctgttttttaatctgttaaaaaatgctctaattcagtgataaaaaaagaattgcaaacaacaaattacaattattttatttttttgccatttttcgatttagagcaactttctattaattttacgttacaaatcccaaatattttcgagtataaaatttgccaatacagtacacccatttgatgaaaccaccaaaagaccaattgtgtgactctatttttgttctttttttaactattccaaatttgggagcctctgaaccttctcccctttccgtccgccgtttgttggaccaaaaaaaagaacagaaaacgaaaatgttcagtggggacagaggccaaaattacaacacacgcacagccgctaatgattgatatcagtgatcactgattctgtgattttcaatatcaaaataatttatttttaaaacataattttcatgtatttttggacggagttgtctcgttaaactcaaaaaaccaccaaatgagaaatttttgacagaaaagttttcataactttgcttaaactatattttgtactcgtgagatcattcgatagccttaagtaagtaagtgttcctttactctataaaatttccaaaaatttcgttaactttctgaaaagttatggccagaaaaactcaaaatccagttgttttttttttttgaaatttattttttaccgttaaaaatgatatgaacaaataaaaattaaagttgtttatgagcaaattaaaagcaaaattttttattttgatggtttttt

SEQ ID NO: 11178 - DNA, 1641 bp, Heterodera glycines
  unsure (1)..(1641): unsure at all n locations
cccccccccccctcgtcagcccctttacagccataaattttaatttaatttatttggttaaatatcttttttaaatattttttcaaattccagttgaaatgttaaacggcacttaccatttgtggtcgcgaccatttgcaagtgcattctgtcgtttgacgagctgagaattttttaaatgccaaaatttcaaaaacttaattttgctaatgataaaatggcactaaaatttggggcaaaatatattgattaactgatccatacagtgataattctttaactgtttggaaatgggagaactgagaagcagcgccactacatcataattaaatctttttaaatttgggcattaaaaataaaacaataagaatgatttagtaaaataatattgcattttttttaatataatattttaaaatattttcacttaattctgatcaatcacaaatcctcccccctccccccggaatactcactttatttgaagaaatgagtgcctcataaaggggtgagttcgttttatgtcgatcagcatcaatttgattatttaattgtataaaatcagttcttgacgatgacgaaggaatttggccaatctcagggccaaatgattgcacaattgaaaagctaaaagtgcgcaaaatgagaatgcatttttaaacataattttcaatttaattggtaaataaaaaaattaatttaaatacaagaaaatatatttataaaaagaaaatacaaaaataaattcccttaagcataattgcatcagtgtttcggtacttgttcggtttgtaccacataaaaatttttctttgtttttaatgataaaaatgtgttttccatggatattcggggtcgctgatctgatcacgaatatgacatccagttcgaccaatttaaaccccggaccggaattcgaatgtgaaattctgacttttttaaagttgagtttttccccgaaaaaggggggggggggtggtggcaccatataaccgcaaaagagggctacacatgtccgtttttggatggggccgcaaatttttggggcactttcttagtatcattcatgtattatttgccaattttaaaattcgaaaaccattttaaagtaaaggactggcaaatttagaaacaacataaattattaatcttttgaaatgaaaacgtgattattaattgaatggaaaaataatttcattttaaaataaagtaaattataattaaattaaaatattattttacacaatattttttaaaattaatatttaacaaataacaaataacctttttaattattttatttattaagaacattttttttatttaaaacaaaagatattataaaagacagaaattattttgattaattgaagatgaattaattttaaatttgaatgaatgccccttttttctttctctgtctgttttttgtggccctttccttctcctcctccccttttctctgctctctttgctttttctgtgaggcggcgaacaaaaaaacgacgtgccattttacaaagcattttacaaatttcaaaaatgcttctgtttattctttaaatatttagttttttaaaaacggaatgtgttccatttgagcatcacacttaaagcccanaatttaataaattttcaaga

SEQ ID NO: 11179 - DNA, 1939 bp, Heterodera glycines
tctctccttttcacaaatctcttcccattcacaaaagggacaaagtgattaaaatgaaattcattttattttaccagaggcaagaaataattgagaaaaattggtagtaattaattaatgacacacacaacaaattaattaattagacaacgaaatttgaagatgctttttggctgggacttgtctttctctgctggtggtatgatctgtcagcagagcaaacattggacagatttccgagtgtaccttttttctataagaatttttatgtcaatagacaaaagaatttgagagaggaaaatttcgaaattttatttttattttttatttcaaaatcaaattttggaatattgttgtgctttttcatgagctatattatttgttgggtgtaatttttaggatttgtcctatgttatttttgagttcctagggcctgctgaaaagtatttatgtttggctttcgaattttttgggtttattttcgagtaaaatttaaaatattttaacatttaaattttttagtctaaaagcaaaaaagctttattcacgaaaaaaatatataattcaatatttgatgtcttaaattagataattcgaaattttttttgatttaggagcttttcacaattgccgaaatatagaagaagaatatacaataaaatatggaaaaaatctggaaataaaaatgcatctttgaaggttcaaccgaagataaaaattgtatttatttgatttttaggtcgaaataaagtgcaaaaaatatggaaatgcatgcaaatcaggccttattaattgtttttattttttcatgattaaactctgcttcatgttttagtgacttttccctccgtcgtatcattggcattttctctctgctcactctttttgttgacaatttgaacacagcacgaaatttcagcgaccggcttcaaaatattaaaatgtatcttttttttttgaaaagtgaatgttcttaataatttgttagaattaaaaaaaacaaaaattttgtaaagaatttaaaaatctaataaataaaaagcatttataaatatctgaaatattctcggcttaagattaagcatcggtttggtgtaagccgagattaaatttcaatctttttaaacggtaaggaattaaaacagagaagaaaatatctcacaaacatccacaacatttgaatttaaatttgcaaggtgccctgggtcctttttcaattcgggtcgtccctcgacttgattaattgaaataggacttgatgacaaatcgagtgaggcactcaatttaattggaacagaattttcgagttgcaaaaaacgattgatcaagtcgaggatttgatcagaattgaaacagcccctggccaaaactgtcccactgttttgattgtccgtcctacgccccccccccttccctccacaaaatgccgtttcccaattctgtttcaacttgccaggtcatcaccattttggcaactctttttctccgtctgctgctctttcttcggctgttccgtgccatccatcgatggattcattgtgccgaaatttaaagaaaataaaaagaaaaattttaattctcaggaaaataattggaggattgattaattgatgggatccaatggttggcagctgcttgcttggccggccattcatccgtttggccaatgcttcagcaaatatttcgtgctctttgtgtgtcccattgggtgctcagcggcagaagacgccgatcaatcaatagcattaatcgacaaaccgaatttacaaaaataaccctcaaattcaaattcgggaatttctcactcccgagtaggaattattttgtctatcttttaacagaattattgatgttctcaggtgaagtaatgatccaattggctgcaattcgccttatataggaatccatattttttttcctgggatatgaaacgcctgaa

SEQ ID NO: 11180 - DNA, 150 bp, Heterodera glycines
gaatgggggagaagagaagggggagaggggaagagagagggggaatgggggagaagagaagggggagaggggaagagagagggggaatgggggagaagagaagggggagaggggaagagagagggggaatggggggagaagagaaggggg

SEQ ID NO: 11181 - DNA, 5268 bp, Heterodera glycines
cgctcggagaagcggccaaaactgacagtttcctgcgccatcagttggacattttggaggatgtgcagcggaggggcagcaaacagccgatcactttgcttttgcaacgatctgttggttcaaaatattttgaaaacgaaataattggctgttattttaaggattacatgtgccatgttaacggggaaagtggcgaatatgagctaaaacaggtgaacgaacgaaccaatgggagggcaaaatgggcatttattgcgcatgataatatggcaaattaattcattatttgccaattatttttaaggtcgaagtgaacattgggccaattgggggcaatgtaagtgcgcaagcagttcgccaagtgcacggacgcgtgttttccaaattgggactgtccgaggacaatttgcccgagaatcgtgcaagcactgccattggcgaggcattggtcaaggcgtggtcagtcagtgccaaattggccgaccaatttggcgtcaattaactttatgtaataaattattagcatttccgttgtttcagggaactgttcgaagatcccagcgccgtcgttgtgataatgtccatcaaaaataaccatggccacttcgcacttcggcacatccaatacgaaattgagcaggcatcggcctacaaaatcaaagtgattcggctcacattagcagaatgtgatgaaaagttcgttagtttacacagttttattgttaattggtctgaaaataaaatcattcgagagtctcgacgtaatttaatttatttatcaaaaaaaacattttatttttagacttattttggatcccaacgattcttcgctgcgtttcaatggcagaaaagtggcggttgtctaccaaaggacctatctgtccgagaaggattggccaactgagaagcactgggacattcgacgcaaaattgaacggtcgactgccattgtgaggaaattgttaaattaaatttgaattaaattagaattatgttgttttttactttaattaattttagttcttttgaaagaatggaggaggaaattaattaatggatttgaaattattaatggattgaaatttttaaaattaaggattaaaattcattaatagatttgaaattaattaatggatttgaaattaattaatggatttgaaattaattgatggatttgtgccaatggcaattttcatttaggtgacattcaatgtgaacattcatctcgcgggttccaagaaagtccaacaggtaatttattataacaaattaagcgccaaatcccctccgttcgacttttcagactttggcattgcccggaatgttggaacaattcttgccggacgtcgacgaaggaatgatcagttcaatccgaaagacattcgccgaccttttggcattggacaaagaggacgaagcgacagaagcagtgattagggtaaaagcaaagtgaaagttaaggacacgcacttgagaaatggggaagaaattcaccaaattcaataaaatcgaccattttggacaaaatgacaaaagtctttagaaatcacataaaaatatctatgtttagggtagttttttgagagattttaattgcgaagtaattagaaattactaaaaatgaaaaatttaagaaagccattgaaaaccctgaaaattacgtgttgaaaacgaaccgagacggaggcggaaacaatttctttggagaagaaattgccaaaaaactgagcggtttgccgctggacgaacgctcgtcgatgattttgatggaaaaattgaaaccgatggaagtgaaggtaattgggaggcaatggctaactcaacaatggcatttcgacatttgctataataaaggcaattttcacatattttcagaatttcccaatacgacggttaagggaccacaccgtgcgaaatatggtcagttgccaacaattatcaatggtttgggaccggggctgggctagcccaaacttcggcttctaaaacttcggggttttgagcttcggcttctgatatagtataaatttcagggaaaaacataactcctaaagattgagttttcagtgttaaatacaccccccccccctaatgatgggctcaagaactgagaaagatagtttttaatttttttttcaaaaattattccctttttgaggaaagtttcaaaggaaaattaaccttttttcctctaaaaatctaaagaaaaggaaattcaaaaaaatgaagaacattttataatgttaaaaaaaattaacggtgcgggaggaaacggcgtaagaaatttgggggggggggatgtattgcacccttttggagcaatgaagctcctgctctcccggtcaaattttaattgatactttcgaatgttcatccgggtgcaggattttgtaagtgagttaaatgcttatcaatccaaaaatataaaacataaaattcaatttaaaactgtacattttgcaggagaggggggggggagtaaataggtttaattcttaccaaatttatttaatttctttgttttcccgctttttagagcagtgaattgggcatcgtcggttactttttgggcaatggccaaacgatggcaacgattgccaatgttcagcaggggcatttgctgcgcacgaaattcgccgagtccaacgaaggcggcgttgggttgggcgtcgctgtgcacgactcgccctttttgttctgatgagaagcgaagcgaaagcatttcgaaaacaaaaatttagcaaaatatattttaaatgtttattatttatttatttactttttattttattattgcaaacattggaaaaatattatttatttcgacaaaatgaactaaaaagcaaattggcactttttggctcttcgtcttgtttttctaattgttccgattggacttgaataataccggtacctttcaccaaaggtaaggaattttatctattattattattagtaaaagttggaattatgcggctcaaaaaattcataattaatgactttggaagatcaaaattgatcaaaaagggctgcttataatcagttaatggaaattaaatacaaacttgttttgcgatcactttcttcagtcattaattttgatgagtttctttgttaatttctaaatctaaggcattttaaataaattttttaggtataaattacaataattagaattacagcattaattggggaaaacaaatattgtaataccgtatccccaaagacccactaaatctgctctggtgagtttaattttgccaaaacaaatcaaatggagaaaagcgaaaaatggcacaatgccaaaaagttacggtattaacattggagagacattcactttatcgtatcgtacacacacccaaagaaacatgcagttgtaggatggatgcctttcctccacattttgctaattttgttctgagtcgtcagtttgtgttaccatgcgtttttctttcatccgtcgattttggaaccaaattttgatttgctgaaaattttttctcccagttttttacaaatgccaattttgggaattttccgttttgatgccgcaccccttttgaaaaaataacgacaaaatgcgcccaataaacttaataaattaactgtctaaaagctgttacgaaattcatacctccaaaataaacctattaatatcgacgctctttgttgttgtccttttttaatggggttcggcgtaaaacgaaaaattacccaaatttttaccgtttcattcagtgaaagttcgtgcgctaattggtagcgccggggccgtgaaaggtatttggtctgggcaaattggcgctccaactcggccaactgatgggaggagaaagtggtgcggggacgacgcatgccacggctcaacgtttgccaatgccaaactgaaaaagagtcaatttgtgattttggaccaaagcaaattaacgaaaatgtgccgaagaattcacacaaaaaatcatttgaccgaaaaacttaaaactttggcggaatgaaaaaacaaaacaactaacttttgatgaccatttatttgattggtctcatttcattttcactcttttttctctttttgcaactcacgtgtcaatgccatcagttggtcaattgaaatttgcttctgcgaaatttgcaaagtgccatcatttaaagggggaagggttgtgccattctgctcaattggacgcggtggtggcactgagaagctgaattattggaagtacttagaattcaaaagcatagctcattaatcgccacattatttttaaaaaaccacagattttaaaatgccaaatttaaaagttttacccttttgaattgtcccattttggtgccttttcttccttcccatttattttacaatcaatttgatcagcagcagaaccaatcaaagcactgatcgaatgaaacattggcaagagaaaaagcaaatgccaaaatgggaggacaaagggaaaaggaaatgccaacgaatgaatgcctttctttctttctttgtgttactgtggcaccccttttcccctcccgccacctcaaaaagtgccaaattgcgctcgccaacattttaatccatcattcgtccctcctccctcacattttggcggaattctttcaaattttcccctgggaacagtgcgagaggaggagaagcgaagcattggcgaaatcggcaccctaaaaggcgctaattgaattatgcaatatgcccccgggggagaacattggcggcattcatccgcccgccaaatatcagctgccgaaggattatggccgagatgaatgggtggcattggcatggcatttcactttctttttggcaattccaaagggaattttgtcattgaacattttggtcaatcagccggtaaaattacggtaattttgcggaaattcactttttcaaacaaaatatttcacccgaataaatgaaaaaggcacaacaaatgcatttttaaaccaggtaaaaattctcattttaaaacccatattaaaggtttaattttcttacttattccttttgtacaggacaaaacgtcggagtgatcagacaggacgaaacttatcaaagtaattaaatatcgtaattaggcagacaaaaaaaaatcctcatttgattgagaaccattatttacaatattcaaaattaagtgttattaaacatttaatattattctcggttttagcatataaaaaaacccactcaagctttaatttaattattcttcagaagattttttcaacatttatataacattttgtcacttttgg

SEQ ID NO: 11182 - DNA, 842 bp, Heterodera glycines
tgattattagagaccggaattttgaaatggccgggaccgggacttggaaaatcgaccgggccgggatcccgccgggaccgggattcagttacggcatattcctatctgaaagcgcatattgtaaccaaatgacctactttcccttagtcctcaaattcttggaatttgaattcagaaacttatacaggagaatcaaaaaaatatatatttttgagaatttttttgtttaaccccttgcttaaatggcaaattttgctggcgaaatgaccaatttttgcttgggtagcgaaatgcctacggcacatggaaatgcgatgaaagggacgaaagaatgagaggaaagagagagagaggaggaggaggggggggggtcacaattaaaatacgattaaaaaaagttgggataaatatttattatataagggaaagatgaggaatttaataaattaatttaaaaatgcacatttatttcaatgggataaatttggaagggatatttttgaaatgagacggagccaatgaatggacagagagagggggggggagggggcggggcgggggatttaacggagagcacaaagtccattaaaaagcaaaaaaagagcccgccaattttcgctaattttattttgcacaatttctgttcatttaaattttgcagatggacaaacaaaagaaacgaacgaccgaaaattatgggaagggtgagagagaagagagggacagcagcagagaagaaaaggacgaagagagcggaggaagagcgaaaaagagaatagggcagagaaaattggcaaatcccagcggaaaaacagacattttgaaaattaattgacacaaaa

SEQ ID NO: 11183 - DNA, 2479 bp, Heterodera glycines
  unsure (1)..(2479): unsure at all n locations
gctttttaaaattcaaaaacttctagtgaaaatgcatccttttaggtctttcgccctcccgtcgttgcggtggcttccgcggctgcgtcctttccgtcccttccgccggcctttgtccctacgagtcggcccatctcgcccaaacgtacacttccctctgcattttgctcattctcggcgatgacttttcccgtttggatcgtcgcgccattctccgcgcagtcgccgattcgcaaggggcggatggaaggtggcatttttggaaggggcgggggtttggtatggacaaaaaaaagcaacggaacttcgaaagaataatttttaaataaaaatgtttggtttcaaattccattttccgttttcagcttttttgacggcgatcgaagcaatgaaaacgatatgcgctttctatattgtgcctgtgctatttgttaccttctcgacgatttctcgccaattagtccgtcccaaattaccctttggaattttctcatccaatttcccgatttgttcagacattccctctctgttggactttgtccgtcgttccgtcagttacgacggtggcattgcccaagggccgtccctcgaaagccatggcgggtccactttctgtgccgtctccgccctgttgctgaccggccacctttgggacggctccgtgttggacagtgccaaaatggaacggctgaaaaagtgggcactgatgaagcaggaggagggcttccacggccgaaccaataaattggacgactcgtgctacgctttttgggtgggcgctacactttcggttcgttcgaactcattcattatcatcaaattaaattacatacattttgaaggagcgctgctggccatcccaccttttccccctttccctgaaataccgaaatttgaatttagctatggatacatccttaacttaattaaatttaaaaaaaaccctggtgggtctaaaaatgtcttcgtctgttgcgtgggtggaggcgttacaaataaataaaaatttgcatgattctgctgctactatacttttatgtttattgtgcattttcagatgctcaacgccctccccttggtggattggcccgttttgcgttcttttctgctccgtgttcaggacgcgaccatcggcggctttcgccgggacgacgactcggcccactccgaccttttgcacacgtatttctcattggctgcgctcggaattttcggcgaaccgcccattcgtccgctgttcgttccgctgaacatttccgcacggacctacgaacattggcaacggattcgacgccaatggcacgacggaacggcgacgggggaggaaaagcaggaaagaagaaaatgaacgggggaaaagcggcgccaaagaccgaccgattgactgctttgttttcacccgaatgtcttaagattgagtccaatttctactgacttctcagagcagatcatttatttttatttgctcatatcattctttaattgtcagttccctttgggttttgattgttttttaccacaattttattgtatatgctttatccgaattgcgattttattatatttattgttaaattctttttatttcatttattcctctctttcgcgtaagttttgacaagcttcaacgtatgtaattcgtagacacataaaaatgttctaaatgcattcgtccttttttcaattaaagctggtacacacaaaaccactccccaattgttggacctcgatttcctggccaaaaatccagacctgtattcaggtcgaactttagtcatttgccgtattttcatttacattttatcaattcggttgggtaaaggtgcaacattctctgatcaaaagggtcatgtcactttacatcctttctttcttaaaatgattattcttttgcttctcccacttcgccgccgtccctttcactcctttttctgcgcctgctcatttgccatttcttgctgcctttgcgcatctgaaaatgccggacatttttatttatttttggtcattattttcccttgcgccactaattcccttaattagggccatttcccttcgcttggccattccccccgcctccccaattttcccactgaccccttccgaagcgaacgaatgtttgtgcccgctttccgaaccgcacaaatgtttgtgcccttttgccgaatcggacgaacgtttgcgctcgcttcgccttcgcttcctccgccaattcgtcctcaatggcactatcattttgatcgtaaatgggccgctccaatggcacatttgcagggatcacgaaataggctggggggagggtttggcaccaacgaaatcggtggttgccatggccggtcgacaccaatggcatgnggatggatcatctggacggagggggggggggaatggatcgactgtgccaatgccatgctcaatttcgggatttttctcccttttgaatctggccctttggtttctttttggacttccccccccc

SEQ ID NO: 11184 - DNA, 2716 bp, Heterodera glycines
  unsure (1)..(2716): unsure at all n locations
gttttgattgttttttaccacaattttattgtatatgctcccccgcgccccgcgattttattatatttatcgttaaattcccccctaccacatttattcctctctttcgcgtaagttttgaccagcttcaatgtatgtaattcgtagacacataaaaatgttctaaatgcattcgtccttttttcaattaaagctggtacacacaaaaccactccccaattgttggacctcgatttcctggccaaaaatccagacctgtattcaggtcgaactttagtcatttgccgtattttcatttacattttatcaattcggttgggtaaaggtgcaacattctctgatcaaaagggtcatgtcacttttcatcctttcttctttcaaatgattattcttttgcttctcccacttcgccgccgtccctttcactcctttttctgcgcctgctcatttgccatttcttgctgcctttgcgcatctgaaaatgccggacatttttatttatttttgtatttttggtcatcattttcccttgcgccactaattcccttaattagggccatttcccttcccttcgcttggccattccccccgcctccctttgcctccccaattttcccactgaccccttccgaagcgaacgaatgtttgtgcccgctttccgaaccgcacaaatgtttgtgcccttttgccgaatcggacgaacgtttgcgctcgcttcgccttcgcttcctccgccaattcgtcctcaatggcactatcattttgatcgtaaatgggccgctccaatggcacatttgcagggatcacgaaataggctgggggagggtttggcaccaacgaaatcggtggttgccatggccggtcgaacaccaatggcatggggatggaatcatctggaacggagggggggggggatgagtcggactgtgccaatgccatgctcaatttcggcatttttctcccttttgaatctgcccttttggtttctttttgtacttcccccccccgccttcccttcgctttatttgtcctccatttccttctctgtgatatcattatccattcctcctcatcctctcctttctcacctttttgttggattaatgggctggcttctgtcatcccgaattgttggacggcgaacaaaattggcaaaagaaacagaaacaatttgtgtccaagtgagaaaggaacgcagacggaggaggaggaagagaagaacattgtcattctgctgatgaaggattttaagtgatcggagagaatgatcagtgaatgatggggagagaatggcaaatgatcggagtgcctaaggaagaggaggaggaagaggggaattgactgaatgagggggcggggcatcaattacccattcaaatggaaatggaaatgagacaaaaatgtacaggaaagtgccttcttgactaatgtcctcataatgagcagggcaaattcagtggcattggcacttaaaagagttggcaaaaacgacgcgtgggatcaaagaacagtgccgagggggcaaattagggaaattagcaaaacgaaaagaaagattgatgcgcgaccgatgaatcatttagtaaataaaaggaaatccatgtaaaagaagcacatcgaaacagattggcccatgtgtccaaatggccaattttggcacttttgttacgatttatagggggaatttattccaattttagcaacacgaaaaggaagaggagaagcactttcacgaggagcacagtccctaattgacaattttctgaatccctttagagaattattaataatcaaatttggcacatcggaaaaagcgccgaaaatggagaaaatttgtgggattttattgtgaattaccaatgtgtatattaaaataaagcatagaaaccagggctgggcgtaatgacggattacggaaattatgggggtttttggacccctgtcattacggattacggaataccgtaactgagaaaatcgctgtaattacggattacgaatttcgtaattgaagatccagttacgcccagccctgatagaaacccccgggttcccggctaaattgtgcacaatttcccgggttttgaaaagctcaggtcccggttcccggtcccgggttttgaaaagctcaggtcccggtcccggtagggcaaccgggaaccgggaaaaacaagcactggtaagaatggggtctgagtgaaaaattagtaaagaaaattggagtcaaagggaaaaataaaaaataataattaatatattctttaaaagtaacactgcccaagtgtgcaaatggcttaatggctagtctccttgactttcccttcttctttccctggttcaatccctctacagaaattaaattattttgaattttctttttgtatactcgtgggtttcctataaagaaaatatgattccttatagttttttttttaaatgatacatattttatcattttttaaatgaaaatcctaccaattgagcttaataatcgcaaaaaccaacctttttttgttgaaaatctgttaacaaattgcacccaaatttttaaaatttcccccggcggcgcctatcggcaccgccggaccccttctttcccaaaagttttgaaaaagcgctccgaaaaaaagtgatgtgaaaatcaaatctgaatttctattaatattcgatgatttagtccanaaaatgattaattgtttgaaataattgaagaaaa

SEQ ID NO: 11185 - DNA, 233 bp, Heterodera glycines
aattaatgcaatatttatttgacgtttatttgagctgaagcgccattcctccccctgcttcacatagtcatttaccgctgtccgtggtccgtttgtccatttatccaatttaattttgcaaatttgcacctttcgcgcgggtggtgcgttggtagaaccatccgtccgtccatcgtttcgtcattggtccttaatagcctgttttgatcatctgctgatcactctctgtccga

SEQ ID NO: 11186 - DNA, 4650 bp, Heterodera glycines
  unsure (1)..(4650): unsure at all n locations
tcaaagctaaactttgctaacaaaaaaatgaacaaaagctacaattatagtagttatttacaaaagtctttcatcttttttttgcttaatttttcaatatttctttatgtaagtatttttaaaattaatttaaaaatatttttattcaaattcattatcagtaaatttttccagctaaatttacttttcttcctttattgtttttcttattttttaagaatttggtgtaaaataatttaaaatttcaatataagtccctatttttctcttgcgttgcctaacgacagaccaacaccgctggcctatgatttttcataatttttaaattaaagacaaaaaattagttatttttttgttaatctgttcacaaattcccccccggaggtgtctgtcagcaccactagatcacaacattcctttaaaaatttcaggatctagtcaaaaaaaaagaaacgacaaaataccagaagaacgtgaatgcagatttattccgcccattggtggacattcgtgacaaaattttgtatttggcaatcaaatattttgggatcgacaaaacggaaaatgaaggaaattgttcaatggtgcagaagtcgaacagcttgaatcttaagaaacgcatcaatgatgaattcaaaaaattaattcgaaccacaagcgacaaagtttaatatatataaatagtcaatcattaaaaaaaatattaactaaaaaatatggagattttacaagagggttcggcggggggggggggtggattcaaattcgattttttagggagagatttttttttttgtgtaaaaatgtcattcttattgggttaaggggggttttatttttctttttttcagaaatcccgaattagatgtgttttgcaaagatttatagctgttttttgccaaaggtccggcggtgacattaggcaccggcgggaaaattttggaaattttaacacaatttgttaagaaattatctaaatcttcaaaattgaaatttttttttgttatttgtatttcgggcaggggctttagcccatcagctgctccccatcctaagcccttgagatttgattgccctaattcccattgaatataatagtcggattcttaattaactttgaaatagcattttacattttaaatccttagaaacaagaacagcccagcgaaatgaagaagcttgtacagaaagcaatgtgtgtgtatgcttcaattgagggcgcaatgcaaaaaagtgagaaggaaaaattgaacaaaatgctaaacaaagaaaaagaagcgaacaaaaacaaagaaaatattcaacgaattggtgaagaagtggaccaagaagttgaagcgagaagaaaggcactgatcaaacaggaaaatgtgagagaatatcacattgatcagctgctgcttgatcaacaacacgctgtagctgatcaccagccgcaacagcaaccgttggcggtgatggagcaaggcgaatcatcggcaattaaagaaattgttgctgttggagaagacggagcagggaaaaaggtaaaagaattcaacaacttgttcagttgagctatagaagcgcgtcgttgagcagcggaagtgttggctaaaggacctttttgggcgtaggagccaattggagttggggacaaattactgaagcttcggggttctccatatattcattcccgaaggaaaggccccaaggggtgattaggcccagggatcccatccaactcttgatggataaatagggaagactaaactgataacagcttgaatggcgaacattaaatgcatgtgtgaaatgaaatgtgatcgataatgattggtcgcaaaaggagcggataaacaaagatatgaaattctaaataagtaaaaattctagggcttcggcaagtataaaacaagaattgaggccctcacttaaacgttcaaaacttttaattttgaaaagattaaaattaaatattcttctgcttatttttaattccatgaagccaaattaagacttttgcgagtttttaagggtatttttgtgaattttccagtcagattgaaagaattgtaaggaaaaaaccaaatgctagcatgagtgattataaacgagagattaagcgcagacaatgccaataaacacatgtgcttcggggtgtaatctttaaaattcgaaaaactgtgattttttaaatacggacttcaaataaataaattgttctgaaaaatgattgaagaattattattaggctaatcaagcactgatcactgaacaacagcaaactgaaaatgttcaggcccaagccgaacaaaattcaaatggaaagaagaaattacatcgtcggaatacgttaaaagatatttttgaggaaacgaaaagtgatgaacacattgttgatcagaatttgagcagtaaacgatcggactcaatcaaaagcgaagcgattagccaagaattgaccaaggaaacgaacaagccagaaaatgagagatccaattcattgcgtatgaaattagtagaaaccgtggacacaaaatgctaaaaagcatatgacactagttcgactgaaagatcaaatcgcgcattgatcagtgatcacttttctatacctatgtaatcccttttcattatgtaaactctttttctagtgatcatagtagtgttctttttgtagtaaacttgttgcagtattatatttggattagataacaggactaaaaatgatctgccgtcctttattgcaaatgaagcatcatcagttggcataaaaatgtatgccgatgatgttaaattatattatgcccatgaaaatgatgataaaacaaatcatttagaataattaattggactaaagaacaagtttaatttgtgtcaaatcattccatataaatgcattatttgtcgtcattattttattctgcacattttatttttttgaatgtcgctatttaaataatccatttcaatttaaactttaatagctaattaatttatttttaatgtttcagttaaaatgaacaagatcctttttttatttattgctctttttgttgtgcaaattattgccgcttatgagccaagttgcaaagtttgtgatcaaaaaaataataaattaacaaattttagtgccccgaaaatgaggagccgggccaaaagagttgcaacggatatgagccaagttgtgacaatccgaagccggagatttgcactgcgcgcttttgtgactgttcatgcgactgtgtgaaggaattgttccgcgacaaaacgaaaaaatgtgtgcccaaatgtccgtattgaggaaggaaattgatactaacgatgtaatgatatcaaattatttaatcattcattaatctaataaatagcaattatttaaaaattgaaaagaattagaatttgttagttttcaataaatccgttaattatgtgtgtaaaagtcaacacaaagcatttcttagtgaatcattaagcaacaattgtaatttgattcaaaaatgattcattccctggaccatatgaacgcatttcactatcacaatttatcagtattttgctgaattttttgagaaaatttgctgatttatgctgatttttagaaaaaactcaccaaaaatggccatttctatgtaaaactgttaccgaaaagttttcaaaatttacttaaaatttactaattttttcatataaattagctcaaaatcgcaaaaattgatcatttttggtcaactctaattaacaatggcattaaaatttttcttagcggcgcctgccgatgccgccggccccctgttcccaaaaaaaagtttaggaaacgcgtgccgtaaaaaacattttttttttgtgtttttatatttggaataaaattttccaaaatggtgattttgaaaattttcatctagcagccctgtttaaatattcatttcgaaaatccatcgttttagctatttttcgacaaaatatgatattattttgctagaaaatttccagaatgggcctaaaagggggtgaaaatatttgtgctcatttgtgagtactaatttgttctgtaagttttggagttttaaaatttttaaatttttttggcccttgggaattttgtttaatttttgaaaatgcataactcatttctttgctgtcattttttgtgtaattttaaagaattaatgctttttatttagaatttctatcttcaaaaggaaaaaagttattccagagacttggaaaatttcgatttttcaaaaaattcataacacccttccgaataagtctttgtaaaataaaaatactaaaaaaattggcatctgtgaaaaaatgctttaatttatttataaaaagagtgttcactaactacttcatgtccaactacaaataaatatcaaaaataataataatcttctcaattcatcatctaatttcaagcaatgttatttcggttcagcattcattgggtgtgtgagccggccaatccaggcatagaaatcacactttccgagttgggcacattttgaacatggacaccttaagagattaaatggatttgattattcctttcttaattgnctttncccttgggnccgtttatgggcacatggccaatnctnatnccnnnctctgcncatttcgactctgaagacagtgactttctgaccaaactgcccactcaat

SEQ ID NO: 11187 - DNA, 1510 bp, Heterodera glycines
  unsure (1)..(1510): unsure at all n locations
gtaaattcgaggcactgaaaaacaaaatcatcgacctcgtcgacggagcctgcggcgaaatccgcgttcgcaccgcggcggataagaagaccacctacgattgcaatcacatatttgttcgattggattacgattcaaagttgagcatcaacggatacctccacgggtgggcgacgagcatcgccgaagcaatcaaagattgtgagaaatatttggtcatacaccgcgtcacggaattagagatttgccatgcgatgagttctcccgacggaaatggtcaatcacaatctcaccaaaatcagccagaaactgtccgagtgatttacacaaacgaaactggtgccattcccgaaatatccatttacaaggtaatgccaaatggtccagcaattaatcacattcccttaccattagacttcaaacgatgaactgaggcccttttctgagtgccaacatgcgcggttggccggacgcagcgctcaattgccccatcacagcattcaccaagtgaacattcagaaaaagcgttttctggccagtaaaattggaacaacttacgtgtatgaccttccgatgttatttgggaaagctgctttagacgaatggattgaattcatgaagtccgactcggaatcatacgaccggtagtgataatttatgaaaatttcatcagttttagttttttacttaagtttattcccacaacttccaaaagaaagacaacaagcaattcttaaggaggatgtcgccgcatttgcgaaaggtttcatcaaaaaaaaattaaataaaaaaagggatttagcgttcgaaatgattctacacgaggaagaaggcgaattggaggtcttacgtgacgaagaacaaatgtacaaaaggatggcccggggacgcaatgacaggggaatggtggcatgggaaatgcatctgtgcactccggatgcccccctcggacgaaaggtgatgatctgactccgtagtactatgtatgggcatcattcattaatttgggtagaccaaaattttcgcgatggcttccggggggggggaagtctgaggctgaatttgcaaggtgtaaactttgttatcacttgtttattcaatctcgtttgttatattcctctcagtttcaactttgcagttttctattttttattccatcccatcttttccagattgttttgattgccaatgacattaccttccaaatgggctctttctcaatgcgcgagcatcggttataccaaaaagttcgtgtcttttccctttgcttattacggtgcccactttaaggcaagtgaatacagtcggaagcatcaaatgccacgcatttatgtcgcagcaaattcgggcgctcgaattggttttgcatcggacgttanaaatcgcttgaaaattgtgtggaacgacgaagaaaggcccgaggacggcttcaatacctntcgatggattgtgggggagggaggaagcgacattctctccnccagtgagtcgaccttcacggatggacgca

SEQ ID NO: 11188 - DNA, 3466 bp, Heterodera glycines
gaaagagaacgacatcggagttgagaatttggtcggttcgggatttatcgccggggagacaagcgctgcctaccgcgaagtgcccacttattgcttggtgagttgttcctctctccgcttatataagccacttccctctccaggtgtccggtcgtgctgttggcattggggcgtatgtcgcacgtctgtctcaccgcatttgccaagtggaaagttcacatatcattctgactggcgcgggtgcgctcaattcagtgcttggccgtgaggtgtacacttctaacaatcagcttggtggaccgcaggtgcacttgtttttgcttcacttttatatcactcttttgattcttaagattatgttctacaacggcgtttcacattcagttgccaaaagtgatctcgacggagttaaacggtaggccgagaaggataaattgttttaaattccatttaaggatcgtccattgggtgacttatcttccctctcctcactctgatgaaaactgccagaaaatgattaatctttccccattgaccaaagacgactatgcaagacttgtaaatactcacccaaccaaaagtgcctacgacccgaggacaattttggactctgacgacgaaggattgtttgaccgggggacttttgacgaaataatgagcggttgggcgaaaacgatcattgcgggaagagcccgtctacgtggcatttccgttggagtgattgctgttgagacaaggaccgtggagtgtgaattgccagccgacccagcaacacaggactcacaagcaagattggtccaacaagctggccaagtttggtaccccgactccgctttcaaggtcggtttggtgacagccgttaaacttattgttagtttcattgtcacattttgaagacatctgaggcgataaatgactttaaccgtgaggggcttccgctgattattcttgcaaacattcgtggattcagtggcggacaaaagggtatgcacagtgttggttgcatgcagtattatttttatattttacactttagacatgttcgaaatggtgcttaagttcggtgccaacattgtcgatgcacttcagacgtacactcaaccgattgtcgtttatttgcctccgtttggcgaacttcgtggcggtgcctgggcagttcttgataccaagatcaacccaacatgcattaccatgttggccgatccgaattgtcgtggcggtgttttggaggccagcggtattgtggagatcaaatttcgcgaaaaagacctgctcattctgctgagaaaatgcgacccgaaaattaaccaattggaagaatcactcgccactgcttcggacccaacagccaaaggacaacttcaagacgaatacaaaagacgtatagaaaaacttcttccgatttgccgcgcggccgctgtcaaattcgccgacttacacgacacaacggcgagaatgctccagaaaggagcaattcatgtgagcattgggtgtcacccaatcagctttaaaggtattgcgcttttaggacgaagtgccttggcaaaatgcgcgaaattacatgcacggattgatcagtgtccattcgaccaaacttcaaatggcacgccgttatttggatgcaattggtcgcggaacaacaaacgtttcggtggatgagctcgctattggcctgcaatgggtggatgaacacctccaaaaaaccgatgtgcaagtcaggcgagaagtgaaaccagaagaacgtggcacgaataactcgtcgaagaggacgcggttcatctattttgacgagcagatttccaagtacgctgatggagatgggttccgaaaggcactggctgccattcggcaaaaatcgctgcttgagcgactcactgcgttaagcaaagaggagcgtgaccaacttatattagtcttgtccgaaaaataatttttctttaattcccgcatatataattttccgttccaattttgtacctttgtattagttattactgtttttaaaattttattgtgacttaagaattctaagacattcccttttggtgtaatcctcctaacatatcttgcctttgacttaagcccaatgagtttatattttttgtcccaatggctgctataaatatttctgattgtggtgaataaaagactttgtttatgaacgaattttacttcatttaattcgacaagtgctagaagaaatgtgccgtaattagacgatttgtacaatttaaaaaggaaattgtacttgtgtaaaaccaaagtcagattcgtaattagtgtatttttttacctcggaaaacgcttttgaaattttacggttttttccaccggaccaacaattctgcaacactgggttattttgacatatggtgttttttctccatgggcaaatcccgacaaatatggtactctcgataagataaattgatttgggggtgtgggaactaaatatgtgaatttttcataatgtttgtttgcttaatgggcttaactgcccaaatgtgaggctttccttttttacttctcattatatcataaaattaaaaaatggaaagaaaagcccaaatccatggacattaatcaaatgataggtgaggtttaagctattcttctattttccctgattatttttttggcgtggaaatttatgtttattccggtgttttttttatcaatgataaatgacttaattaaataataactatatggtttttgttaataaattaacttccattcattcattcatttgaccgcttcaacagcgtttgtcggttccaagcgcagtgtctccaatttgacgaactgttccatgtcgtagataacgcgcaacattagcgagcagctcggacacgtcgccacatcttctcctgactcgagttgctctcgcgtaatttcgaatctgaatcattcggggcatttgtttgccatttgatccgtctctcacctgtcgccacacggacatgggaagtgatacagctgaaactcatcatcaaattcaaagtcttcaatttccacttcgtcgtgaaacaccaaagattctgtgacacttttttccatttcctacaatttaaaaggtattatcaaaggaaaattgtgaataaacagaaaacaacgaaagtaatacgatgaaacgaatgacaaaaaaggggaaaaagaaattctgtaggatatttctgtgacaacaaaatacacaacaataattttgtcaggactaaacgaaagttcatcacaacgaaaagccaaatttgaaaaagcgttgccttattaatatgccctcaaattttctttgtccgacaaatgcgaggaatcgctagtaaattcctgtctaaattttccggtgccatcccccgtctcgacgaatttgctgactgtcgcttggccgacataattccaatcaccgaccaacacttcgtgaagagcaccttttttattgaaattttaaaaatctgaaatattgtggcat

SEQ ID NO: 11189 - DNA, 665 bp, Heterodera glycines
cgtgatcagcgcatttttttaccatagaaaaagtgatttggtaagaaattttttaaattttatttttcgtcgggacaccaattccgaagcattacctgaaagcctacaagggattgacctctgcaagtccgggctcaactttgatcggaattttcctctgtgagataagaaaagtcgctgtttgcacagtccgctcaaaaggagacgcaaaaatatgatcgatttggacattcgaaaacctgttttttctattcataaaatgaattagaatatttgttacctttctgccaattctgtggcctgttttatgcctctcgacgataatggactgttatccgatttcaatttttgagggttcgcatttttttgccaattcgagtttatgttgtcttctctttcggcgtgtctgacaatccacaatgtttttaccattttggagaacccgtaattaaaagactagtgggaagctaaaattatgaattaaaagatagaataaaaaatatatagttggagaaatagatttggaagattcttataatgcctattattgtcttatttagacatttagtgcttattttccagattttcagaaaatcccttaataaaatacaataaaatatgtaatatccgaaccccagaccagaatttgaactaattgttctctt

SEQ ID NO: 11190 - DNA, 2908 bp, Heterodera glycines
ctcacttattcggtggaaaacggattcaatgtgcttcgaaaagtccttccgttcgggcttaaccgtctcgaaaggtaccgttcccaacagcaaattgaaaccaatcggggcttttgttatgttgaaagtgcacagttttggttcagtcaatccctttcggtggacgggaattgaaactgttccaaggcactccaacaatttgccgtttacatccgagattttcgggcacgaattgcaaaatcctgcctcccacaaattcagatgcttttcgatgaccaactgataaaaaacgttgcactgattagtgaagtctgcgctccaccatccatcatggcattggtctcaaaatcactgacaaaaaggcgcgttaccataacttttccgatggtatatgccacagcttcctttttactgcactcagtaccgagtttgtcaaagaagtcagtgacttcggggtcaaggtcgacttttccgaggcgcacattcaaatgaggcacttcttcttgtacaatcacacaattttgacggagaaaatttcttgatgggttatggtgcttaacatcttggttttggttgttgccaaatggatggtttaaaggaactcggttagcaccagtcgccgaaaaatttgacacaatttgcctttcgaaattttgcggtggcgaaaatggttgtcggttacgcggacagttacgcgaaatgtgtccaggctgatcacaattatagcacttcaaagaatttgggtactgacgctgaaaagtgttggccgggcgtgacgaaaaatttcgagtttgctggtttggtacgccatggctgtcatagctgtccattcgatcaacatttctcgggttggggttcgtaaaacgctttgctgctttttgggtagactccgcacgcgctgcaagtgagacgaaatgattgagattcatgccttgcgtgcgagcaagttcgaggtttaatgccagctcagggcttgccattgcgcggatcaaaaatttgatcgcgtattcatcacacaaatgttggcccaatcccacataagctctgcgtactaggccagaaatccgattcgccaatgcgtcaatcgtttcatttgccccccgctttactccaatcatcaattcgtcgaacgcatttagttgtgttgcgtcggtttcctctagttggttaagcatatcgcgacgaataagcgcgtactgaaacggctgggtcgcttttgcggcttcaaatgcacgttctgcacgcccatacactttgctctccagcgcactgatgcgctttttctcaggccattccgccgtataaacatcaaaattccttgaaaaatcgtcgaactgcgtcggtgccctcagacccattcaaatctgggtttttttccaacaccaaatgaaattctagactgtcaaaacatccaaattttgactggggttaggtgcattttgtcggggctgatgacgctgctgttcaaaaacaggctgcgcgtagctcggagccggtggaatgcgttcgttcgcataagggaaagacggtggaagcgattcaacatgttgaatgtattggcggtggatgacgctgtgttgaggcgctaacggcggtcggttcaacaatggacgctgctccacaaattcgcggttattcgaagcgcggacatttgtttgacccataatttcgccgctaatatgtctattttgaattcggttttctccaaaatgctggtgtcggtttgggtttgactctctcaactccaaagttttgcagtcccactctttcatgctccaaatttgaaaaatttcgaagtcacgcaaaccttcacgcatttgctgtccaaattccatttgtgcgtcgccgccgtgctccaaattttgtccaatttccaccgattcgtttccgttttgttgcccaaaatttggtgcgtctccgttttgagtgccattgtcgttgcgaatgttgtgtccgatgctcacgttcagaagtcggttgcgcagctcggtctccgtcatttctggctgtaaaatcaatccatgattgctgtggtgtgtcaaatttggagagatcggagagtttctatcaatttgaaacaatggcgggtcaattcggtgatttaagaatcctctgttatggctttcagttgattcttcaagggggttttgctgttggagaatggcgctatcattgttcaacacaattcccgcatttgctgcttgccgtcgcgtcaagtaggggctccgtacaaatgccattcaatttcgtcaataaaaaaaaatttcgccgatttgctgcttaacgttcagcaaaaatttgaagattttgaggcggttggcgttgcgagagtggagttcaacccgaactttccaaaccgcagtcgaatgaaagtccaatcggatccttctagtcaaagtccaaccggatctttcctttcactttccctttcgcttcttttactttggaaattcaaccgaattttccaaattccacgctttttgaaaagaaaagttcagcccgaatcttttcttccaattgaaacaattaccgtccaaccggactgataacgctcctcaaatcagttaatcctcccctttttagtctccgatctcccattaaaatgaaaccgttgagtcaaacctgttctgttggcaggagcgccatgttggaaatgatcggatttggtcgaagaattggggcttttaattgggaccgggacctttagcttttggagcgggaatttggaaaactctttatttttgagttccagtcccgttgcgggatccgcaaatttgaaatttccggtctctagtgagaacagaacatataattaattaagtaatgagaagaaaaataaaaatgcaaaatgagaacataatgccaacaataatttaaaatcacaaacaaaaggacaaatattccaaca

SEQ ID NO: 11191 - DNA, 1041 bp, Heterodera glycines
ggttttcgaattttattttttttacaaattttacttaaacattaaaatttatatgaattttataaatgataccgaattatttaattttttaaaaattggatattcattttttttttattttaaagatatctttatttttataaatttatacatttaaacttaaattaaaataatttttaatatttaatattatatcgagcatttttgttgtttattttttctctcttttaacttattaatctatttttaattctatttccttctatattttttagttatatcattacatttttatctattggtttttgattcttatgtcacaaagccacctgattttttcttaataaaatattacaaatattttttcaggtataaatttttttatctactagaaaagtttttatataaaaattttctttttttattgacttttttacattttttttttattttaagaatcaaataactgtacaaaaataatttttaatgtcttcattcaagtgatatgctgagagcgtaaatgtttcttcgattattgtgccttttattatttcttagattaaaggcatattattgaattattcttctatattcgattaaatccagatttattaagttcttgattaagatttttttggaattgcaccgaaatattatttaactgatttgtaaaaacaattaacgttaaaactttggcgacaattttcaaagtatgcaaaattaactagaaaaaacaatatttagctaatggaatcataaaaataatctaacataaaaatccctaaattgatcgtgaaaattagaaaattattgtataaataataataatttatttcaagaaaaagaataactaagaaatttaattggtttcataaataaaattattaagtcactgaaaaacctttttaaaaaaattttgatatcatatctgcacaagtttaccactatcctataagtaattcatttaagacataataataccaatgaatttaattgttggaaagctttttaacatgataaataaatttattataaataaat

SEQ ID NO: 11192 - DNA, 1201 bp, Heterodera glycines
tggttcaatccctttacagaaactaaaatattttgaattttctttttgtatactcattggtttcctatcgagaaatatgattccttatatttttcttttaacggacacatgtttatcattttttttaaagaaaatcagtataaaatgagcctattaatcccaacaatcagcattttttgttgaaactctgttaacaaattgcacacaaattttcaaaattttcctcggcggcgcctatcggcaccgccagacgcccttcttccttaaaagttttctggaaaaagcgcgccgaaaaaaagtgatgtgaaaactaaatctgaatttctattaatattcgacatttgtccaaaatgattaattgtttgaaataactgaagtaaatttgatttgaaaattttcattaatttaatttagctttaacttttggattttattaaataaaaaacaaaataaaaatttaattttgtattattttctattgaaataaattaaaattaaatttttttttgaatttttgaatttcccggttggtcccggttcccggtcccggtcccgaacaaaaatcgaggtcccggtcccggcttctcaggtcccggcaagtcccggtcccggttttgcccaaaattcccggtcccgctgcactctagtttaatgtgttgatctatgtttttataaatcttcaaaagaacccaaatttcatgaatttcttatgctctaaaacggttataatttttggtgatttaattaattttttttattgagtataagcttatttctattttttgcaaaccttcgaatatttgacttttttattattcaaaaaataatataattattagttacatattaaagaatcgaaaaaatttaaataataaatcaatgaatcaatatttttgcaaaaaaatatgcatacatttttcctaactgtggcatcaatgcaatcaatttctaaataatataatttaggcatattatgaatttttataatttcatgctttatcaaaaatattattatatactttatatctatacaacaaaaaaaaaccgcaaaaatttttttggtcaatttaaaaacttattaaaaataaggggggcggatgacttttaattaaatggtattgtataaacaaattatattaattaacttctttagaaatgattttattaattggcctttttaatttaatattcattccaaaaa

SEQ ID NO: 11193 - DNA, 3193 bp, Heterodera glycines
atttaaatcaacataaaatattgctgtcaatatgctgaactgctgaactattggaaatataatttgttatgagttctacaccattcaaaacatggatttgatcacaaataaatttttaaaagttaaaaaattttgaagaataaattatttcatgaaaaaaaatcatagacaaaagcaatgattttgaaaaaactgatgtcagattcgtaatcagcgcatttttaggctagaaaataggcttctgaaattttaaatttcttcttttttttgcagaaactacactaactttaccattgccgattaatgatattattaagaaatatttgattaatcttaggtaatattgtatgctgatcatattaatccacatggcattatcccattggtcgtaacacgaacccaaggaatttatggcatagctgcatctttaaaattcattttaaatcaacaaatttacaaatttactgtttgcgcacaaaggtttcgtcgatttcgaaaaattatcggacaaaaatcgtacataggaaatgtgcccgctgaggaagtgcgttttgataagtttattcacgaaataggcattaattattgtataataataagttttatttcaaaaaaaaaatattaatcgtccgatgggattcgaacccaaagctcttctgaagcgtggaatgctttaagcgattcgagaaacctaaaagggtcacccgtagactcagtttagagtattccatggcttaaaagtgccgtgggttcaaagtaacacaggaagtgtaacttttaaaataatacgttttgattaatttcaattaacgaaattagcattaattattgcataataataataattataatttttatttaaaaaaaaaataaagattaatcgtccgatgggattcgaacccaaagctcttctgaagcgtggaatgctttaagcgattcgagaaacctaaaagggtcacccgtagactcagtttagagtattccatggcttaaaagtgccgtgggttcaaagtaacacaggaagtgtaacttttaaaataatacgttttgattaatttcaattaacgaaattagcattaattattgcataataataataattataatttttatttaaaaaaaaaataaagattaatcgtccgatgggattcgaacccaaagcccttctgaagcgtggaatgctttaaacgatgggaaaatctataaacgacacccgtagctcagtcggttagagtattccatggctttgaagtgccgtgagttcaaatcccaccggcgggagagtaacttttattttgtataaaattattactaatttttttacgaattagtattcatacccacatgtgctaacagtcggttagagtattccatggcttagaagggccgtgggttcaagtcccattggaagtgtaacttttattttctatcgaattttattatcttttttaattaattagtttttaatcccacaaaactgtgcctatgttgagaccaagcttgatttcgctgtcatgcgttttgtttacggcttttttccaacaaatatttttacaggatatacggtgcgttttttttaataattcaattttaactatatttattatcaaatgtaaaatttttttttaataatacaagacattttttcgaatgaattcattagttttaaaaaatgaaaaattcttaaattgattaattaaaaacaataaattatttttccaataaaattttatggaaaaagaaagatgtcaatttaaataaataaaaattgagcatataacagagataaaatgcacatttttatttgatgaattgaatagaaatatgttcatttcttttaattttatttatttaaaattaaaaaattcgaattttttttaaaagaaaacttttttaggtgcttcaaatgccaaatattccatcacataaaatcagcttcagcatactaattgttgataatgaatttgctaatggaacaaaatattttttccattttcaatgtgctagccgtctaacaaacaatttttatttggaaaaaaaaatgggcgaaaaaaatgggcaaattgaatttatggacgaaatttgtgaggacaatttgtacagaattggcgtgatggtcactcaaaacacatcacttccgttacagtttcaaataaaagtaatttttgattacttaacatttggtaactgaaataaaaaataataaataaaaattgttgttttttttaattaccaaaagcaacagttcaataaatttccaattttgtcataaattttggaaaaataaaattttttaaaatttaccaatgtcattatttcattttaaatgatgctccaaataggaaaaaagcatgcttttcgaatttcgttgtcagggtacaattctggttgaaaaagttaaaaaaatattatttttttgaaaatttataagtaaaaacgaaattataattaaaaaaatgaaaatttatttaagaaaagaaaatatatcgccctacgaaaatgccctaatccgagaaacgaacgaaccgaagcgaatttgaaaataaactatgaattggtcgatttttaacgaatttcttcggtcgaattgccgagatattgacttgtgatggaaaatgcctacacaaaaagcaatgccaaaaagtgtcaaaatatttaaatctaattaatttttattttcattaatgaattaggacgtcgaattaatgagaaatccgatggggcaggaccaagcttgaaaagagaattaccacaaaatgaacaaaacgagataaaagttcccataataacgcaggatttgttagcaaacttcggcgggggtgaacaacaaaatgagcagcaaccgaatggagtaataaaaaaatatcgatttttaaaaaataattaaaattaattatttattaattatttataaaaaatttagccacgaagaaattttgttgaggctttaaatttgttgggcaattttgcgagtggtcatcaccagcaacatacagaagaagtgctgaactaaacttttaaaaaatgaattaaaaaaataaaattcaattggcgtacagtcaattacttataaaaatatttggttaaaattatttaatattagggttataaattatatggactaaaaaacaccaaatatacacataaaacatggactaaaaactgccaaaatatgtgttttaaaccctaaaaa

SEQ ID NO: 11194 - DNA, 1342 bp, Heterodera glycines
aaatttactttatttcataaaaattactcaagatggttaaaaaaattcaaaattgtataaattttttgcctttatcccacgaatatgacattcttaggggtgtattttcacccccgcgcccccccgcgggggtgaaggtcacgggggcgggggttgcgggggtctgagtcgcgggggcgggggcgggggtgaggccaaaaaacctgtcccgcccccggcgggggcgggggtgacgggggcggggctcgaaccctaatttctagtgacgaaaaatgaccgttcaaatgaaaaaattttaacgcagaaatcaggtgatgacaatagttagcgccaagaaaatttttaaaattgagctgatatttgctaacaatttttacacttcagaaaaccataaaatatcctaacggcatcataacacaaatccaaattggtcgttccaacgaaaataaacaacaacaatttttatgatcacgtcaatattccataaatttcgaacaattctcaacaatcattcacttctattgatcacttgggccgggagttattcgaagcctaaaaataaataaataaatttgaattttttgaaaatcgagacccgtccacgatgttacctaccatcataaatataaaggccaatttgattccactgatcacgaattcgccaatcgttcgcttcatcctcccattttgtccatttgctttcatctcgcacaattgggcaacggatcagcagaaaacgatcgcttttcttgatccttttcaatgccaattgttcacgagtcaattcgttggtctgatcaaatggcaaaacggagtcagcagaagacgaccaaatgacagcaatgaaatttgcagaagatgaagccgagacaaaagcctaagaggggaaaactttaaaaatattaattagtaagcacagaatttatgaacgaaaaattaacaaaattttgtcgagtttttgacttttttttcaaaatacgtgtcgataaaatagggaaaagaatattaatttgttaatggtaagcaccgctttaaatgctgcaattctcgatgacaaattcccaccatccttcatcaaccagcatctgaacacttttggcactttgttctgaagcggagtgaaaagccatttggccactgcttgtctatccgatgccgcggcactgtcatcgggcggaaattcggggaacatatcctcagcatagaaagagacaatgccaagagatggacaattgttgaacagtgacgggacgagtggacgcaaacggcgaaaaaaactattgtaaaattcgatggcaccatattttttgcgatcattgggccaatgttgcgcaaaatcaac

SEQ ID NO: 11195 - DNA, 3568 bp, Heterodera glycines
  unsure (1)..(3568): unsure at all n locations
ttttactctattgaaatgtctttgaatccgacgattttctttggcagcggattttgcggaattggcaatggtttccaatagtgattgataatttccatttgcttggtgccattctttccaaattttcgatcaatttgaatagatttcaatgtccatttgcgcgttttgaagtgttcatcgatgtaaaggtcaaatcggtgactgatcagcgcaattccaaggccaagttgagaagtcggaagcaaatcgaagacacaaagccaacagtcagcagagatgaagctgaaaaaaaggaaaacaaattttaaaatttaaatttgtgaaatgtagcattttaattttacattgctttttccattttttcctccgcttcttttctgcggtctgacattttgttggcgcaaattacaagacagtttttgacggatttaaattagcttagggaaactaaaaaagacaaattatgtgaaatcaggagattccttttgtaaaccatggtttccaacacagagttcagggagcaaagtcccaatttcttcattttactgttcccgtaaaatctttttttaccggacttttatttaaaacggacacaattattcagttggtcaatttcgtctttttgtgtgaaccaaaaaaactaattttagtctatttaaattaaacaaaaaagtgattggataatttagaaacaaaatggaggagctaaaaaagcaaagaaaataaacatttgcacggcgccgccgcctgctgattaaccaacatttgtacaaaaaaaaagtgacagtcaatgccatttttctccgtcttttatatgaatttttgaagaaaaaatggggcctaaaatattgccttgaccaccaatctgacatccgacgattcccaacccccggattcgaaaatcccaaattttcaaaaatacatttttaggtctgttcagagacatccaacccaaaattataacatttttgcaaaaccaaaatattggccccaaacaaattctgctggaaagtagtgcatttttgtttggtcggaaatgttcaagtttcaggaaatcactgaatttatcataaggggcataacacaaatccaaagtgatcagttttgaagtgttcatcgacgtaaaagtcgaaacggtggctgatcaatgcaattccgaggccaagtgataagccggaagcaaatcgaaaacacaaagccaacaatcggcggagatgaagctgaaaaaaagggaaaacaaaattaaaaattggcattttaattttacattgctttttccatctctttttccgcttcttttccgttgtctgacattttgttgagccaaataattatgacaattctcgacagatttaaaattggcttagcaaaactgagattcctttaaactatagtagagcgggaccgggccgggatatggacttaaatgccaccaaagctatgatatttttttttgtcgaaaaggtactagtcggggacgtacgagttaggttttttggctaacttttttctttggcatcaaaattcgactaatttcgatcttttcgcaattttcatgtacatataacttttttggtaattgtctgatcgcgaagcgataacttagaaatagtttctaaacatgttaagctttcgaatgataacaacaaaatgttggatttggatgccaaagaaataagttattgccaaaacataaacatttttgaaaatctgtacacagataacatatnacataagtaccgaataaagaattagaaaaaaaaattttggaaaaattttcgagaaaacagtaatcctttataaaatttttaaaaaaaccgctggaaaatttttcaaaaactcggtggaacttatttgttagtgcacaaagaaaaaaaaaaaatttttttttaaattctcaacttttaaaaaatcacatgccatttcaattttttaaaaatggagctcttatagcgagcgtgcaaggttgctctcgtctaaccaccaccgtgcccctcccccccccccccgccttggtggttattttggccaaggctcttaaccgccgatgagtcatccatcccatcactgttagcgggtgcttcttcttccctgggcaagtcacttccgttttatttagccccattaatcactccgcttactcgctgaaccaaaatggcagtttcctgatgtcttgtcccaccttgtgttgggatttcaatggatcatggcatgcttttaggcaatgactaatccggctttgtgtttatcccatgaaggagtcgggaggggggtgggatttgtcaattgtcccacgattcgaatcccgacccgagtctcggcatttaaatctccttcaatgtgcatacacattaaaagccttcattattttcgtggttatcatataaaatattatagtattgattttttgcgtcgagagtaagcctcgagagtgacaaaaaacattttcttgacttgagaattatcattgctttctctttcgatgatagtagttatgtcataggcgatatgtgagagattgaaatgaactttaaaaaagattgactaggggagagaaagaaagggacgaaagagagagagagaaggggagagcagagagaaaggactgagagagagaaagagagagagagaagtagaggaaaacccaagaggaagggagaaaaacaatcaatcattaattaggtaattagctaatcagagagaaagagaagagtgagggagataaagagagagagagagagagtaaaggaaaaaaccaagaggaagagagaaaaacaatcagtaattaattaagtaattagcgagagaaagagagaaggaaaagagtgagggagagaaagaaagcgagagattaagtaattatagagagcgcgagagaaaattaggtaattagagagagagagaagagacagaatgttatttcttgtcaattatggtgagtcatttcattgttaattaggggcaattaagcgtttttgtggtatacaattagaggcgcggaaacgattttcaatttatggactgatcgaccgattttttgtgaaaggagaatgtctcttttgacgaaaaaggcgacgacattacacagagagaataaagaaagcgttaatttagatgatgattcattcacccctgggggagaatttttcaatgaaaaattttgaaattccacaaattttaacagcgtctattttttgcaagtaaattgagagcattttttacaaaaataacccgagatttgtcgagatttcgaattatatcaagattttgtccaattgtccgggttttcattcacttgtccggggaaaaacttcattgaaaaattttgaaattctacaaattttaacaatgtttttttgcaagcaaatagagtgatatttttgtaaaaataactcgagacttgtcgagattttgtcccatttcccaattgtccggtttttcccagtcgagaaatttcatgaaattttattttcaatcatgatttttgatttcaatttatgagtcatcatatttttttctaactacagaattttttggtgccatttcttaatgtgtattttgtgggaag

SEQ ID NO: 11196 - DNA, 3935 bp, Heterodera glycines
tagggctgctaattttatgtaaatacacataatttttccctggattctccatggtctaattagtaggaaaaacagtttcttttttgtgtttgcgaacaaaagttgggactttttagtacatagttctcaatttttccgtacatacttatttttttgacatattttgggattttttgagaatttaaaaattttttaagaaaaattttaaagtttttttgaaaatgtacacctaaaaatcggttttttttttcaaaaatcagatatcaaaaattaatttttaaaatactaaaaagtgattctaagcctattttggtcctttttatggcattttgtgattagttcactttttacgaaaaattttttccaaaaaaatgaccatttaaaaatttgtatttacatattttagtacatatttgggggtttttgtacatatgtatttcatacatattttagcattttttatacatattttatttacataattcgcaaattttcttatataaaattagcaaccctaataattttattttattttatttgggaattttaattaaaaacaattaacaatattttttaatatataataaatcgaaaaacgaaaaaacaaatcgtaaaacaccaaattaattgaatatggagatttgatcaaaagtgtgttccaaaaataagcacctcgctgcttttttgtgctgggtcgtttcgtaaaaactgcaattttacagatttttcgagaaaaattcgtcatatatgatagctcttagattgctctattagcaagaaaaatttcattgagttttcagaaaattatgtctgtttttttaacatttttgtgcagaactttctaaaaagtaaatgaaatttttcatgctaatagagcaatctaagagctatagtatgataccaaatattatttaatttgattctgtttaagaaaagttatgacgaatttttatcgaaaaatctgtaaattgacccagcatggtcaaaaacatgaaaatggagtcaaaaataagcccatattctttaaaacataattataaagcgcaatcttattaaagatttttgttaattagagactgggggataaatggagactgtgaggattatttttcgattgatttgtttagtgaaaaatttttgaatttttttgaacatgtcgccaaaaatgttatcgcggcaaaaaaaaatattttttattacatttttgttaaagaatttctgttttacatgaaaaatttgaaactccctatactatttatcaatggaatctttttgctgcgtttgtaaagcaattcatggaggaagccaaagctgttccgtctgcgaattttcgacagattttcccggcagcgcatatcgacaccggctcccggtaaattggacaccgaaaagtggacacaaaattttggtttggctaaatgattttattttattatgcacatatatgttttttataagcgtaataaaactgaaataaataatgtttttattacataaaacttcagcaaaagaaaaaaaccataacatccatttagaaaaaagttttcttttggataggattcccatcttttatgcaattttagcacattgaccaatcattgccctttttcttgcatttttttggcacattgatcaatcacgtgctggcgcgtttcttaaaaactgccacccatgcgcgtttcttaaaactgccaaaaaagatactaacatattatttcctattttttaatttaaatataataaataatttatgttttcatgctaatcgataatataaattacattttttgtttaagttaatacgtaacagacgtgactttcatatgttagctaaaattatggaaaattgtttgccagccttaaattatagccaactacaaaatatttgccaacattaattatatatttataaaattgaaaacgtatatacaaccattataaaaaatatattaacaattttttttaaaaatgaaaataaaaatatatatttttaatattatattatgttcttgcttaaaatttctaaattgtatcggattggaggaattaacatcaaacgaaagcgcaaagcgattggttgatcaataccttaaaaaagaaataaaaacaagaggagagttgttggaaaaactagaagaaattggtgtcgacctaagcctaagggcgttagatagacacctttcaaaaataagaagtagaaaatcggaaggaattcaagaggacatagaaaaagcagaagtgtcacaatgtttttcaaaatttgacaataagtttctcttcataattggtcacggtgatgaatatcgaaagtttaagcagactaatgaaagaaacggcgcaatttgttagctttacatattttaatgattataaattatattaagtatcatcacaagtgcaataataagagaaggtcaattagaccgaactcacaaaatgattcataaccagcattgtaacggtgttcctcttgaacagcttactgctgaacaaattgatagaagccaaagaagagatttagcgcaatgttctacggatcctaaatctatatggcgagaagtattgtaaaattttaataaatcccaaatagaacattttagggatcagaccggtccagagaacatgatattgctgaggatattggggttgaagatacgactggaataccatttaattacccgaattggcagacagtacggagtgcatataaccgtagaagaaaaaatcatttaggggattcgttagacccctttaatgttcccgaaagtattttcaagtgaaagcactgaaaacagcatttctagccaagaaaatcaagggggtttaatttacttaaaaggaaatataaaatataactaataaataaatattaaattttaaaaccaaaataaattttaaaatcaaaatattaaaaattaatgaactcataatagttcaacatgttgctaccatgatgcgttctgttattaaatttgtttttaatcctataaatgaagatcaaagacaagaactatgtgaaacgtggttttacagatttagtaagatttatttctgatcaaaagtaatagcaaatataggtgatgcaccgattgaatatccagtaccgtttgattttgtttcttctgagtacggacccggtgaagttatcagtatattaggagatggtaattgcggttggcgagctgtctctgttgctatgactggaacagaatcaaatcacgccgaaatccgaagagatgtcattgagtatttgcaagagaccattaaccaaaattcttatacagaaaattcttggtggtgtaagtataatataaatcagtactgagtgaatatgctaatttagcgttatttggcagcaatatatatattagagaacatctagaaaaagcaataacacccgaaacaggggcacacgaaactgaaaaatggatgggtaatttagatttagcggcagtcagcaaaatctttcgaataaatataattgtgtgtgaatggctacaggaagaaatttaccgttggcaagtgtattcgccaaatttggaagcatcgattagactttgtttaattgtgcaatttcatattgaaaatttagctttcgaatctgatccaaaaggagtcgactgcatcaatatttttatattatcaccatagccactttgaactcataaaacacccacaaaagataaattaattattttttaaatttttttatattgtattcaaaattcccttttgtaagttgcaaagaaatattgtggaacttattgtggcacttctatatttgattcttgcatgatagcccctgtaatatggttttgcgactttaaaaaagttataaatttaatagatttataaatgtattatttaaatattatagttaatcgttgctgttataaccatgatgtatgctatatagaaaaatggaaaaaacgata

SEQ ID NO: 11197 - DNA, 1125 bp, Heterodera glycines
ctgagataaaattccagaacaattagtatccctcacccggggctgagagtgcggttggaattcccttgactgtagaccagaaaaagagatagccatttttccaaaattttcacgatcaaatgcgctgagaaaaaaattccagaacaattagtatcggcgtcattatgctgagagtgcggttggaattcccttgactgtagaccagaaaaagagatagccatttttccaaaattttcacgatcaaatgcgctgagaaaaaaattccagaacaattagtatcggcgtcattatgctgagagtgcggttggaattcccttgactgtagaccagaaaaagagatagccatttttccaaaattttcacgatcaaatgcgctgagaaaaaaattccagaacaattagtatcggcgtcattatgctgagagtgcggttggaattcccttgactgtagaccagaaaaagagatagccatttttccaaaattttcacgatcaaatgcgctgagaaaaaaattccagaacaattagtatcggcgtcattatgctgagagtgcggttggaattcccttgactgtagaccagaaaaagagatagccatttttccaaaattttcacgatcaaatgcgctgagaaaaaaattccagaacaattagtatcggcgtcattatgctgagagtgcggttggaattcccttgactgtagaccagaaaaagagatagccatttttccaaaattttcacgatcaaatgcgctgagaaaaaaattccagaacaattagtatcggcgtcattatgctgagagtgcggttggaattcccttgactgtagaccagaaaaagagatagccatttttccaaaattttcacgatcaaatgcgctgagaaaaaaattccagaacaattagtatcggcgtcattatgctgagagtgcggttggaattcccttgactgtagaccagaaaaagagatagccatttttccaaaattttcacgatcaaatgcgctgagaaaaaattccagaacaattagtatcggcgtcattatgctgagagtgcgggtggaatcccttgactgtagaccagaaaagagatagccattttccagaatctcacgatcaaatgcgctgaga

SEQ ID NO: 11198 - DNA, 2937 bp, Heterodera glycines
  unsure (1)..(2937): unsure at all n locations
atcaaatgaaatattttttgatataactttgctcaaacgtactaaatttttaattcttgatatcattagataggcctaagtgttttctattagcctacaaaatttcaaaaagtttcgttaagtttcaagaaagttatggccaaaaatgttcaaaaaaacttggttttttgagcttctcaggtcataactttttttaaacttaaagatttttttagaaattttgcaggataatagaaaacacttagggctatcgaaaaatatctagattataaaatttgatctattttatgcgaaattatgaataattttctgtcaaaaattttccatttgatggtttttgactaacgtcccagcaccgtacagtcagtacaacaattttagtctcaaaataagtctttttcaactattattttcgctaaaattccgtgttttaaccccccgccggggggggggggtcggttgggaatggaatcgttggagcttttccttggatgtcggttgttgaaacaacgtgatcacttcattttggtcgtccgccatgaatttaattataagctcaagcacaacattgccaactaagcaaaaacaaataaaattaaaattaaaacccaaaaaactaactgtatttattcttgtcaaaggtattgtgcaacaaataaaagtgcacggatgtcgcattttggtcgatttggccctgaatcacaacgctttccccgactaacagcggcgtgccgagattcagaaatgacttttcatcccgatactgttcggactaagcaaagaaaaatgtgcgcatttaagtatttcaaaaaggtgtaattaatgcccaaatcggcaaaaatatttagaagccactgcttattagtgtaatttttcattattttttaccgtctcctcaattatttcagcggtcccactctccggaaaaagactgccgttaagctgaaaagggtgattaatggatctacatcaaagcaattttcacaatgatgcaccaaattggcactaatttaacttggcccacccaaaattgtcaattaattgaggccacccctaaattggcaatagtttaatttggcccacccaaaattctcaattaatttggcccacccaaaattggcaattaattgggcccacccctaaattggcaataattcaattaggctcacccctgaattggcaataatttattgggcccagccctaaattggcaataattcaattaggctcacccctgaattggcaataatgtattgggcccagccctaaattggcactattcaatttggcccacccaaaattggcaataatttaattaggccacctccaccgttgcgatgtccgccgtttcgctctcgtgcatccaccaattggcatgccacgggaagaagtggacgtactttcttctgttcacacgaacttcgtagaaataggcatacagcacaaagtcgaattgcatgtacttgttgacgtaattcttcagcatttttttgttgactattttcggaagattgggcatatccttcaaaagttgggcagcattttcaagccataattaatttaattaattctaatttaagttaatttattaattctcatttaagccatgctcgagaccaattatatcttaataaaacattgtccactcctccaattatttttcattaaagctgcatcagtgcggcccaattagtccccaattaagcggtaacggctgtcgatcacctccaattatttctcgattaagacatgccccgcccatgtagtacgacatttgcgggttgaaaggttaaatctgatttgactcggcgcttattggtaccgacagactcaaaaatctcataaatttaaaaattaatatttggaagaatccaaaatttgaaaaagctaagggtaaatgaaaattttattttttcaataattgtaattattaattttttgtgaaaatattttaatttaataattttttttatttaattataagaaaaaatctcatcatattgaacattcaaattttgattttatttttttagaaagtcaatcctcaaatgtcggctaattgtccgtggttcccacctcaattagtctcaattagtccccctttgtctctgcccctgctcgccgactctcaccaaatcatcggggctaaatttggtgccattctccgtcatggaaatttccatgacaaattcgccctttttgttgagcaaccgaaccgaaaattcctttgcttcttcgccaattcggaattgcactcgcaacattttgccaatttcaggtgttccttcaatggtaagctgcgaattgttagctgcaatccgacaatgcttgggaattcgtggcaaaacgtcggcgaaactcgctttggtcgctttatccggattttcagtgggatggaggaactttaaatggacggaaaagtggaaaaattattggaaaaatgccatccccagactcattcttattttggtgactcagaaattattttttaattttttttaaagcatttagttgaaaaattgttgattttaattagagccttatattttaggctctagcaatttccaaaataggtatgttataggctctaaaaaatccataaaagaggcactaaaattggaaaataggcactaataaaaacacaaatttagggagagtaaaatgacaagattttagtcaaaagcaacaaaattaagccaaatcagtattgaaataatttaaaatcataaattcttgtcaagaaaataaataaaaattttagtgataaatttttgagaaaattttttcatagagttgtgtttcaaaaaatacaccactaagaagaatgaanaaatttatttcccaggaaagaatttttgattttaaatgtcgaaaataccctcttanaattcagtcgaaaagtcaggcaccccttttcctacccatgcgtgcatttcg

SEQ ID NO: 11199 - DNA, 3140 bp, Heterodera glycines
ccattttctttgcttttttgtcgtgactttgtttacacacggcatgatgcatttcggcacatttgtggccacgtcattctttttattggtttttaatcatcattaaaaatcaattaattaattaattaattggttaaatgatcaaatttttgtgtgcaatttgtccgaattacccccgctatattttggattcggaattgcttttctgggaccattccaaaggaaaattttgattgttcggcgtccaatgctccggggtagcaaatgagcatactaaattgttaattaggttaaattattaattataattttaattaaaaaccttaaaaaacaaaccctttattgcattttccgattattttgaattttaacaaaaatgaattaattttcttttgttttgattctttcttaaagcattggtccatggcattgtattccgtattgaaataatttttagtcgcatcactcaaataaaccaccctaaatttgcaaaataaaatttcacaaaaatatttttcaaaaattacttttcgggttcaatttgataagaaaaactgcaaaatgcagtcaaaaatacaaagatgatcaagcttttgtggttcattgcgctgaaaattgactctaaaatattttaaaattaatattcaattaagattcaaataaattattattttttttattttttaataatttgttttacgcaaaaataaaataaatgatattaacattttctgttttgcagtggtcaaaagcgaagcaaatgactaaaagcaaattgttttcacatttattttttatttttgctttccctaccgaatgactcattcatttattcattgaatccaccgccaaatacgatttgatgaatatttatttttatctgatcataatccgttttttaatgtacaaaaattgaataaaactatagggaaattaatattaaaaaaaaataaaaaattcaattataataaaattgcttaaagtggacaagaccataaaattactaattacatgctaattattttgcacattgactcgtggcataacattttcaaaaatgtaaaattaagaaaaattaattatacaaaaaacaaaactgttttttaacggtatcttgagcaattaatgagtgagagagggtaaaaggcggcgaaagctagctagtaagtatattattagctggaattttattaaaatttggagctcatggtttcagtcgttttttaattagtttttttaaataattcctttttttatatattggtaaaaatgaaggcttattttattttaaaattaaaaaaatattcacttgaatttgaaatgtttatgcgtattttatgcaaaataatatgtatcaatcaaagatgatcatcagtgaatacaaattacttaggaacgcatttttgaattcaattgaaacaatagcaaacgaataaataaatacccgtcacataggaggaactaattgggctattaattatttacaatagagagaaagtataatggacaattatcacctaattaagagtggaattatgagaagtggcagaagacacaaaaaaataaatacaacaaaaaagatttttcaacttcaatggaatttaaacaaagttcaagccaatgaaaggaattggaggggacatttggcaaatttgtcgtgttcatttctgaccatcactttgccgtctttgcttaatgagtcgggctgggcaaaaacaacctgaaaatgggcaaatgatggaatgtttcgagattctcgcttgaatttaaggcaactcgtacactgttttacagagtcaactcgtacaaaaaccaacttatattttacaaaataaagcctagctcaagcactaagcctaggcctagcctaaagcttaggcttaagcgtaaaccaaaagcataggcctaacctaagcaattgtacgagttaccttttgtacgagttgtcatgacttattcgaaggtttgaacttgacttttattgtcaaagaaatagccgactaatggacaattaattacattaattaaatgttgaaataatcttcaaaaaggcgttttcccacctgatccctgtacaagcgcaatttttgatcggacaaattgcagctttgcaacaatcgcatcggctgttcctcggctttatacgaagcgacacaactgctgggaaaagtgatcagctgctccaaccgatcattgagctgtataaaattgggcatttacaccactgttgccgcccattttggttgtttgaccaccttgaacccgtgcttccagtccgggtccccgttgtacaccaccaccaaacggtcgcccgggcgaagtgcgcattcggacgaagcgtactcgtgggtgacaatgtgcaacagttgcggcctgctgatgagtactaaaacgacaccaaactgttcaatttgcagctttgatttgaaattcacattttgccgtgtgctgaatcggcggctgttcgctgggcgccgtttgcgcgttttcctttttttgcgtggggacgggcggaagacggcgctgccgtctcacagtgccaacaacaacagccgaaccattggcaccggcgccgcaagcggactcagtccgcttttccctcctctcaaattggccggggacaattgttgccatttgtgcgccgccgctgctcacaaacgccgcccgtgcagaacgaatgggcggcttatgcacttaaaaacaaatttgttaatttaaaaatttattcattgggtagaaaattttaaaaaatgccgtggcataaattgaagtcccaaagcatcgttgggagttttttggattaattttgccgatgtgtggtacagtattacatgctaacttactgtaatggttgtgccgtattcctccgtttttcggctgtacgggcggcgatgccggcataaagtcggcacagtccaatgagaaggacttcatttgagatgaaagtttgggagtgcgtgcgcttttgcacaatccgacacgatttgacacttctgcgggggaaaaagtgccgttgagcggttccgaaatgccaagcgaagtgtcacgacgagaagcgggaagatggcacgggatggaaacacctgcggaaatttgggattaaaaattgaaaaaattggggttgtggacgaaaatgaaag

SEQ ID NO: 11200 - DNA, 910 bp, Heterodera glycines
aattaggcgaaccgaaataacatttattttcggtgccataattaccggttttatttacaattaaaacaaagacaatagcaattaataaagagaaaaaaggaatgaatgctcaaagtgttgcaagtgaagttctgctgctttctttgatgataatggaggagtgaacctcgtctacaaaatatgacgttttgcagtgagaaaagagaggagggcaaaaatctgcaaaaaatatatatgaaggattgcaatttgattttctaaaactgacaaaaatgagattgatgaccaaaatggataacacgatcgaacgtaggccaaacttttggcagccccaaccgccgaggacagtcggaccggaaacgcatccgtacgtttgaaatgaatcgtcgtaacccctcttccttaaacgagtttagtttcggaagcacattttaaatgagacaaatgacttgacaacgtccaaacactgctgaaacgaggggatgtaaagggcgccggaggcaatgccaagaatggccaaggaaatgcaaatccattcgagacgcctaaatggaaaatggaaaatgaaaattggagttgaatgaagaggaaatggaaaaacatacttttcaacaactccaaagagaaccagcgaaacaattgtggcggatgagccgaaaaacaccagaaaattgttgcaattccatcggtccaacaaaacgccccacagagtggcggtcaaacagtaagagccgtcacagaggaaaaacattaagccggttttggtgtgtgtgaacccaaactgaaaggaaatgggaaacaaaaatgaggataatgcagaaaggggtaatagtgtagtttatccccccaaaccctttttttgaaaaaaaaaactttcaaaaattttaatgtcataaaaaacaagtttcct

SEQ ID NO: 11201 - DNA, 1424 bp, Heterodera glycines
ccccaactaaagaaattctgctgaattcaagaaacaacgtacccaaatgcaattgcagccaaactggctatctgaaggccagcgatgcacatccatttagagccaatcacatgcatctgaatttgttttcaattagtaaaataacaataaataaaaacaaaaaaatatttacgtatttgccaagaagaggtgcagaaatgaacatcaccaattggaacaaaccaaagaccaatccgatttgagcctctgacattctgaagccgtaattcttagctttttgcatgtgaattctcaagtgaccctcttcgtttagcttcgcccgggtaaattggtcctatgcaactgaccaccacagtgctgcacagatttgaaattgccaacataacaatggcgaccaattgtcgattggtcagttccttgaacattgtcattttcatgcttataaaaagattaattggaaattagtacgcttgtcatttgtgttttactagcggggttagcgccttcggcgcatgggtcggggtcactttggcgcgggccattttggcgccgcgaactttaaagtgttataacttttttcttatccaaccaaataaaataattttgataccattaaataggcctaagtattctttattagcctgcaaaatattagaaaaaataaattctgtttgacaaaagatatagcgtgcggcgccaaaatggccagaaaaagtcagttttttgatgtcggattcgtgatcagcgaccccgaaaacctatattttgacttttttacttagaaattaaaaaaaaattttatggggacaaactgcataagagccacgttttgtcctgaacccagggcggccaagtgtccttatttgtaagatttgtccttatttggaggtgccaactcttagaaattaaaaatgtccttatttgtaagatttgtccttattttggcacgacctccttgctttgtgcttattcatggatttgaaaataaaaatgcaaaaatttaatattttttaattacttattgttttttattgaagcgaatatttgaattaattcctttttgtaaaaaatttcatttttatttttctttagtgtaaattcgttaattttaaatgcccaaaatgcccccaaaacgtaaaaataatctcttttaaaatggtcaaaatttttatttttcctccgacggcgcctatcggcaccgtcgggccccaaaaacttattttttcataaaaatgggctcaaaatctcaaaattggtcattttttttggtgaaattctgttaacaaatttcattttaatttgaaaaaattttcccggtggggccgccgataggcgccaccagaaaccaaaatcccaatttttctaaaaaaattagtttaaatctctagagttggtcttttttatacagatctgttacaaatcac

SEQ ID NO: 11202 - DNA, 1837 bp, Heterodera glycines
ctttctttaggcaataagtatttcaaaactgaatggggttgcgctgttagtcaagaccgtgttagcattaaccaacaaattggggaagctgtcaaggctgaggtggactgtgaagcaatgtttggccaaaaggacgtggatttctcaaatgaaaacttcacaattgatatgttggaagtggaaacgaccactacgaccacgacgacgacgaccagcagacaattggaagttattaccacggcacaaccaaccacaactaccagcagcagcaccaccaccaccaccaccactaccacgaagccaacaattgaggaatcaacaaactcaacgaatgggggtagtgtagacttaacttacattatgcgaaaagtttgcaattaacacatttgagtcaattcgaatgcgaaaaatagttcaaaaattaatttttcatatatggggccaaatggtttttttggatttcgattgtttttcgggtccagtgcatttacagtgtgacacaaaaataatacgtttaccaacaaatttgggcacattgaaggttccactgtaagaattttgtgaaactgtgcaagaccaaaaaagttatgacgagattgatagtattgcctaaaaaatattatataaaacaatttcataaaaaagaataatatgtttgtaataaaatttcaaaaatgcaataaattcatttgttttattcaattttattatattaacaaaagagacttgaatatacatattaagccctgttcctaaattaaatatttttaaaaaatataggaaacatcgtatgtgtgcaccacacgtctatttttttctggatggttattgcgctcggcggtaatttgaattttactctaaattttttttactaattttcagttgttatttccgttttgcatggcgtcattttgtcggctcccatttgaatgccttctgtaatggaggaagaaaaaaaaacaatgaactgagagattgtttgcttaaaaaagatgcactaatgtgataatcttaattttttattcatcataatatataatttaaaaaaccctaaaaaattcacttgccgtatgtacattgtgacagaataggcatgttaaatggaataattcagttataaaaaggtccatgtgcaattttatcggaataaaaaatcgcaatagatgaacatgttagtatgttatttttttctatttttttgattataagttcttttaaattttttcaaaaagttgaagtatatctaaaagctttggtggactctataattttcatgtataattgatattaaaatcaataaatagtacatttgttgtttaatattattgttttttaaagaaaaattttcttatgtttatttgactataatttgaaaatctaaaaaaagaaaaatatattgttttttttttaaattttgaataataattttaattatcccccccacagttgaacagccgacaaaattcgtcagagagtggggctgcacttttaacatttcaaacatcgacaaattctgtaaggagaaaaagtctgagcttgggtacaaagccaaagatgaaacactgtgcaattgcaagagtaaattcatttatccatccgccgttcttcaacgcagcacaacggcggaagtcatcattaaaccgaactaaataaattgaacgggatcaacaataaacaaactatttaagaaaaattacaaaaattaaatctaaaaaatttttgacaattttttattcaaaaagaaataataatttttgaagcaaagaattccatctttgctttctaaaaagcacaaaaatataattatatttgtcagtttttcaaatattaatatttc

SEQ ID NO: 11203 - DNA, 4352 bp, Heterodera glycines
  unsure (1)..(4352): unsure at all n locations
ttatttcatggctttgtctataaaaagctctctctgtcttataaataacattatgattattttccactataaggttttaaaccgtttttacataaatagtttaattcagacccaatattgaaaaaattgatttttgatttgaaatttggatatgggaaaaaattgaatttcatacctatttattaaccctccgaacagttaaagtaaattcgctcattagcgatttgatatgacaattttctgaaaatgtcatctaatttcattaaaagaaagtttttttagatgtttggtttattccatcttcttatttttgactttttgctggtcaaaatatttgctggtgaacttcacatacgagtattttttattgcaagcatattaaaaacaattatgataaaattaagcgggattatcctgcgacctagcaaatccaaaagaagtctgagtgctaacaatttcaattttgtctctcttagccacgtccatgggaattgcgcatgactcaagtttgcaaacagcgagcccaagttttttgcaaggatagctgtggctgggcaacatgtgtatgaatttcgaatttttaggtctatggttaagccccgttcctcagggagagaaattacttgacaaaatttttcatgataagctggtgaagttcatttattttggagtgcaacaaacgacatttacaattccccggattgatcgggggatgaattctattttggactattaattgctttatttggaaaaccttaaggaaaagtagtggaaaaaaattatttttcaatttctttcaaaacatgtttgacagacacaatgttaaataggtgtacaaatatttattatttattttgaaaattaaatgaaaagaaaaaggagcataatatataattttgaccattatttgcttacagatttttaacccaactgctcgttttcgggaacgtaatgaactcttatacgcttttgaacaagcaggaagcgaaataaatgctatgtttgaaggcaagcagcgtttttttgacgaagatcattgctgtcctggcagcgactaccttttcaaatgttgtgaaatggtatgcacaaattagcagtaaatgtttttttttaaattaaccaaaatttgaaacattaaatttttgatagaccgtaagaaaattttcaatcattggaaaattcaatttttaaacattgacattcttttttatagttgttttttgtaaaaataaaaattgtcaaaataacagctctatttatacatttgtgcaaacgaaaatcttctgtttatgaccatgaaagtatactactaattttaattttcttttgtattttttttattaagatgccgaaacaaaaaactgtctatgaaggaggttttcatgtaatattataatttatatatttagaattacttaaagattataattaaaatatctaaattacttttttttttgcaactccattatctagttgcctatttataaaattaagtgcctacaaatccggtctctatttataaaaaagttattctataaattgataaaaataggattttttcatttattctatttttcatgactttggtattttttgtgactttttggcgattttttatgaagctctgaacttgctatttttaacagattttctattgatttttttaaaatataaattataaagatttaaaaataaattaaaattacagatcacggattacggaaaataccttgttttcgactcccccgtaattacgattaagaatttgcgtaattgaaaatccattttcatgcagccctgatttataagcataaaaataatttgcaaggtcaatttaggttttgtggaataaatcttgttttataatctatttccattttcttccatttagaatagattgttttatgtgtctggttgtccgaataactgtgtttgcggagagctaaccgaatttataacacttggggcgtgctgcgaccactcaaatgattgtgcttgttgttcaaccgtaataaatgctaatattatttttccacaaattttggcaaaatgttattgtcaacaatttttagatttttttacaaattaactagctgctaccttttatgatttttaatatataaatattttcagaattttagcacaaataaataaaaccatctgttatttaacaaattccggcaaaaagttattcaaaaagttgaaaaactttctgataataatgttacacccctgaacttggaagccttttatcttttttagccatttttattacttttttcttgttgaactaatttttagagattgaataaaaccctctatatgtaacatttacatacataatattcattttagcttcggagcacagagcgtccacctcaaaaacgttctgaaaataatattacacccatgaacttggaatcatttagtcttttttaggcatttttattgtcttttttgtttttgagcctaaacactaatgatttattattttttaggaactgaagaaaaccctctttatctaacatttacatatataactttcattttagtttcggagcaaacagcgtccatctcttccaaacgtacgtaattgatttaattttgctaattaaattacgttttattaaaaaaaagataatcacggagacaaaagaccacggagaagtcaaaggcacttgcagtaccagctacttcggtttagtatttgtggtttgaatatttaaattttttaaaacaattcttagatcttaaactaagtgagcaaatgaccaatttctacaaaaattttaaactcttgtttaggacgtacgcattgttcggatcaaagcaggaagactgcatgctatttacaaatcttgtctgcctaccgttacgaaaaaactgaaatcgaacaagatattctttcgagctactcaaactctggggttgatgagcgcaacaaatattggaataattggctaaacgcttttaaatgccattggatggaagggaagccggaatccgggtgttgtgcagaaaactataacttaattcgtcatactaaggtgctggctgtaatgatctcaaattttaaaatcgattcaagaataaaaaaatgtcttccaaaaagacagccggatacattgttaattgaaaatgaaaattttaaaatagattttataaagacattttttaattctttagttagctcatagtccggtacaacatcctcattgcgcgaagggaaaatgtttttattccggtgtttattgggtagtatatagcatgtttatttttgaatcacttaattggtttagatcatgcatcctatctcagaggctacatcaaaatcggtaagtacattaatatttcagttaatttttattatcttcttttaaaaaatgacgtttcattccttttttatgaactgaaaaactttttgataactatataatttagtatttttcatacgatagcttaacgattttaaaacagttctaagagtattcttttttgtttcttaggtttctttttgagaagaattatgtattttacttttaatttttacaaaaaatcaatcgtttgactccccgttataagaagattaaataaaacattccgttaatagctgagccaattggagaataggcgcatgacttgggaaaaacaatatacggtaggaacggagaattggtgattttaataatcttaattcttgatataattttacaagctctaagtgttttctatcaccctgcaaaatttcaaaaagtttcgttaagtttcagtaaattgtttgcaggataaaagaaagcatatagggctttcaatatttggttcatttggggccaagttatgaataacattatgtaaaaaaatccgtcagcggacaatccgtcagtatggacaatccgtcagttaaggaaaatccgtcagtaatggancaatccgtcagttaagggaaaatccgtccagtaaatggacaatccgtcagtggataatccgtcagtggacaattcgtcagcaaatttttttaaagcaatgatcaaaaaccttgcgaaaattattgttaaattaaataaatataattttttttagttcttaaaatttatagttactttatatttcaaataattgaccatctctagaaattatcatttaattttttaaaaaatgattatttcatatatttttttttaaataacacaaatcattaattcagctttttagcgaatcaaataaattttcacatgattttaaataaatctgggtattttaaaaataaatttgcttatggattagttactgacggatatccactgacggattgtccacttactgagggattgtccagtgacggattgtccact

SEQ ID NO: 11204 - DNA, 4575 bp, Heterodera glycines
tagataatttcgaagagaagctcggctggtaatcgcttgcgcatcatattggtcatgaaatttgaatgaatgaatgaagagtgaattaaaatatttttgtgcccggttctcatgggctcttttcattaattattcaatagttaatattgacttcaaaagacatttgaatttgccgacaatagtgaaggagataacttcaaaggaaatttgaatttgccgacaataaggaaggagagttcgagaaaattaattggtattcggatgggtacaccccgcccctaggcttcataaatactcagtccaaatcacatttcattcatatctgctcatgtctttttactcactttaataataataaaatttgtaaaaataattaaattataataaaatttttattttctgctgttaaccagagcggttgcccaattattaggctccgtttattctggcagcatttgtgtgtcttttagggcttgggattgtacgcgtgacctttactaattacccgagccgtttaggtgccctgtcgtcttgtgcttcatgggtggcagtgcgctgctcttcagggcatagttggtttaaaaaatctttaaattattattattattatccattaatttgcattcacaacgacaatttccatgcctcaaaaatatgtgtcaagattgttcattttatccattcaattcattatttttccctgtaaaattagataatgcaaaatcagcctcccaagcatccctctttgttttccattgaccaaattctatcggccccaagcaaaaagccgcgtcgcggcttcctcatcaatgaattgcttggagaggtgcttcaagagggcggcggcagcagcagctcatcatcatcaaagtctacaaaggaatacgtcaaaaagctggacagcaccattgagcatgtgccccgcttccaatacagcaaaattaagtcgcgattcagcattgaggatgtgccagcagcaaatcctgagggactcctggccggcatcttccagtactgccttgacgcagcgatggaggagagtcgtggacgtggaattgaacccacgcatctcggctgcatgatcagcagtccgttgctcaccggcggggacattcccatccccgttcgacaaatcacagacaacaccgtcaacaccatcctcaaccaattcaccaaagtggcacagagcaagcagcagcaaaacgtcacactgtggggcgagccattcactgtggtggtgaccacagttgaccgtactggactgcccggccgaagggtgctgaagggcggtgctcgacgaagcctagcaccagtgcatcatcgggtgacggaaacttgtttgattaaggtccaacatcacaacgcaagtataattttagtgacaattttgttaagatttgcaatccggacgggcattgcctcttctacgccttgcaggcgacaatggtggccaaaactagtggttggccccgttggaagttccatcgctatgtgcacagcctgcatggtcaacagggatgtctgaggcgggatgctttacaactgatgcagcaaattggtgtacggaccggtcggaacacctatgatgctgagatttgtgtgccgcgtgtggtcgatcactggaacaacacgcaacagcagcatcggtttgcagtgttcatctttggctcatcgggacaatacaagcccttgtacaaatacatcaacgatcattacgacactcccattgtgctctatttgaacaaccagcattttgatggtgtgcagaaattacatggcttgtttggacaaccctactgcctcgactgcgaaaagccttatgagcgtccgtcaaggcacctcaattcctgtaaggcgcgctgtttgctttgctcacgtgtcgggcctgcattcccttgtgttccattgggcggctttttccatcaatgtgcgggttgcaataaaaagtttcgcaataacgggtgcctccaacaccatttggcatccaacttttgcgcccagtcaaagcaatgcaaggactgcggcgttatatgggacacacgagtacataacagagatgggagaaaagtaaacattaaaaataaaataaaattttgtatttcttgctggatttagggtcacaaatgccacgagagctattgtcagctatgcaacacgtttcacaatcccgagcgggggtgcttcattcagcccattgagccaaaagagcaggacccgtaccacattgtggctttcgacttggaaaccatgcagcatcaaccagtggacccccagcagccagagaagagagagcaccagcccaacttcattgctgcccgagtcgcgtgccctgagtgcattgagagcggaaattggcggagggcaacagcgggctgccgattttgtggtccacatcgaactgtcgctttctgccagcgaccctttgaggacactcgtgtggacaaacgagtggtggcggacaacccactgcaggcgtttgtggattggctcatcttccaactaccagccaaatacgacacatacgcttactcacactttggcggacggttcgacatggttggttctggtctttcgcgagctattccggattgggttcaacccggagatgcttcgacgggtacacacaattatgaattgtgtccaaaaatttttcaaaatttcagggcaacaaaatgtatgagatgaaggtgcgcaagcagaagaggcgcaacccgaacattgtcttccgggactctttcaatttgatgccgtgcgcgctggctgcgctcatcccctcctacggcctggacgtcgaggacaagcccttctttccccatttggccaaccgacccgagaactacggccgtgagattcacccgacgcccgaagactacttggctaatggaatgatgcccagcaaaagacagaaatttgacgagtggtacgccgcgcatcgccatgagccctttaaattggatgaggcgttagcgaggtactgtaaaaatattttgctataacaataattttgttctcgattttcagttattgcaccaacgatgtggaaatattgatggcagctctggtcgcctttcgccgggaattcttcgaaatttcacggcgccaagactacgttgatgggattgacgacaaggagaaccacgacgggattgatgtgctgcgtgagtgcatgaccatcgcgggggcatgcatgcggcacttccgcaccaaccacctgcccgacgagcacttggccattgtgcccgagcgcggctatgacaacgcgcagaaccaaagcctgctcgccttgcgcttcttccactggtacgccaaggagcatggagtgcaagtgcagacagcccacgcggctgaaggagagaagcgcattgggccctactccttggatgagtggattgaggcggaacgacgcgcaattgaagtcaatggtaattgagttaattatttttcaccattattataaaatgggcaattttaaggctgcacgtggcacgggtgcaaaaagtgctacccaaacgacaacatgctgctccccagtgggaagactgcggggcaagtgcgcgaacgggattccaagcggatggaatttctgagagagaaggtcaaccgagtggacgtctacttggaatgcgaaatccatcggatgctggagaggagcaaggaaatgcgcaaggcatttgaagactatgtcgatgatggcccgctggtgatccgcgacgcgtttatgggagggcgaactggaccgctgaagctgctgcgcaaggctggaccgggagagaaaatctcctattatgacttcacatcgctctacccgtatataaagtgagcactgttaaatttgtaacaacttttaacattgttttctttacagcttcacaacccgttaccccattggcactcccaaagtgcatgtgttgaaccaggaagtggattggcgcagtgcagcggacaacccctaccctttggcattgctcaaagtgtgggttgtgcctccccgacgcgtcgacgtccccgttctgcctgtgaaagttggaaagcggctttgcttccccctgtgcatcacttgcgccaaagagcacccgacaggaggagtggacaacgactaccactgcgagcacaatgacagacagcgggggtgggtgatcacatgcacctccattgagctcaacgagacgcttgacgagggctacaccgtcacgagggtgttccgtgtcctcgagtatgagcaaagtgacgacaagctcttccgcccgtacatcgctgagtttatggcccagaagatccaggccagtgggtttgacaacagcatcagaggcgatgcggagaaggaacaacagtttgtgcgggagtgcgcagagcagttcgacatcaccatcgacccgaccaaaatggcggtcaacaaagggaagcggtccctggccaagctctgcttgaacaacttatgtgagtactgtcgtccattattattatatttaaaaaaatagggggacgattttcgcttcgcaactttggactcgctcaaacactcatcactgacgacccagaggctttggcggagtacctggacaacaaatccatcga

SEQ ID NO: 11205 - DNA, 1640 bp, Heterodera glycines
cgccagcatgtttttggctataacttttttctttgtaaaccaaatccaacattgttggtgtcgttcgaaagctaatcaatttagaagctttttctaagctattgctttgcgattagacaattatcaaaaaagttatgcatgaaaattgcgaaaagtcaaaatttttgaagttttttcttaataaaattttttccaggcttgaaaaacttttcgtttttgataaggctaataaagcatgttaagagctttcgaatgataccaacaatcttggatttggatgccaaagaaaaaagctatcgtggaaaaacgatttttcaattgtgtcacaaaaggcaaggcaaaactctgttgttatgttaaaagagagagttgggaaaaatgagagagcaaaaagaacgcaaaaacaattttgaaatagaaataaattcatcacattttttggcaaaaaacagacggagatttgtattattgtttagaaaaggattttgcagggcaattattaattcatttgtgacatcaatcaattggaaaacggcaaagttgcagcaaaaatgaacagagggcgaggaatttaaaaaattacaaatttttcatttgcctatttatcttttcgcatgcatttcagtttgatttgtggcgacgtttgatgtattttttgaatttttttccatgtttcagttggatttgtgcggatgtttggatggacattctgccatcttttgaccatgctcaactcggcctcaaaatggcattgctttccgaccgtttcgatgttttggtggacaaacatttcgatggaaaaagcgaattgacaatttggagagcaatcgcaattcgcaaggacaaaggaccaaaagcgaaactgtctgttctgatcgatgacaaatgcgtggcatttccatttcccgaccatccgttgcccaacaaaatccgttttaaggaccttcagatttagtaaatcaaaaaatatacagaaaaccaatcttcatttttccccttttcagttacgttgaccattctgtgctcgcatttcttcgttccaacaagcaaatttgggacagaagtggcatcaaattggatttgtttctgcctttatatatgaccgacgtcaagctcatttgggatgtttttacccgcgaaatttggccactttttgcgaaaagcattcggcatttgagctttcatgccgataatttggaaaatttgcgtcgccgcatttcaccgacacttctcactgatcttgatcaattgtattcaattgattctggtgctctattccccgatggaattgctgatgatgggccaaatgcaactgctggccaagcgttgtccaaatggttgcacactccgagcaaaaatggccaaccgaagcaattgcatcgcaataattattttggtccaccaaagctggaatgggtcaacaacttcaaagaggtgtgtctagccatattttctataaattcagtttaagggtagtatgcaatacgttccatgtaaaaaaacaaattgtttagtttttttccattttttatttagacatttcgccgtgccaccacttctgtcagttacacaattcaactttatattattgtggaaccaatgccaattgaccatttgaattggtgaacgaagtgacaaat

SEQ ID NO: 11206 - DNA, 2694 bp, Heterodera glycines
  unsure (1)..(2694): unsure at all n locations
ttttttttgtttttccaaaaaaaatgcggaaaggcttattggttccagtggatcccctttaataaatagtgtgctcgggttgtgtgacttttgtgcgcttttattggtgaaaaaaaaattaggaaaaaaaactccaaaatttcggtttttttccattttttcatatattacttttctggaattgtctaatcgaggaagcaatagctcaaaaaaaagcttctaacatttatgcttncgaatgctaccaagattcttggatttggttgaccaaggaaaaaattatagtcaaaaaaagtcatggggcccaaacgtgacggaccaatgaccaagtacagtactttcccagaagtttggcagggtcagcaggagtcctgttaagacagaacttcagtccttagttttgtccgttctgttacggttcatttcggaaactctgaaggttttcaataagatattagtgtacatacatacgttttattcgaacgaaagaatcaacaaaagcatttcaaagagaaatgatggcataaaatccgtttcctattggcgagatcgatcatttctcaaaaataattaattcatttccacgcaattagacgacatcttcacaaatacaataaattattcattccgctgatccacttggcccgggagtcgtcgagaacatttcattgttgctttgatccgcttcttcttctttttcttcttccgctggtggcgacaatggcctaaaattaattaattctttttattttcgacaaaatcaaaaattgctgtttttgctgctcacccaatggatttatcgaaactccacagatcaaatcggatatggttcaaattggcattggcacccgaattttcgcagtcttcccacttatagcagttggacatatcaaactgtaaatgtccaaatcactttataaccacttttatcgtgtagaggcatagtcgatttactattttgaattttcggcttcttttggctccgcgccaaaagtgatcagaaaaaaacgatcaaaattccgaaaaatcgatgaaaatggtcaaatttgcaaaaattcctaaaattaatttttacataatatttggacaatttgcgtcgtcgcacttcaccaacaattctcactgatcttgatcaattgaattcaagacattctcccatcatttatagggttaaataaatcagattttaaacaatttttttgcggcgcattttttcagaaaacttggggaacttgggtgggcccggcggtgccgataggcgccgctggggaaaattttgaaaattttagtgtaatttgttaacagatttagtaattaaaatagtaaattaaatgaaaaaacggtaaaataaagtgtgggcatatgggattgaacccatattaaaaaaacaacaaaaatctgaagtgtgcactgggctttaccagtggcgatgctttggacaatttgcgtcgccgcacttcaccgacaattctcactgatcttgatcaattgcattcgatcgatttcgctcttatgtgctctggcacgattgatgatcaaattctgtccaaatggttgcacacgccgagcaaagatggacaaccaaagcgattgcgtttccgtgcttatgtgggcccacgaaatctcgaatggctcaacaatttccgagaggtgatcactgatcagccatattttcattaaacgacgactaattgatttaattgtccttgattttgacgagcagacaacggaaaatccacaaaattgccaccaatcgatacattgccatcgattagtaaagacattttctgttctggtccattatcgtttgcttttggtacttcgtccttgccaattctgatcatcctccaaattaccaaattggatttgtatgtgcctttatatatgaccgaaacttgggatgtttttgcccgtcacatttggccaatttttgcgacaagcattcgccatttgagctttgccgatggcgatgatttggataatttgcgtcgtttggtttcccctacaattctcactgattgcgaccaattcaaaatcaaacttctggccaggcattgtccaaatggttgcacactccgacaactgatggtcaaccgaagagattgtttgcagtggttatttggatccaccaaaaattgattggatcaacaacttcaaagaggtgtctcgccatttttctcaaattttgtttttcccaattttgtttagacatttctccgtgccacctcttcggcagttacactgttcgaattatttttcgtgtgaaaccaatgccaattgcgccatttgaattgatgaacgaagtgacaaatgagaagctgacactgattaagggtggagcttttcgttggctgttgaaacggtgcccaattgttggggagacggcggcggtggttcagaaacagcagaagaaagacgagaaattggaccgtttgaacggagtctacttctgtctttacgatgccattttctcgactcccgggcacattgatcagcggaagaaaaagtgatcatttgagaaatcgccgaccattattgatttttgataattgggttgattgatgctaattgtttgctctttgaactcatatcacttttgtggtggacttttcggggttactacatataaatgaatttctagacaatcgtttcgaaaggtactaaagaaatttcccaaccaaaaaaatcaacaat

SEQ ID NO: 11207 - DNA, 1992 bp, Heterodera glycines
  unsure (1)..(1992): unsure at all n locations
caaaaantcggtgatcagagatcatttaaaagcaattcaccgttcatcccatggcttctcctcctccttatggccggccttacctcctacgacccattaaaatgccctcaaagtcggggcttctcttcccggccctcaacaattgttggcccctttctatgcttggcgttccgccaccaatcggactattggcctcaaagaagctaaatgttggcactgcctgctgttccgtcgttgcgggcggtgaccaaacgctggccaaactgctggtgttgctccagcccagcctatgctgcccgtaaaagccggataaggagaatgcggagagcccggggggcaacggcggagtgttcgggcctgaattggcacaaagaatttgaaaatgaattataataaaataacaaaagtgcaaaaaaaaaaagaagaaaattatgcggaaaatttatctatttaaaagaatcatttttcacaattcaaaagatgtaaaattaaaaaaaaaaacgaaaattaagaaaaatacttaataaaaaatgggtgggtaaattgcaaaaaaaaaaaaagaattaaaaattaatattgaaagaaattcaaagttaaacttttatttaaaaatgatgcaactcaaaagggtaagtaatgtggcaaaacgaatttaaaaccaattataataaaatgcctaaactaattgaagattaaaccaattcaaaaaagcgcaggttctacttcaaatttcaaaatatattcgaaattattattattttttattaattggacacaaaaattgctggctgaaatttaaataaaaatgcaaaaattgaaaatattaatttatggcgcctccttttaaaactgacctgatgactccttttcatcttcttcatcattgttttctgtttctttgttttgagtcgctgttcgttttaagcacacatcggtggaggaaaagctcttttgttgtgacattttgcgctaaaataataattcctaattattttaatttaaattttaaattattttttttagcggaggtaataattagggctgggaattaagtcacaaaaaatctacaaaaactcgactaaaaaagtcataaacaaaaaacgccaaaaaaagcacgaaagaaaatggaaaaaagtcctcaaaaattaggcaaaagtgaaaaaaataacttatttttaacaatttatagaaaaatttctgcaggttttcaattgcattttcaccgatcagagattatttttcgaaatgttcttcgctaaaattcaaaatttgcctttaagtcattttaaggtaaaaaaaagtcatttgacttaattcacagccctactaataattcacaattatttattcaatttaaaataatgaattcttccttgccatcgtcattcgcatttgtgcaagtcgtttgtccaactctctctcggctttttcctgaacatttgttttgaatgcctttaaactgttgctaatttttcgaacttacaattttctggtccgctatataattcaaatttgacactgacgaagaatgaattagcggagccgcagaatcacaagcatcggtttcctatgactacatgctaataaacgactataatgatttgggaaattattaaaaaacttttaaaatatttctgctttaacagaaacattattatgaaaaagcaataaaaaaacaaaacaataaattggcgttactttttttcaaaaaatgcacccctcataatcgatttttcaaaaagcaaagatcctgaacccatgatttggagaacgatcgaacatttttacgcttgaatactacatatcttcaaatttcagtacttcttgaaagggaaaagtgtgctctaaaattgcagcaaacaatgaacagactgtaaggaaaatttttaaaaattacaaattttccatgtttcagtaggataggtgcggatgattggatggacattctcccatcttttgaccatgtccaactcggcctcaaaatggcattgc

SEQ ID NO: 11208 - DNA, 2642 bp, Heterodera glycines
attatcccccaatctccattaatcccccaatctacattcattccccagtctaggaggcgtttgaaaaataatccctctatcataatcccccagtctccaattatcccccagtatacgagggggttgaaaaataatcccccatgggggataattagagcaaatacggtaattagccaaattaattttcttttgactaattagaatcactaaattgccctattttacctcattaagcttcagcaatgcgtccaattccttctccgtttgtggatggataaagaaacaacgattgccaaacggacaaatgccggttgtcgtgtaattttcacaaatgcgcgttttatgctttgggtttgcccgattagagcttaatttgttttatatttttttacaaacacaaaattttcactacaattaaaaaaattattaaaaaaaactttttcgaaattaacagtaaattagggagttttccctatggaaaaaataattttgatttacttatttctggattttattacatttatctatgtatgaaatttttctctatatattaatgatcgcttttcgaaaacatatttacatttttgtaatatattttgagattctgaaatttgtgggtttatttttttgaaaatttgaaaacatttttaacacaaaaaattattatgatgcctaatttggccttttgtggttttatgcatgtttcagactttttcgaagaatctacggtctaaaaaatagctgtaaaataatttatttacaaattttgtatattttttgtatttattccgtaaattttgcatttttttcgttaataaaaacttagaatctcatgcaattatattaaaaaaacaaatctaaatttttgagttccttttacaatattaagcaaaatgtgtaaatttacccaattcaaacccgaactaaggtaattataatttataattgagtatttaacttacggtaatggctgcaattcatcctcgccatgcgcaaaattacattggtctccataaacacacgctctgccctcaagccatgcctttaaataatttaaaaaagcatttttttggattatatttatcaaaaattatcggaattattcgcacaaaaaatttatgaattggattggaagcacaaaaaatttgataatattcactaaaaaaggcaattaattacatgttttttttggagctatagctgatgaacttttttctcgttttcactaaaaatgtgtaattttttggaattttgcaagaattgttggaaactctctaaagttacaactcaaaaaaaacaaatgaaaatataattgaatgcttccaaaccaatattgtggtttctcggctttattaggtcatgagtcataacagacaaaaaaaaagcattttttacatataatatgaccccatggaataataatatttaaatttttgatttattaattattccaaataattaaacaaataaggtaaattaaaataaacgaagccaatgcttctttcctaaagcagtgaaagcccccacttggcacattgccgttttgtacgcctcgcgctgccgcagccgtttcattgccgggtcgacagcggtgcagaacagagaagaacgacgacgactaaatgtggcaaaccgaattaattaattaattaattaagattaattaggttttaacttactttgcgaggacaggattgatgtattgggtgaggtcattggttgacgcgttcttggccaaaagcgaacgtttggccatggaaaatggttgcgcctgaggcgtcgagagcggaaactacaaacaaaagggtaattaattaattaggtagtaattaccatttcgggaaagtttgcctccgggaatgattcgttgtatttttttctgaaaaaacagaaaacaattgttttttggcattttaacaaagtgtgaaaatgaaaatgccattacattaaagcagcagtggccgccgcttccttactctgctcataattttgaatggaattattgtcaatttttctttgcattttttattctttttttgtgtccttttgttgacgcctttttctcacttattgtacatacaataataaatccaagaaggaatatttttgaaattaacaaattagcaaattttattcgtcatataccaaaagcaattaaaatgctaaaaaaggggagagaaaattttcgcgggtcagtggcaactcgtacaaaaatcacctgaaattttacaaaaataaagcctaggctaagcctaaacctaagtccgggcaagcctaagcctagtcctacctaaaaaatttattacaatttgccctcatgatggactcaattttcaacggtggcatcaatgccaccataattttttgaatgtgccaatttcaaattttgccccaattgttttttctctgcatttgcttggcgttgtgatgacacttaaagccatcacaaattcatcaaatttcttaaaccttctcctcccctgctgcggcatttctttgcgcatttgccgtggcaacggatttgaaaaaatgaaaaaaatggcgaaacaatcaatgccaaaatgggggaagccaggaggagtgcaaaattattgatggcattaatatttgcgtgagagaaaagagcgggtggtcattaagta

SEQ ID NO: 11209 - DNA, 427 bp, Heterodera glycines
ccttgcccagaacgctctgatggtcaactgtacgagcagtcaaaacgcactcacgcagaaccatctgcagcagcagcggcaattggaactgatggaattggaggtagaattattttaaatcatatttttattttaattagtctaaaaaagttcattaagactaagcttcgattgatgtcaaatttataaaatttggttgactgtgaagaaaatttatggcttctaagattttttgaatttttcttaaatccttttcctatgcttttccattgaatttttttttgcaaattttagcaaatcctcatgctgaattcgctgccaatgtccctgaagggtatgagggctattattcatatagcaaaatggcacatgcaaatacactccgaagacgccatctctgataaagcaagttatgacaaaatgtctt

SEQ ID NO: 11210 - DNA, 2544 bp, Heterodera glycines
  unsure (1)..(2544): unsure at all n locations
tttatttttattttatcacttgaacttttcgtacttcgtcatagcaaccctattagagcaataaaagccggcaattagcacctccgccttatgacaaaacgaacaaatgccggaccaatgtccttcggtcccttttcgctcttttcgttttggcgacacttttcttttgctattttttggggcacaattcgatgccgacgcttcagagcttttgggtatttcgaaggatgcttttcgctcaaatggttgtacatcgaaaagattaccaaattcattttggttgccctttaaattaaagattttttaaaattatctttttaaattcaaaatttactggaaatttctgcacaattttgtcccacggggagagcataagttgatgttcgggctgacaggccaccaaaaagttggaaaattttgcgtaaatattctcaaattcggactcagattggacggttttcatcaaaacgtcgattttttccttgcttctatttccagccctaatcacaacaatttggatcatttcacctaaatttattattttccgacaaaaatattttcagtgaaaatattttgttggttactaaatgaaattttacaaataattttggacatttttaaacaaaataaatatagagactataaattgtaagaaaaaaatacaaaattgaacttcaattaaaaacacctaaaaccaaaaaataaaaataaaattttgatcatagatgttatggtttaattttctagcccaaagctttattgaatttaattagtatggcttcctttttttatgtaaatacatattttttcctggattctccatgctttgaatagtaggaaaaacactttctttttttgtgtttgcgaacaaaagttgggacttttatttacatatttggtgatttttctacatatattacatatgtacatatttttatacatattttggactttttcgcattttttcttgcatattttttcttatatttttcgtacttattttgagaatttttgaaaattaaaaaaaatattttgtgaaaaaatataattttttttttttgaaaaagtaccctaaaacataggttttttcaaaaaaaaaatggaccaaaaattaattatttaaatactaaaaggtgattctaagtattttagtacatatttgggttttttttatacatatatcatacatatgtcagcatttatacatcttttatttacatatttcgcgatttttcttacataaaaaaggaagccctattaattaatttttaattcgaaattcaccaatgtctctcagcataattaactcattttctgtccagttgctacaatgagaaaacatttttgcgcttaaaattgccatccaaaatttgacaatttgccgcatttcctcggacatttcgtcagatttggatattccatccgccgaccctttgtcctctgcttcaattggcacaatccaatgacaaaatgaatccaaagccaattttggctcactgaagcgcagcattttttctcgcacaatggcccattttttacagaagaaattgttaaaatcctgacactaataagccaaattgaggcaattaattaactaattaaataattatatttaaaaggtatactttaaattggccatccaatgactgtgaggagaagtgaagtttctggcttatttggcacaattccccgattaatgaaacgatttgctcatcgaccaatcgaagtttgactaagtcaaaaagtgggtgattttcaccattaaaatagtgccaaaaagtgtcaagcattgtttcgcaatcgccttcaactttatgcccgttgtttattctctgtttcatttcattgaacaattcttgcaaaattgcgaacagaaagaaattttcctaaattatttttccaattttttaaatttgtttctaatcaaatgaccttttttgacagccaattgacaaaaggattggaccattggtcaaaaatgaagacaattgcgtcttttttgtcggcaaatgtttcaaaataattcaaaatgcatttgctgttgttcccattgtcgacaaaattgcacaaactgtcaagcggtacattttttgccaatgaatacactttttggaccgcaagataagcgaatgggtcggaaatggcttcctgagaaaattttaattacacctcaacaaattaacaaataatggaaatgcatttgaaaaattggctctcagaaaatgctctgttgaaatatttactccccgcccccgttctgaattcgtcaataaagttttttcgaaaggcttaaaaagtttaataaattttgaaaaattacaaaatcctttaaaaatattcatataatattaatttaaaatcgaaaaactanaaaattcttctattacattatgatgtcacacttanatggcaaaatgtacaatatactctttctaaaactncataaaaacaaaaagtttgaatttatagtttcacaagaacatatagattgttagtagaacatctacagttttttttttgataaaaaaatgcacgaaaatcaca

SEQ ID NO: 11211 - DNA, 826 bp, Heterodera glycines
  unsure (1)..(826): unsure at all n locations
ttttctgtctatcattttataaataatttttggacagtgtaaataaaaattttgaaattttancttaataaaaacaatacctcttcgttcaatgggatgatatgtatggccaaattctgtgccgttttcccattttgaaatgtccgatttttttccatcaaaaattggccattttcatccgttgtaacagtgtaaaaacccccaaaaccattttggcaattgctctaattgccaaataagggtcgtccagcggaaatacaaacttttattgttttcatcgttcccatgcttttccaatcgtcgaacattaaagaaaattgagttttcctcacattcaaatttttgttgtttaaaattggcccaaattataattcggtaattgcccggcggtgaaatctttacgaaatttaacaattaaaaatttaaattttttaattgcaaagttttcgtcgctaacttgtgctaaatgatgcgtcgcttcgttaattgtttctacgttttggtcatatttccgaatgatttggcatacagaagaagaaaattgggcaagaagcaaaatgagaaacggaagcacatttttcatttttctataaaatattaaatattaaaaaagtaaagattttctcaatgtaatatttagaagccaaatgatgacagccgtggaaaatggagcgtttagttgggctaatcgaaggcacttaaatggaagcgcgcaatgacgttaatgaggcgataattttggcataataatgcgcagcaaaggatgaccgaccctgtgcttttttctctcttcattttggcaatctgtgcaaatcgattaaacaaa

SEQ ID NO: 11212 - DNA, 3067 bp, Heterodera glycines
gaattttaaatataaaaagaaatttgcatttttaacaggtgagtagaaaaagataaaattaataataattttttttctttatataataggggaaaatcattttttattattttcaaaatacataaattggaaaatagaaaggaaaacctgcaacaaaagtcatttgatgaaatatttggagaaaaatgggaagaaaaagaagaaaattatggaagaaaaaagagaaataattgaaaaattctataaaataaaagagaaaattaagcaaaaaggaagaaaatattcaaaaaaagaatggacaaaaattgagacaaaattaggaagaaaactggggacaaattgcctatatatttataaatggattaaacaattagattttaatctaagaataattcattctaataaagaaaaaattgaaaaaattaaaatgtattggcaaataaaaagagcacatccgaaaatgagtgacaagcaaattgcaaaaacattgaaaattgaaaaaacaaacctttcaaaatggaagaaaaaaatttgttgttgaggattgaaaacggaaaatcttcgaaaaacgacgattcaaaaggaaaaatcgcgaaaaaattggggacaaaccaaaattatatttataaatgacaaaaaaacaaattgcaaaaacattgaaaattgatcaaagggccattttcaattggaagaaacaatttcaaagaagaattgctgtaataacagaagaagaaaaaagagattgtagcttttcattttgaaaataaaataatttttttttaaaatttttttgctattcatagatttctttactaatttttcacttttgtcctggtgtatgaattatttatttatttttggtcattgtaaattaatttaaaatatttctgattttgaatgaaacatttattgatatttactagagaccggacaactggggtcggagggatcccgactgaatcccgatcccgatcaatcccgaacattttggaaaaacgatcgggacggatcccggttcgggatcccgaccgaatcccgatcccgatcaatcccgaagattttttttcgggatcccgcgggattatcgggatttgctcaaacccattttttttttacattttgtgccaagttttgttcaaatatttatctaatatttataattgatcaattcgattgaagaaaaaaagggatgtgaattatatcagatttttatagaaatttttcaaaattggaatatcatgcccaaaaaatcagattttcaaaaatgagaacatttaacaacatagccttaaataatttttttacaatttaataaattaatatcaatttttgtattttcgcctcagatgatcatttttaataattttgagaaacggaatcaaaaaatcagatttttaaaattttttttgctgcaaattttttcaaaaactttaggggaaccggggggggggaggtcggcaaaatgcctaaaaaatttgccaaaatttctaaaaaaattcatttttttgggggtttacttttaagaaatttccaaaaagtcgatccttaggggtgtattttttcactttttttccattttcatgtgaaaatttgctaaaaatggccgaaatatggacttattcccgaaacccccaaaatatggatttatatggactaaaaaccttcaccaaatcaaaaaattttaacgtaaaaatgatatttttgatcccctttcttcatagcatatgcgcagaaaaaatatgtttattcaatataatttataaccctactacatatttacggaaaaaagcaaaaaaacatatacaaggtgacattttgatggaaaatgcgtcagtgaatcaggatttattcaaaaacgagtactttagtattattacctgaaagcataagcgttgattggtatgtaagcaagcttacaacaatccattagagtataatttcatgttattagtgaacctttaaaaacttaattgaaaaaattagaacgaaatttttctacattctgaccttttgtaatacaatacttaatgaaacagtactttattttagaaatactgtattactgatgcattttctactgacgctttttacacttacgctttttccgggaaccttttaaatcagttccccgataaaagctgaaaaataatttaatgaaataacctataacaatgagagtataaattttttaaaaatttctcaaaggttgagatgaacattggcagtgtggggagctcggcgatgggctctcggacagccgaaatgcaccgtcgaatgctgcaaaggatgcgcatggacgcgtcgaatgtgccggaaaatcgagcatttaatacactggcacggggacttttccaagcctggtaagtgcaaaagagagcacagaaaagtgtcacttttatagaaatttcttagaattttcattaaaatcgatacaattttttcttcgttggtgccaatcagcacttccgacccatcaaatattcagaaacttacttaaaatccaaagattcaaatcaatcatgcatgatggaaaaaagaatcctaattaacacaagctgaacgtaactgcattttatcacagacaatccctgatcacggacaaccaaaaacgttgtgattcgcttgatccgtgatcatgtccactccgccctgaaattaattattttcacttgatttttctaactttaaaaccctatttaattgacccctttttgctaagagaaaagtccaaggcgattttttttctcttataatttattacacagatttaaaaagcatttatttttaaggctccgattcggcaatccgaatgccgtggtcgtttttgccgttctccaagggtcaatgcgccgtttcgatgagcgcgccgtcgaatatgagctgcagcgaatttctgattggcaagtgaaagttgtgcgcttatcgtcgaaagaggcctattcaaagtgagttggtttcgatctacgataaatccggcgcctttgacagttggcatttaacggtgatcccggtaagatccaggggaagtggccggcgccgggtttttacccatattaaaaaattcaca

SEQ ID NO: 11213 - DNA, 2513 bp, Heterodera glycines
ttttgtgaacgtaattgttaaccatgctcatcgattaaaacatttgaaaaagtatttgcgaaaaaaggtcaaaaaccatttgaaaatttcgtagaaaaaaggtcataacatgtgtcaaacagatgaataaaacgaaaaaaatgaaaaaatatacgagaaaaggtggtaggtctaaaaacaatgaaacaaatgaaaaattgtaatatatcgcatttgacagcgaatcaaaaaaattcttagagatgaaaactaaataaatgaaatacgcgaaaaatataaagatagaaagacagaaaaaacaacttaaatatgaccgaatttcccgccctccctccagcatccaatccctccctcctcccctaccgcgcttttcgttgaaaacatgtgaaaaacaaatgaaaaacaggtgaaaaatatgtcaatgtcaaattaggataacagctgaaaaagagtaagaggctataaatgttgaacaatgacgcattataaccttaaaacatggacaaagttttattaaaaatttattacggcctcaaatccccagcaagttatgcaggggtacaaaaaatattagctgaggcaaagaaagtaaatccaaaaattacacccgaagatgttaataaatttctcgaaaaacagagaacatacacgattcacaagcccataaggaaaagattaccaagactgaagacaatacccagttccaattctgatcacgttcatcagtgtcagcttttcttgggtccgttcattcaccaattcatatggcacaattggcgttgtaggagccaatggaaattgaacaatgtaagcggcggccaaagtggtggcacggagaaatgcccaaacaaaaagccaagttgatcaaatcaaacgagcgctggactcaaaggcaagcacggtcttgttcgattcccctcaatggaacggacatctcggctgcttggcaaaacattgtgacttttgaacagttgaacagttcatactcgtaaaattggtatgaacaaaaaaaaagtccaacattttagtataaaaataaaacttttttttttgaatttaaattttttcttttattttgaagttgaaatttttttaaaacaaataaaaaagaaattgggcggcacagctcggtctagtctcggctaacagaaggcaaggggaattgaactcataaggcccaaggctcaaaagccaaccctttaccaactgcgctacgccgcctatgttgattcggcattttctaaaattttgagctgatatattagagaattatttttttataaatttaaagttaccaaatcgctctcccatttttgatagcagtataataccgtataggaatattgaaattaaatccaccatgttggctgataattttaaaattataattaccaaattttaaattaaatttaaagaataaattttaatctatttatattgtgtttaattaatgttttttatttattaaaatattaattttaaaaattaattttggtattttttgaattagagattttgcaatttgatgacaatttttaagaaattaaagagttctagggagtcgttgcctgaaaattttttttaatttttgctcatttgttaataaatttttatcgtgccacccctggtaatgaaaaaatttggtgaaaataatttttttttgagagtgtgtaaattactcttttttttaaatcttcgataattctcagcgagctgagattttgggccctcagcttttcaattcagttaaatgacgtgaccgaccctagtttaaatttaattatatatttcttattattttattgaagtgatttaatttttatatgaaattatatataattccgttaataatttaaaatgatttaatttaatgaataatcaaatgaaagaaaaaagtcgaatattcaacagcattcacggtgattttatcataaaatttgttgaaaattttgtcaaaataacattcgttaatttctgtgtcaatcatttcttattgttgataaattaaaatgaattttcatgtggacgattgaaggcgacttgaccctgttgagaattttcatttctaatcaacgatcgctgaaatcatatggcgcttcaaaataaaaactttgtctgctgcgctttcaatattttttttataatggcaaactttatatgagagaatgcaataatttgataaagaattaagaaagcggctttttaaatcactgtgccaacgccgaagatgcttaagtctgcccactgaaaatcaccatcttgctgaaccacaacacatctgaatagggggataacaacaaaaacttttccaaatctatcgccattttgattgtacgcttttgtggtctattaaaataataataaaaaaattcacatcaaatattattagggattcaaattatatgtaagaaaaaaagaattggacaaaaaacccgtagcaaaccaaaaaataaaatgtttttccaactattcagagcctggaaaaacaggaaaaaatgtgttttactgtattt

SEQ ID NO: 11214 - DNA, 1597 bp, Heterodera glycines
atatttttttttgaaaaattccgacttccgacatttttggggtcggaattccgacttccgaaaatttttggggcatcggaattccgacttccgaaaatttttggggcatcggaattccgacttccgaaatttttgatgaaaagtcggaatttttctgagttttttttttcaaaaaattagcaatttttgtacaatttatgttaataaattgcatagaaattttcaattttttttccgacggcacctatcggcaccgccggactcaaaaaaaaacttaattttcttgaaaatttgctcaaaatcgctaaattttccattttttggacaaaatttgttgacaatttacattaaaaattacaaaatttttcccggcggcgcatatcggcaccgccggacccttccttccccacagtttctcaaattctctttggataaagcgcgccgcaaaaaaaggtgtaactttcccaaaaaaaaaatccaaaataatgtaaaattacttaaaatattttgatctttttaaaaaatatagaaataaactaaaaacagtttgaaattaccttttacatggttaaaaatttaaaaatttagcctattaaatattttttaaaaaatttattatatttttttttgaaaaattccgacttccgacatttttggggtcggaattccgacttccgaaaatttttggggcatcggaattccgacttccgaaaatttttggggcatcggaattccgacttccgaaatttttgatgaaaagtcggaatttttctgagttttttttttcaaaaaattagcaatttttgtacaatttatgttaataaattgcatagaaattttcaattttttttccgacggcacctatcggcaccgccggactcaaaaaaaaacttaattttcttgaaaatttgctcaaaatcgctaaattttccattttttggacaaaatttgttgacaatttacattaaaaattacaaaatttttcccggcggcgcatatcggcaccgccggacccttccttccccacagtttctcaaattctctttggataaagcgcgccgcaaaaaaaggtgtaactttcccaaaaaaaaaatccaaaataatgtaaaattacttaaaatattttgatctttttaaaaaatatagaaataaactaaaaacagtttgaaattaccttttacatggttaaaaatttaaaaatttagcctattaaatattttttaaaaaatttattatatttttttttgaaaaattccgacttccgacatttttggggtcggaattccgacttccgaaaatttttggggcatcggaattccgacttccgaaaatttttggggcatcggaattccgacttccgaaatttttgatgaaaagtcggaatttttctgagttttttttttcaaaaaattagcaatttttgtacaatttatgttaataaattgcatagaaattttcaattttttttccgacggcacctatcggcaccgccggactcaaaaaaaaacttaattttcttgaaaatttgctcaaaatcgctaaattttccattttttggactaaaatttgttgacaatttacattaaaaattacaaaa

SEQ ID NO: 11215 - DNA, 1680 bp, Heterodera glycines
atcttttggtttttcaggaccaaaaccgcagcatctccattatctgcatccaaggggtcaaacaacaagcccaagcagccttgaattcggcctcggcatctgcttcaatgacatctgcgatgacgtttactgagttagcaatcaaataatttgccaaaattatcttgcttcttcctggtccttacagacgacggtgtacgcaccgacacgcttacctaaaattaataaaaataattttccaaagccgtgatcatcaaatcattcgagggtcagtttaaaaaataaaaatgcctacgaaagacgccgaaacttttaagtctgtgggttgactacgccattggacggaacaggagacgaaaaaattgtttgcttcaagccggaaggagcaattggaccgatagggacaaaatttttgcgcgagtttagagaaaatgaaacggtgaaagatggacgaaacgatcacgaagaagccggcttatctgatgattagggatgcgacttttagtgacgaaaaatcccaaaatagttaactaaaatagtgagtaaaaatgccaaaatagtgagaaaatagtgtcaaaaagtccgaaatagtgacgaatagtgacaaattttcagccaaaaattgagcaaaaataatttttattcactatgcagttgcaaatgagtaggactgggatttttgagggcaaaaaatacaaaataggttcctaaaaaataatttttagaattaaaaatttttgcaaagaaagtgaattttgtgaaaaatttttcatttcttaggagtgatttttgaaaatttttatgtcgattcttaggggtgtattttttgaaaaaaaattttaggtcgattcttaggggtgtattttttggttttattgcgtttttgttaaggaattttccaaaaaatgttgaaatagtgaaaaaatagtgacaaaacgccaaaatagtgatttttaactattttagtgacgaagtcgccaaaatagtgatttctagtgacgaaaagtgacgtccaaatgaaaaaattttaacgcagaaatgcgctttttgagctcctttcttcaaatcaattgagcaaaaaatttagttaaaacctaaaaatcgcatccctactgatgatgatggtgatgtagagctggatggagtcggagatgacgatgaatttttcatttgttagcactttcaatgtcgattttgtttgtttttttgaaaaaaattgacggcatataattttcagaaaattttatttatccccatgggggataaatggagactgggggattatttttcaaacccttcctagactgggggataattggagattgagggattaatggagattgggggataattagagcaaatacggtaggtcgaaatggatgccggattcgtaatcagcgaagatcattcatggcgtcgatcagccagaattgctccgatcgagttgcggaaatgccaaaaaaccggtttttgaaccggttcaaaactcgaaaaattgagacatttcgcactctaactttttttttaacaatcgaatcccgacaaatttggtacttctaatttgtaaaccatttcgttaaaaattagcggaatgacgcgactttgcacaacagtgggcaggttgaaacgaatttgtgcctgagaatttgtctggacaaatttgcctcttggaatgagcta

SEQ ID NO: 11216 - DNA, 1778 bp, Heterodera glycines
ctgctgctttccctgattttaggaggttttcagggttgtaaaccatgattctgacatccattttgacccaattcgaacaccaaacccggattcaaactaaaagaaagaaattcattttaaccaaaaccgattcaaaaaactgaatggaatcaacaagatggattcactgcctttccatatatttgaatcaattttggacaataaatgtggactttggtgaatgaatttttgctcgagttcggggttcgaaatttgtcgacatgaaggtattgctgatcagcgaccccgaaaatcaagcgttttcctttttgcgtgtgtgtatttttgtgttgacaccgaggaactgaaatcgaccaatatttgtgaaacataatcaaacaacttttatatatacatacaacaccacattcattatataaacaatgtatgatcaatcatcgttttacaaatcttatatcctcgctcaatttccaatattagcgcgagggttcatgctcccactcggcgtcttctcttgcttctcttgctgcttgggtttcttctttgaccgcacggaagcagatgccgaggctggcgttttgtggctggaaaaaccaaaagataattttgccaaattatttgattgctaactcagtaaacgtcatcgcagatgccatcgtaccagataccggcgctggagatgctgcggttgtggtcctgaaaaaccacaagataattgccaaagtatttgcttgctaactgagtccgcttcatcacagatgtcattgaagcagatgccgagttcttttgctgcttgggcttgttgtttgaccccttggatgcagatgctggagatgctgcggttttggtcctgaaaaaccaaaagataattttgccaaattatttgattgctaactcagtaaacgtcatcgcagatgccatcgtaccagataccggcgctggagatgctgcggttgtggtcctgaaaaaccacaagataattgccaaagtatttgcttgctaactgagtccgcttcatcacagatgtcattgaagcagatgccgagttcttttgctgcttgggcttgttgtttgaccccttggatgcagatgctggagatgctgcggttttggtcctgaaaaaccaaaagataattttgccaaattatttgattgctaactgagtcagcgtcatcacagatgtcattgaagcagatgccgaggccgaattcttttgctgcttgggcttgttgtttgaccccttagatgcagatgctggagatgctgcggttttggtcctgaaaaaccaaaagataattttgccaaattatttgattgctaactgagtcctggcagataccggcgctggagatgctgcggttgtggtcctgaaaaaccacaagataattgccaaagtatttgcttgctaactgagtcctagcagatgccgatggaagatgtgctttgcgaagtgccatcgtaactcctctttcaacgcaagcgcacagaacataccagaaatacttaaaaaaataattgagaaatttcattaaaaaaatgctttataattaatttgacatacaatgccaccgaaaaacgcaataatagcggtcagcaaaagatcccactgcatggcgaaataagattaatgaatgacgaactgagcaacattttgtctatttatacatttgtaagtagtgtatgaataaaaactgcttacctaaactttgtttgctcttacaattcggaaaaaatcactacttacaaatgtataaataggcaaaatgttgctcagttcg

SEQ ID NO: 11217 - DNA, 2554 bp, Heterodera glycines
cattccccgggtgattcgatagccgacgggcgattaaatggacaggcgaaaggccccgggcaaaatgcgattggcgagaaaaaattgggcgcttttgcgcaatgacgacaatgggatgagtaatctcacaagggaaatgttcataaagctatgctcattagggggaggggcaaaagcaaaaaatgcagcaaaagcagcagcaggtggtcgtctttttggattgggtccctttttcgaccggactttgtccctttgctttgtttctcagtgatttcaaatgaaattaaaaattgtcgacgcattcgcagacagagaatgggagaagccaattgggacaatttggtgagtttttcttctctcatccaccgctgatcagaagagaaaggactgatcatcggatggacaatgagtcattcgttcattcgttcgtcggcccatctttcactcctcgtcctcctcctcgtcgccaacctcagctaaaaattagttttttttttggattttcgctggtttccagccccattctcctatgcttcttccctcttcccctccccagtgattctcccgcgccctcctcttcggttatgcctaccagaggtgccgcgcgttacccgaaacgctacacccgaaacccggatttcagcgacccgaaacccattcgtttttttctttctccgcggtaaccctggtccctccctactcgtttcccctgcttctcctctccctctccacttacgctcttcctcttcctccgcctcctccggcgtcggtttcgccaactttggcgtggttggctccgcctcgctggctcctccgccctttgagctcgcttggctcgcccggcgtcccgtggcgtccttttccaccttcttcgtccattccggcttctccgccttgttcttctgctgaaatgccaaacggcgtccagcaaaagtccacgcgggacaaacgacgtctccgcgtgactcttgctggacacaggccgaattctctcatttgtccgcccgtcggacaaaggacggacagacaaattgttaaccggggaataaatgcacagcaaaatccatcccagagttgccagtccactcccgccagtatatgatcatagtggtaaaatgcaaatgccatccctcttcttcactgtcaccctatggctacacgacattttgccacccggacatttgaccaccaaagacaaaatcggacgtttcgccaccaaattaaaaaaaacagaataaggccgatgttaccaaaataaacttgttttgctactcgggcatttctccaaactcctcacattttttgcaaaattcattcattcttcaatcattgattgatgaaaagtccgactttagctttgatgctgaactgtccgtttttgctgtcgcctctcccccaccctttttccctttcctcctcaatttgtcccaccttgctctccaactcttccatcacgttcttcttctccaccgtcttcagtttcgatcggaagtcctccttcggcgcggtactttcgccctccgttaatgccgctttgcggaatttgttgtcatatttggacactttcttcagcgttggtttcacactttaatatcaaatattgtataaaaataaataaataaataaattattattttttttaaatctcacaattttccacgcaaatcattcacagaaatggttatttcgctgatctgaaacggtgaaattagcgtttcttctttcgtccccaattcgtaaatgcttttgctttacctccgcgtccttttgcgagaccacgaagttgatgtcgtacttctcctcctccaacttgagcatttgctggaacaggtcgttgtacatcttctccagctgtcctaaatccgagcactgatctgtgtctcccccctccctctctttctctgcctttgtcctcaattgcgtcgatattcggacattgcggaattcgcttgctcagcacattttggcgttccgagtcaagctgtttctgctggttcttcaggttctccgctgctttgatcatcaacagtttcttaaatcggttcattagccccttaattagtataattagctctccaatttcacagtaccctcagcttcttcttgcgctccggcgtcaggaaacccttcttcttcttgccctttttccctgcttcttccaaccgtttgcgcacttccgcctttttggcggccaatgcctgccgtttggcttcctgaaaatccgcttttttcttcaactttccgttttggcattgtcttttccaattcgtacctcatccgattttggtgccggtgccgcttcaatgtccgccatttttccgctttccgacttttctccgattatttgtggaattagcactaacgaaatggatccgatctgttgtgggaggttggccaaatcactactcaaaagcaaacgacggctgtcctcgcccggggggttttggctatgttcctcaagtgaagaagaggagacgaggaaataatccctccccccacgcaatgtgggtgggaaggagggaaagcagcagcagatgtgatcgggggggatcaa

SEQ ID NO: 11218 - DNA, 2135 bp, Heterodera glycines
gggggatcaaggaaggggaatagagagacagagagagcgagaggggggagagagtgaggggagagagagaggggagagagaagtctctgggcgggaggaatgcgaagagatctctcctcctcccccgtttggcccaatgacttagccggaggcaaaagacgaggcaaaagacagaggacgttctgttcttcccagcacttcgccttctttctctctggtgctgtgagagtgaaaagaacagcagcaatagacttgattagtgttatgtaagcgctaatatagggagtgaaaaagccgatcggatcagattgattaaagaaaaaagcggggaaaaggggggggggaaggacgattacggtgaccaacagaacgaccaactgtgctgctcacaagtcagctcacaatcagtgctggtgagtcgctattgttttgtccatgcgatgatggattagtgcgagggggggggacgaagggcacagaattagccaaccacacaaacggccaatgcatcagttttttagaaatttttttttctgccatagtatcaatttattattgttgacgtcatctttagcccaatgttggccatggcatcaaagggatggatggcccaccggtccgatcactttccgctgccctctctcttccgctttttctctcatctcccctctgccgaacaactgttgccgtcgccggaggggcaatgagtgggcgttgaagaaaggcaaatggaatgaatgaacggaagaatgaatgatcaaaaagtgaatgcgttttttcagtattcggggggggggggggatattaaaaatcaaatgaacatatcaataaaattttatttccaataaaacaaatttacaaaatggaaattgatcagaatgcttttcattctctgttcggagacggcggcggacatggcattcggcactgccgttgttcgagttcttgggcatggcaattcggatcatcggggtcgatctgaatggacgtttgcttgtcagatcgaaattgaccagcaggtctcttctcccttttgatcagtttgtcggtctgatcactccccccctcccctctcaccagtccgtatcgatgcactcgtcgcctccgcgtttggtacccaatgccgcaactgaccgaacatggcgaccaaatcgaccaacgactcactcggcatgtgctcggcgctaaaaggcaaaggaataccaaagaaattatcgagcaaagaatccacttaccgcacgggcgcatttcgcagtgcctttcctgcactcggtgttcccgcgggggacatttgttgccaccgttttgaggcaacgacttaaatgaggtccaatctttttcttttttccttctctctctcctaatccacataattcccctcttcctattctctattatccatatacactcttatttccctgctcctcatcctattctctctgactccctattccctctctctctctctctctctgtctctcgtcatctctctccgctctttctctgccgctttacctttacactccgatgccgactccgtttgcctctgccgcatgaaactgagcattcgctccacggcgaccattcgctcatttcgcagtccgtcgctgtgccgccgtctccgtccgtcccttcctccccctcttcgccgtcgttttgccaccgttcgtcgccgccaatgtcttccgcaaaaggactgatcaaatcagcaccggacgctgtgaaaacaatttggccaatttaaaaaaagaatgccaaaacggactgatgacgggccgataattggggatgcagaactgcttgcactcctcctccgattcgaattggtttcgattccctttgcagcccgagtaaacgaaccgctcgcacttctgctgcttggtgttgaaccaatagcgcgggaattggccttggcactggcccgtctctttctcctcctcgcaaatctctcaaaaaggaacaaacgatgaaaattaaaacggaatcattaatttgctaattaccctccgaatgggcactcagcaaacgccgacacgagtgaacgttgcaccgttccttctccatgagatttttggttctgccacattccttcagccaaaatgacattaattaataatatttttttttgtcatttt

SEQ ID NO: 11219 - DNA, 1583 bp, Heterodera glycines
ttagtatagtatatatgaaaaaatcttcctggcatttcctccaccgtgatcagctagtttaccaaggccaaacgatcggtccgtcattccctctccccctccccactcattcattcgtgcgcccccccccctatccaaatgtcccccttttctgccgcaccattccgtccagtcgtcccatccgctgaccaaacaacgcgaattaaatgcgtccgagtcggcgccgcattcgctttgtttcgcattgcaaaattgacgttcggtggtctgtcgatggcaatggaacatttgcgccttcaccgggaaaacgaacactctgaattcgagattctccaccattgggtcattatcgcactctctctctctcctctctctctctctctcattcatttgctaattgtctctctctctaagtgcccaattaattgctaatttgtgcctggatcgcattcgaatgcctttgccgcaagtcgcagaacacagtgaccatgagccccattggctgaccgcgcactcccctcaaatggaaaagcatcgatcgcttaaaaaccgtcgaatcctccgctggccaaccaacttctgtcccggtattcctcgtcctccgaagtgttcgtcgaattgaacgcctcgcgccgataggcttcttccgattggcattgtgccgtgagaacattcttccgtctcagcaccaatcgggcgagcggcgcaatctcttcgctgtgctcgtcaaagaacggcgagcgcgggtcgtcacgagtggtaatcgcagcgattggcactcgcggctctgccggctcatttggcgactgaaacccttcgattgacttgctgttccgtgcttcatcccctgcccacatgctgggggcagttcacccccccccccaccgcatcgtcccctgggaaattaaaaaaaacggggggggggggggagacgtagtgcacccctcccaccgtatccccaccccattcttctaccgtaccatgtacgtgtatccgttgtcagtgcccgcgtcgaacggacgcaagtcaaacgcgcgttcctgcacccaactgcagtcaggcaagcacaagttgacctcggagatgccgacacaccaatcggggcttggaccaaacatcgcggccaacgaggccaagtggtggtatttgttgacgcgaaagtgtccattggtacggccctgtacttcttagacggcaaaagaaagtgcaacaaaatgccaaagcaatgaaaaggctggcggcggggccctcccctccccccgggcgccgctcctccggggggggggggcttttccccctcccccgggtgcccctcccccactcaccggggtaccaaaggcccttcattttgacgattgtccgcacttcgcttgcattcgctttcatctccgcctcgcctttgtaagtgtttccccattcggcaatttcttttaaaccgtcgctaaaagcaaagaaaattcatccattttaataatggtaattaattgcctcttcctacagtatcacctcgcaatgtctccaaaacgccacaaacggtagtgtttggaatgagaagcgccaagaacatcggtgaaatgggttaa

SEQ ID NO: 11220 - DNA, 2963 bp, Heterodera glycines
attttcgaaaaaacaaaattctgactaattaaactatgaaattttgaaagattacatttattttgaaataaattaataaaaatgttcccttttttattctgaatataatttaaattttggaaaacaaaaattctgactaattaaactatgaatttttggaaaatattgcatttattttgaaataaattaatataaatagttttacttgtttttattgtgaaatataatttaagtttggataacaaaaatgatgactaattaatttgtgctttttttggggaggcccaacctaaaattattttaattttgtacttcttttctcatgcactttattgtataatactcaatttttttttgtcataaaaccgaacggtacgccaaattcacattgactaattttggagaaattataaatttctcaccgaaagtaccaaataattatactcattaatctagctcataaaaattttagaaaattattaattgcctatttctaattatttttttttgtaaatttttaaaattaatctaaaaatggaatttaattaaaaaataattttttaattttagcgtttttttttggaaatttttgctcagcaaatgcaattaattcaaagccccacacacaatcaccaccagaatcatcataatcaccataatcccaacaaccaccgttcatcctccgtcataccgtatcgtccgcgccgaatgacgtcaccgtcgacattcagtgcggcacggctttttgccaaactgtccggcaacagcaaccaacaacagcagtccattgagcacaaaatggcggaacttcgagcagcatacgcaatacaaccagcacagacgccgacggtggcaaaaaggtggagtcaaaatgggagggaaattttcattaaattttaattagtttaattatagaatattaaaaaaattatttatttaaaaatttttgttatttgtaatatatgaaaatttgaattttcaactttcgaatttattaaaatatgaatttttaagttttaaattttttcattcatatggtcaaccatttttcatagatagattatttttaattattaaaaaaaaatttttgtcgatttatatggaaatttgaattttgaaaattttcgtattcctcaaaatgattgggaattttcattatcagcataccttattatatgaattttaatttcaattttttgttctaaatgcggcaaccatttttataaaagattaaagtttaattttttgaataaaaaattaatgatctgtttcctaaatatgccattgatgccattttaaaattccacaatattaacggatttaaattttaagtgctctcaaaaagaaatgttgggatgtagcgaatcggcggaatagaaaatggttgcttaatgaggagcaaatggattttgaaaaaaattgtgatccataaatgtaaagatagttaactgagaaaaaccagagtttatatactaattgcgtatcttaaaacagattttattccattccaattttcaaatcctttaaaattcttttaatttaaattgtttaagactcaataatttttaaacctttaaaactcaacaatttcaaatcttttaaaactcaattaatttcaaattcttttaaccctcaaattatttaaaatttgtttaattttcaaattctttaaaattttcatccttttataccattttcaagtgcatttaaagatattgaaaacaaagcatttcatcccatttactataagctttttgggaaactaaagtgtgcttaagcaaattgtttaaaatttttgtaattttatttgaattaaatatttttacaatgtaatttttatataattttttggaaaataaaaaattttaatggttacattgtcagattaaatgaaataaaaccaattaattcatttttagaaaactttccataataattttaataataaaaataaaattgtctctaattgaattgataccttattttagttctatgctcatatacaatttattttctatcaatcctaaattaaattaagaatatttatacatacaaaaatttaattaaagaaacattttttcagtggtgccaattccacccaaaataaatcgtcggcaccaccacctcgtcgacctggacgaacctcattgccaactccgtcactaggcgacatgcttgaactaccacaattgagtcagtttaaataaataattttcatttatttttattttttatattaaataggcacaagaaattgtaatatttagaaatttaatgaaaaataattaaattgtttaaatcaaaaaaattttaagtttaatttagtggggggagggcgtctgtattttaggaaatacggtaatattttattacctaaattatttaaattatagttttttaataaataaattttatttaaaggctctcgcagttgtgtaccgtcgagaagagcaagcacagtgactgcctgtttttcaccagccccatccctaatggatttggcatcgtctgccggacttttgtcgctgtcgccaagcggtactatttttaattttggaattcgtcattttaataaattctagatcctggatcctgagttttctggaaaaccccagaaaaaaattataccctaaaaaaacaaataaatccacctaaaacagcatttggctcctgaaaattcaggtctgacctagaaaggttgaaattttattttcttaaagcggcctggttttggtcactaaaatccaggtctggtaggatgaactccaattttcctaaaatggcgggatttggaatcctgaaaatccaggtctctgtgtctagaatcttgttgactctaaattgatcaaaatggttgggtttgtatcgtgaaagccaaaatcatgtttactaattttaattaattaacagtgattaattaaggagtttaaattacctaataaaactggttgattaatttttat

SEQ ID NO: 11221 - DNA, 1594 bp, Heterodera glycines
gtacagtgatgacatagtcagagcatcggttcgcccagcagcatcagcaaccgctgcagccagaaacaaaagtggagcagagtcgtccgtgacaacatgtcactgcaacatcgcttgaacctccgccgccacatcacacgcctgctgttggtggccgcgctcgcgtgttgtcgccggcgaccaagcgtcgcgtgcatggcacaggcagcgacccaacaacgcagctgacgccttcgactgctgttgctgctggtggtggtggcggtgttgcagcggcgccacaactgaaccagcagcgcaagagtggcgtgtttgccaagttggccgagagtgggaagaagcagcgagcacaacagcagcagcatgcggcgactgatgcgacgggcgagcgaagtaagcacatcaattttgtatcatctaaatatttgtatgtttatattaatattaatttatttaattattttcaaaatattctaaaccaaaaaacatatttttaattatcactatttttaaaataaagtttattcatgtgaatatttgtatattttgtatgaattcttaaaacaatttgaatttcaaaaaattacaaaccaaaaaaaatttaatttaattctcattattcttaatttaaaaaaatatttgttttattcgtgtaaataatttagttctttgtatgaattttttgaaataattttatttcaaaaattttaaaatgatttttaaatcaattttatttcgatatattttaataattattcatttctcagtatttttaataaaaaaatatttaattacatatttaattgattgcaatatttataattatttttgattgaaaaatattattttttttaaagttttaaaagatttaaaaattttttcatatatttttagaggcttcattggttgaaaatatcgctcagttggctgaaatttgtgaggccgtcactgacactcgtttggatggttcggaccatagtttggctgtctaccgactacttttggccaaattggaccaaaaaacgaatgtggaatggttcgagagtgttctggtgccagcggtgagcaaaaaataaaaataatttaattttgtaaaaataaatttaattattttttgcgaaataatttaatttaaaataaatgaattattttttttgggaataattgtttaattaatttaatttttttagatacataaatttaatttttttgagaaataatttaatttaacttatttcttagaattaacggctttaaataaaattgttatttatttgaatttttttatttaaaaattacaaatttaaggcattgcttgagcgcaatggcatcccagtcagcgagttgtccctgctgaccatgggcattttggtgtggcgctgcacgctgaacaacgcgcgcctgctatgcctcgttaacagcatgccacagcaacaaatgcatgaggatgggaacgcaactgccgcctcgtttgaggcgctaaagcgcgcagcaaacaaatataagtgtatgcaccatgtgttgaccattggccaacgacgaccgtccgctggcagcacgcacagctcatgctcaagctcaagtcgcaggtgcg

SEQ ID NO: 11222 - DNA, 1154 bp, Heterodera glycines
  unsure (1)..(1154): unsure at all n locations
tttttcatgacttttttgcatttttntgtgacttttgggcattttttatgactttttcgtgacttttgggcgatttttcatgactttttaagtcgactttttgagatttttcgtgacttaaattcccatccctagtaattaatatttaaattaaaataatatntaattatatttttttcaattttttnnagatgtgccaatcgcgcaatgaattgccagaatttccttcccatgctctgagagatgcaaaatttttgttagcatcaaacacaaacccgttgttctgtctctgctttccgttaacatgattttattgattttttcaatcgattttttcctgtactaattgcttttacctaaatggggactcatttcaaaaaattaaatttagaataaaaatagattttctaaataaagttttaaaaaaccgagtcttaaaaattccaaaaaaataattattttttaattgatcatagctgtatcattttgaaaatataatagattttgcctggaagtcctcataaaaaatatttctatttagccattaaatttgtcttattgtaattagagtaccgttattttgtacgaattctcgggttgaattgaataaaggttgtttcatttgtatgaacatttttaataattgaaatcaacaggataggtttaatgaaaattgtttaaaaaattttttaatttgtaaattttataaggttttaaagcatttttaaatggattttttccgcgcgggagagtggaaatgtccggaattccaggtggaatgcgaaaccgccgatcccggtacaaaaaattgctatggtcgcattttggaccttatcttattttagaaattaatgactcatcagcatttttggttccaatcgataaccggaacactgagccgagagccgaaagaaagagtggggaagccctttacgcaattagggacaattgcataaataggcggtgaaggagggataatgaaatctgatatcccgggaattttggctccggaaatcaataaaatggagaaacataaaaattgcttcttttcagtgatggaagtcgatgaggaagacgacgataaaacgtttgactgggacgtcctgtgtgctgaggacctggatgaccacgaattttgtgccgtgttccgcgtg

SEQ ID NO: 11223 - DNA, 1589 bp, Heterodera glycines
  unsure (1)..(1589): unsure at all n locations
aaatatcgacgaattatatgcagatatgacattaactttcccataagtgcgtaaattttttatcatttgccaacgacaaaactctacctgacaaaatgaagatttaaaaagatttttatttaacacttttaattaaaatctgttttgttttgcatatgacaactttcatttggcgaattatgtgcagggcctatgcacgaatttttcaggcccgaaagcaatataaaaatgtattttttcataatgttccatcgcaattctcgcgccctgaaggaatgcgcatttaataacgaatattgacaagcgattaaatagaagcgaaaagtgctggtaaaaataaccagttagcaagtttactcaagcttttttttatattaacactgtaattttcacgaagaaattagtctaatagcaggaaattatattgcgatttttgaaagaaacttctttcatggcctttggtgtgccaaaaaacgaataataaaatttaaatgaatcaagattttaactttttaatgaaagacactttttgatattgcatatgacaacactcttccgacgaattatgagcataacgttcagccgaaattttcagttaagcaagttaattcaaaaatttttttttcattattttccaactccattctcatatttgaattaatgattatttaatagcgaaaaatatcgacgaattatatgcagatatgacattaactttcccataagcgcgtaaattttttatcatttgccaacgacaaaactctacctgacaaaatgaagatttaaaaagatttttatttaacacttttaattaaaatctgttttgttttgcatatgacaactttcatttggcgaattatgtgcagggcctatgcacgaatttttcaggtccgaaagcaatataaaaatgtattttttcataatgttccatcgcaattctcgcgccctgaaggaatgcgcatttaataacgaatattgacaagcgattaaatagaagcgaaaagtgctggtaaaaataaccagttagcaagtttactcaagcttttttttatattaacactgtaattttcacgaagaaattagtctaatagcaggaaattatattgcgatttttgaaagaaacttctttcatggcctttggtgtgccaaaaaacgaataataaaatttaaatgaatcaagattttaactttttaatgaaagacactttttgatattgcatatgacaacactcttccgacgaattatgagcataacgttcagccgaaattttcagttaagcaagttaattcaaaaaattttttttcattattttccaactccattctcatatttgaattaatgattatttaatagcgaaaaatatcgacgaattatatgcagatatgacattaactttcccataagcgcgtaaattttttatcatttgccaacgacaaaactctacctgacaaaatgaagatttaaaaagatttttatttaacacttttaattaaaatctgttttgttttgcatatgacaactttcatttggcgaattatgtgaagggacctatgcacganatttttcanggtccgaaagnncaatataa

SEQ ID NO: 11224 - DNA, 2592 bp, Heterodera glycines
gtgatcattttggcagctgatgcagaaccattgggaaatcattttgcatttgccattgttgtgcgaagacaaaaacgtcccatatgtattcgtgaaaagcaaggtgattgactattttgaagttctaaaataagttaaatatttaggctgcacttgggcgtgcatgcggtgtgactcggccggtgggtttgctttgctttaatttaccgaacaaaaataaatgtcaatccatttttatttatgtatagagcaattaagaaaaacaccaaaaagataaccttttattttattaaatacctatgtatctagggttttataagactcgctgcgaatcctaaactttgaagaactcccttgtaaacagggaatttacttgttcgcttattcctttaggtgatcgcaacttcgatcattcaaaatgaaggatctcagttgaagtctcagattcagaagattaaagaagatgtggaaaagttacttatttgattaaaaatttgcaagcttatcactgttttgttattccatcttgttttgttgtttcatgatttgttcgacgacaattaaaatgactctgaaagcaaaaaaaatcttattcagtattaattgtttactacttacctttatatttaattaattggaaagtttgtttaaacatgaaatatttgctcatttgtacctttaagtgcttttttaggcttatcaaaacattttaaacagaatggctgacattaatgctattttggatggtactgacggtgatgaagcgctgaatttgaatgatttggatgaaaaagaggttcttggtgatgacgaggaggaccaacaccaaaatcaacacacaacgtatgtgaatgcgtccattgaccacttatttaatggcccgacggataaaacaaatgggatgccttttaaaaaagcactagatattatttacttatcaatgaaaaacactggcttctagttccattcagcagcatttgtatatactgtttagaaaagaagaagtggaagacctttacgacgaagccatggctccgtccggtgcactctctgaaaagcgcgagtcggctgaagttatttcgtcgttgccaagttcgattcagcacaaatcgtcgtttgccatgcctatgatgatcaaatctgagcccggcattgctggcgggtcgcaaagtggcaaacgctactgctgctacattggcaatatgacttggtggaccacagacgatcaactccaggtttaattaacatttgtttcggctttgttctgcttccattcgcactgtgttagttatttcactattcattttttaagaaactgattcaaaccctcggcgtcgacgatatgattgacgtgaaattctacgagaatcgcaacaacggacagagcaaaggttttgcgctggcagtgttcgccagtgaaccgtcggtgaaagcggtgatggagaaattgccaagcaaaaagctgcacgaacaatcgctggcggtgttgccgtacactaagcagtcgttggccaagttggaggaggccaccaaacgctacgaccaggtcccctcttgtttctgcaaaatgttatcctatggctcttctgcattctttgcatttctttgaactccgatcattgcttgtcgggacgtagccagtccaatcaatccttggcattttgtcaccccttacactttgcaaacaaaagaaacgtaaacaaaaaagggagacttgtgcccggcgtagtgcaataacctcttcttcctggctacgtcatttattgtcttatcctactcatttggaccaactttcgataacaatcctatgagttgcattttaatgtcatggaaaatggttggataaactcatttcgcttagccatagcctctaaaccatcaatacttactataatcagtcttaaaagatcgtctcataaaatttacgacattcaatttatttaacgctaactaagaaaggaaagcatttttatgagatgattgaaaatcctttctgacaatgagttaaatccacgagatttttattttcagttcagaatttacaaaagtttttcttccccaatattaatgtattacatttataaagcaaaaacaaattgtctaacttctatagtgcttataaaattgcaacttcctgtcacattttataaaaccatagaaaattaatgttttagatttgtcattttggttttccattccattttcgaaaaaattgtttattcatgagaaattgtatttaaatttcacacctgaatgaattttcaacaaaatttttgtgttttctcagtcatgatggataggaatctcataatttaaaataatgattgcattaaaattttaacattaatggaccaatcaaaaggtgttgggcttaaacacattcataagagcgggaattaattgatggacaacatttaatggaaaactgaaggaaaatccggtgaaagtattcgtcccgttttaagtccgttcacttctcaaaataacaataaagtttggctacgtccccgacaatgagttgaaataaattggaagttttgaaaaattgatttaaaaaaaaatcagagcgcaatgaagtaaactatagatttg

SEQ ID NO: 11225 - DNA, 2813 bp, Heterodera glycines
tttacttttctaatctacaaattatgttggtttctacattgtctcattttttgctaatgttttcattaaccaaaggagcaattaaattcattttttaattgtttttgttgcattcggatatcaaccgaactaccaattaatcagtcttgcttttcccgacgtctctgtcgactgttttttgatgcctttctccgttcgcttgttattcaaaaagtgtggatgaatctcaactgatttcctgcgaactaccattaactattattattttttgtatattggccaatctctttggtcattttccttaagcagcggctgtccactttaggggctacaaattcaaattgtttaatttgaaagtatttttgatattttataataatttatcattaaattataatttcaaacttaaaaataatttgatctatggtcatgtggatttaaactctcccgttgcctgaaaaagtgaagcaacactataactttttattaattacattgtatatttgttaaaagagtaattaaaaactgttctttcgcttgtgtcctgctactgttttcccttcccgtggatgttcacttttgaaatgtcccaggcttggtactgaattacctttcatcctccaaactgctcttttcctttccctcccattttttatgttgccatacattttccgtcctcgcatcaacaaccactctccaagccgtttgtttgtttgttcggctaaggatggctcccctccctccgtcccctctcatcctaaattccatccatcccactcaattacgcattattctgcaaatgtccatttgtatcatcgcttcatcatcatcattatcatctccaatccttccccctccatttttctgcctttgctccttcgtttttcgtcatttccttaatggaccctccgccccctcaaatagcacaaaatgtgtctttcgccttcgctccgtttgctctgactttcgtccgccattaagcatcgatgaggcgtctcggcgatatcgacgacagtgagagtgttctacttctacttaattccccgcgcaaacggagtcgatttccggtccgtgcattttttgtttctaaaatgtgccattttgaacttttttgaatggtttccttttatgtttattcaaaagaggcgaaagatagtggctaaaaatagtagaagatcggctttactaatccgccacaaaaatggaaagcactgaatttggaaagtcacgtcaatccaaagtgttggtatgtataaatatgctattcgttctcttccgaagttgctttctcattattcctaacaaatggacaaatgctttaaggaaatgcttgcaatttccccagtgagttttattaaaatgtcttttgagccctcgttttatttccaatttccctctgttttgaaactgattattatctgtccattaggccattgccagtggtgcaacaaatgtgaccttccaacagcacaaagtgacgcgggaggagcgtgccaatgcgttgggccgtttcccgggctttcgcggctgcactttgtggttcaccggcctttcgggggcaggcaaaacgacaattgcattcgcacttgagaaggcccttgtgcaggttcgcattttcaaatagaaatgattgagttcagtttaagttgggcgttcccgcttacgcattggacggggacaatattcggcacggattgtgtaagaacttgggattctcggcagaagaacgagcggagaacattcggagggtggccgaagtggccaaactgttcagcgacttgggaatggtggtgctcgcctctttcatttcgcctttccgcgcgggtcgcgaagaggcgcgccgaattcacagcaaagtgggaatttgtaaaaggctgaaaacagagattgttcaggaaaatattccctttttcgaaatatttgttgacacgccaatcgaagtgtgcgaagcacgcgaccccaaaagtgcggaattcatcgctcactgtctgtctgtattcatttctcattgacttcagagctctacaaaaaagcacgcgccggcaaaattcgcggctttaccggcgtggacagcgactacgaagtgccgctgcaagccgacctcgtgctgagctcgggcgtcgactcggagacgaaatgcctccagcaaatgctacagtttctcttcgagcgaaacgttttgccagaaaatgtaaatccgctgtcaaattctaaccaccgacaattcccatttccacaggcgatgttccaattttgcggtcagtccgtccgccagcttttcgttcccgacgacatttctcggcgtcgtttactcaatgggatcggtctttgtccagcagttcatctttctttggttgatctccaatggctccaggtcaattcgtttgggttggctttgctccgtttttccattttcttttcgcttttccttaggttcttgccgagggttgggcttctccgttgcccggctttatgcgcgagcgccaatacctgcagtgtttgcattttggccagcttatggacttacaatcgttttgcggtgctgccgaatttgccgggtatgaggaggaagcgattttattgttcatgcgttagttaatgtttgcctttttttgctccagtgatcctttttcgttgaccaatggccacgaaaagccttatccgttggccaatccgatcagtcaatccgtccccattgtgttacccattgacactgcgaccaaattgtccattgaatgcgtcatccgaaagcaacgcaattcgccgaccacgggcgaaatggcaaaagttcgcttattatacgaggtgaacaa

SEQ ID NO: 11226 - DNA, 846 bp, Heterodera glycines
tgacagtagcaactccaagaaaaccagtgtagtggaaccttaggtggaacatttgtattggccagagaagttaagcgcaattaaggacaatatttgcaattgaacgaaatgggggaaaagcggagtgaaagggtgggggagggaaaagccgtcgaaaggaatgtgggggagaaacaccgatgtcggaagggactaatgggacaaaacgttcaatgagtgcacagattgtccgcttttaggccgtccctctctctcttcgttttccttttcattccgccagattttctcctatggccaatttatttttgacccattgagtaattattttcttacgaccattgtccatcgctttggccatctttccgattgacccaaccgatcaatcaaaagaaaggagaagcaacagaggaagagcacagctggagaagcaaatttgtgggattagggggggggggggaaaggagcaaaagacgaattaatatgggggggggggaggagtagcagagcaataattggccaaatgaagccgagcaatgagcagtcaaaacggaattagagacagagataaagtgagaggtcaaatgggtgggcgagggatgggccaaacggagagtgccattgcctggcaaaaggcgccgtgcccccaccgacctgcgcttgtccttctcgacgcttggcaattcttttttctgccatttttggtgttttgtctccttaaattcgtcatcgcctcttcttcttcgaccctcagctgacgcgctctgattagccgaggagaaagtgaaggggaagggaagaagacggaagacgaaaaagggagggaagggaaaatggagggaagcgaac

SEQ ID NO: 11227 - DNA, 1814 bp, Heterodera glycines
aagtgaagggaagggaagagacggaagacgaaaaagggagggaagggaaaatggagggaagcgaacgggggcaatcagctgaggaagaagcgaagggttaagcctaaagcggaacaggcgattggagagcacaaatgaacagtgagtgacttctgcgacgggcccatgccgtccaattttgccaatcgcttcttctctttttgtttctccatttcgtcccattttttcgtttttctctccttttgtatgtttttttctccattttgtctttctcttctctcttttgtcggaaatatctccaatctgagcactgaactttcactgcgcaacagcttatacgcctcggccattccgctgatcatttccttaaaatgaactcaatgccattggacggtccttcctttgcatgccaaagtaatgccatcaattgcgagcaattcatctccaatttgaatggcaccacagctgaaaataaaagaaaaaaatattggaaaaattcaaccatcggcacactttctttgcccatgcataagtgaaaaacaaaatttggtggggaataggggggggggcgggaataagggtgccaatactgcggaggcaatgatcggagaggggggggcatcgtaagctgaacactccttcttgggtggtcgcgtgggtaaaaatcggaggaaataaaaacaaaaatgcgaatggttttgaccattcgtcgtcattctctcccctttttgaaacttttcctaccgatccgcaactgatgccggcacaatgcctttgacggtcactgtgctccgtttggtgtgtccattgctgagagagtgccgaatgtccaattcggcaccaaagtcaatgcccggcactttctcaatttccaaattcaaagtgtcgcccgtccgacgcaaagaatctgagaggcaattaaagcacaataaacagaaaggaactcactcagctgactaacgtcgtattcaacggtcagcagaattcgtccggcacggcttgccgaccgcaaagcaccgaacgcagccgcgagagtgcactcgcggacggacactccgtcgatggccgtcagtcggtcgcccaccctcagccgcccctccctcaaccgtccgtctcattgtgccccaatttcctcctttccctcaccgatgggccgcccctcccgcgcggatggaagtcacagtcaaaggtcgactttttgttgggtcgggtccaaaagcaccgccgcggacggtcagcccaaaagttccccatccatccgctgacttttcgtcgaccaactccaattcgacagttttcctttgaagtgccgcttcgtttctcgacgactccgtcccgtccttgtccaattcgtattccaattccaaatccaccaaatcgctgccgccgtttctcaaaagggccaaaatttggcaatgcgttaaagtgccaacattcactccatttattgagacaattcggtccccgatctgcgaaaatgtgaaacaaaaagttaatttgaacgcttcattttttagaagttcagcagagcttcaaaatgtaaatcgaaaggatgttctaaaataagtggtcgatgcctgaatttggtcgcttcgatgggcgataaagccgggccgaagaaaagaaacaactgggccaatgggccgatctacgccgcctgaaagagcattggattgaatgggccaatgttcaatggcacgtgccagcaatgcccaaaccaagcggttgcccggggctttttcgaatttggataaacactttgccaaaaagcggcgccctttggcacttgaaaggggcggaggaagactgtagag

SEQ ID NO: 11228 - DNA, 1481 bp, Heterodera glycines
  unsure (1)..(1481): unsure at all n locations
taaccatccttcccagcattttgcccatgctttttgtaccctttccccccctctcncctctcctttttgtcattcttttacattggttcattctcagttttcgctgctccttttcttgccaaatccgcgcacttttccttcgctcccttccaaaactgagttcgctttgtttctgttgcttctcctccccgtctttgagattcatttcgctttttgcggcctttgtcatttccaaaaaatggtaatattcgctgggggtgcgcagcgaaatgccaaaaaagtgaaaggagtcgcgcagaacgagcggagaaggccaaagggacggacccccgcccacactttgtgccaatgtttggccaaattgtgccgcggttgagtcggcccattccttcacactttctttctccatatttccttcagctgctttacgccgcccccaacaacaaattcccctccggcgctttttccaactttggcatttttgcacatccatccgaagttcgaacaatggtcacgccagatttgaacactataaaaagccaaacagatcacattatctaaaaagaaggaagaacggccaacaaaacaaaaaggaaggatgtgttaaataaaatgaacttggggaaagttcggcttcgaactttaggattattaaggtttcgaaaaacgaacgaaatgttgggaaaatataccccataaaaagatgaacaatcggggaaaatttattcctagcctaaagacagttaggctttgttttttagattttcccaggttggtttaaatttaccaaaaattaattaaccttatagaaattacatttatgatcagtttagctcaccctcaccacgaagtgcgaaacctgacaagttggagtaatacgagagagataaagaagaaggaaaagaagaaaaaagaaagaaaagaagcgaagagaaaagaagagaatggagtcagtggaggatgggacgaactttcacttcagttgacccctcccaaactcacaaatcagccgattaattaatcgttttcactcgaggggaaacaattgccattgttgagaatagtgcaattgcttctgcttgccattgatcaaagctttggaatgaatcagttcaaaaagattaatgaaaacgaagagaaataaaaaatagcaaaaggaaattgaaaaataaagtgaaaaattggaatgaaattgttgaagtggttaagcgatgtttgcaaaagtgatcataaagggatttgaaggcgaagaacaaggcttagtgagtgtaagggaggggacgcaaaggaatcggaaagagagtggaaggaaaaggaggagagagaggagaagaggagtgaattgagaggaagaggaagaagagaggaacagaaagggatgaaaagaggaagagaagaagagaggaacagaaatagaaagaggaagagaagaagagaggaacaggaaatagaaagaggaaggagagactctagaggtcccc

SEQ ID NO: 11229 - DNA, 1657 bp, Heterodera glycines
  unsure (1)..(1657): unsure at all n locations
ttgatataaatntcggggtgctaattttcccacaaaatttgccgcaatttgttggaccgccaaatctatttaatgtcgttgttttgttttgtagttgctatggccacccaaatatgtttctcgtctctacttcatcatattccatttttgggtcaccacaatttgcacttattcactaagacaaaaaggcaaattcaaattcatcaattcttaatcattttgtcactgaaattcatttgaatttaaatttcactattttgtttaaataattttaaattatttagtagtacaaaatatattatttaaattattttaattcaccataattccctaaaaatcactgaaactcattaaaatttaaatttctcaatttttgtttaaatgcttttaaatcatttaatggtctaaaataaatttttaaaattatttaatcaactataatattttcataaaattccttttgaaattcaaattgtttgaattccaggaattttttgacttaattattggtcctttttttcattcttattttggcattttagctacacacgggcactggcacttaaccataaattaaaaacctatgaattttcaaatgttttaaattcctgaaaatttaaaacgcattgacggtttttccatttaaccctccctaccatttatttcctttctatgctccaaaattataggcccgcccaaaaatttggcggttaacccatgccagaagttgatttatatccgttgggttggattgggttgtgtgtttgcttactgctggtggtccttccctctcaatttggtgatggtttgggtgctcgttaatcctcaaaaatccccagcagcagggggctaatttgcataaatttgacaagccccgcggggccgccgccacttcgtctgtttgacgacggcacagcccccgcgggggcacaacgaccatcaggccacccacttcagcgaacagagggcttgtgtccctcttgcataatctgcgcatcatttcttaaaaatcggcacaatttgtgccttgagggggctctgggggggggcaccatcgccataggaggcaatcaaatgtggaaaaatttgccaaaattttcgcattttctaaccttcaacttatatagaccttttctaactccccgatttttagtagtattttttttagacttttttctttagtcctaatcacgataaatgcttgattaattttgtttttaaatgttttcagtccatttattaaaatattagatttattatattttgaatttttcatcaaatattttatttgtaacaaaaatatcttgtttagtaattgccaaaaaaaaataaacaaaaattttttttttgtacatttttgttttacaatatccaaaatctaattactttttattgaaaaaatatataaattattttatttagtaaaaaagtttttttcaattttttaacaataaaactagggttgctccccgaccccgagccccccgacccgacccaagacgtttttgggacctattccccgacccgaccctcgacatgtcgccccccgaggtccccggcccccgactttttgcccccgacactaattagggggattggggactcttgaaaatttttaaattttgaacaattttcttcataaaatcaattaaaaatt

SEQ ID NO: 11230 - DNA, 2562 bp, Heterodera glycines
gccggaggggggaaaattgagaattttgaccatatttttagcagattttcattttaaaaaattcataattttgtggattttcgaaaaaaattgtaattttctggctaaatttgggtgagatttccgtttgatactctattaaaaaccaaaattcaaattaaataattgccaaacattatgccaatttatcaaaatttaaaagattctgaggattttccccaaaagcctcaaaaatcctcaaaatttctcagaaagccacaaaaatcctcaaatcctcaccgccgggggaaattttgaaaatttgagtgagatttgtaatagattttcaacaaaaaaggctggtttttgagattactaggccgtcccggtcccgtggcactctagttataaccttttgataagtgtctaattgagaattatagcttagaaatagcttctaaacatattaagctttcgaatgataccaatattgttggatttggttaacaaaaaaaagttatagtccaaaaacttgggctggcgccgaaatgtgggcgccgaaacgaccccgaccctgagatgccttgtaaaaatgcctaattggacgcacttttactggcgccaacgaatgcatttgaatcagatgattaaagtgaaaaaaggaagatttcgagcatttaaaaagaaaaattggtttttttgttaaaaatttagttgatcactacccgatcggggtccccgacaccccgacatttgagctccgccccgacccgacccccgacatgtcgccccccgaggtccccggcccccgacattttgccccccgaggggtcggggagcaaccctaaataaaaccctcacaaaattttcactatttctgagtagtaattttacaaaaattaataaactaaaaaaaaacttgcttcaatacctttttgttttaccatgtccaaaatttaattacctaccttttattgctttattaaatttgcgcactttttttttgcattgtccgtaaattttattttctttttgcgccgcccgccgccccccacaaattaccgattttttcgctgtgctttttttcctaacttaaaacgacgatttccttcataaaatgcacacttaaacaacaaccacacacactcacacaaaattgtcctaacgacgacagcaaaaattccccaggaaaataatgggagtgataaaatgccaaaaaatggcatatttagtgccaaattcaaaaaatggggcaaagcccattgaataaatccctcgggggtaaattgctgtcaatcattgtgcaaagcttcgcggaaaaaaacctaactttaaaaacagcaataaaagttgtctttgatatatgcttttgaataattttttcatggaatttttatttatttaaatttttttaatttattatttaaacaaacaaaaaaaaatggtaatggtaaaaaatattttttgctatcaattcttcatcaattaattaaaattttacattttgaacccacccatccattgaatttccattccggttcaggaaactcccacaaaaatgccatcgaaaacagttcgcccccgagggcatttcgcattgattctccccccgcccgggcgatgaattttttccaaattaattaaaatttttacattttgaacccatacaatgaaattccattccggttcaggaaacccctcacaaaaaatggcattgaaatcagttcgcctccgagggcatttcgcattgattctgccccaccccctcctcgcccctcccggcgtttgtactgcactttcaattgctatgccattgcagtgccatacttacatatatgatgatgatgttttatattctgccagggcttggccgcggtgcggtgttgggatgggatgaaacttttatcccctcccgcgcgtctgtggccacgacggcacaaaaaatgccggcccagtcctcgccgccccccccccgccggggctatttgccggttgatgaagagtctctcgcggtttgcgttagctttctcacctcccccccccccgttgcttctgccgccgcccccgctggggccttcgcattttttcttgactttttgctgatggcacactttgtgccaatgccaggggtggggaagtgtgccattttgaacaaccccttgggggagtcaagggccaacacatccccccgaggggagatttcaaagggatgtgcccaacccccccctccccgttgttgtaaaatagtggggaagaaggcgcagttacaccctcgccatcccccgggggcaccacctcctcggactcggacattttgtgttgcctctttactttaaaagcatcggacaaaccaccaacccgacggattaaatgggctcctccaatttaccccgtgggggagggggggcatcctttggcattttaaaaatgttttttttccgctcaatcccttaatcaaaagcatagggctaaagttttaacaaaaaatgttttattacaatttaattttaaaaaataatcacgattttaaatacaattttatctataatttttttaaatgaatttaggataattatttttaca

SEQ ID NO: 11231 - DNA, 1412 bp, Heterodera glycines
ctctagagtcgcagagggtcacgaaaaaattaaaacatttcaattattctgtcccaaaagttccggaactaaaatccagaattttttttaaaatgccaggagtttttttgggattttaattatgcctaatcttaattacactgtatcctacttaaacattttatgtctgtagaaaatttcatttttcaaagttcgaccaggtggcggctgtagcattgaacgcggcaccatttgtgccaacggtgttgtcgcagctgaccacctccaccagcaccaccagcaccattcggcaccgcacaaccacgtgttgagacaagcaccgttggcaccgttgaacaactcgctgctgttacgggcgcgtaacggtcgctttggtggttcgctacggtgtccacctccggcggctacggtagggacgttggtacgatcatttgctgaaccaacgcaacaattgatcaaccaccataacaacaacaacactattgttgtggaacagcagcaacatcagttgccggcatgctgtaaagtgatgcaaaaggacgatgatgtctttggcattgcggaagagcaaagaggtgagagacggtacaactcgcatacagtaagggcaattcgtatggtgatcaggaaaaaaattctatccagtgtcaacaaattttcgtggtttaaaactcggacttcgtgccatgccaaatattgttaacagtctgagttaaaaatgccagaattttctcggaattttgattaaaaagcgaaatttcatgcaaaaaaaaatcccggaattttcattctaagtaatcataaaactttctccctatataaaataataactttcaagtttttaaaggattagtgaagttatttttattcagaaaaatgatttccttaatttctattaagaaaaccatactgtgctacagtacgccacagttcaaacaccaaaaattgtccatcgccactcagaactgcccacaaaaatgcctcctacaacaataatggtaccagcgcaacagcaacagtttgttgtcagcaggccacctccgccaccgtatccgggcattcaaaacagtacagccaaaatggctgtcagcagtggtacggtagcgaagagaggttcgccaccgtcttcaattggcagcaacagtagttgccgatcattgcctccttcaccgtatttgggagcacggacaaatgtgaatgattaaaaaaatgataaataaaacttattgccattcaaatatacacattctgatcagatatatttgatcacactgactcactgactgacaaggaacttgaccaattttgagattaggattcggaaatatttgctttcgtccgtaatgttatgtaaatgatttgatcagagcaaacaaattgatcaacgtaattttgtttacgtttaattaata

SEQ ID NO: 11232 - DNA, 1041 bp, Heterodera glycines
aaaatttatgagtcaacggcaaaaaaaaaaaaaaaactggataatatcagcccatgcttttatatttatttaggcaaattttgccaacaacagcaacaccactttccaaatccacgcgattcgtcaacaccaaaatcaaacagcaacggatcatcaccatcatcaatcacatccaataaaccattttcatcatcaaattgtcttggaaataaaagtattgaaaatatgaatgacatttgattattttaattgagtttaaaattaattataaaaaacaaaaccatgagaaagcattaaatttttaaaaattcaactcacaaaatattttattaaaaagcaattttgttccaaatgaattaaaagaattttgagaaaaaattaataatttaattataatttaaataacaataacactccttggatgtgaggccaatttttcaattttgaaaatctcattgatgccttaaaaagcttaataaaaaagcctcattataggtcataaaaaattttattttcggcacataaatttgggattacatataagaaatatgttattttttaagcagatcgccatcataaaacttaaaataacttattttaataaacacacatttattacagtatacagcacacagtcgtccagtaatactgtggtggccaacggtagtggtgccaacagttcaacagcgactacagcggcatttgttgccgaagatagttgttgcaaccaaatgcgcggcgagttggtcgcgcgcaactcggtcgccgagcgagcggagaaggcgtccagcgtttatgagaatgtggcgaccggcgagcgtcgtgaagctgctgaaccagcagctccacgagaagctaattatgatgctaatgatggtgctaatgaccataattatgagcagcagcagcagcaacatggcccgccacaaaatggccagggcggtgaacggagggaaggcccaaagggggagatttggtacgaatttggatgcgtctgatcagtgatcgatgtgggggggggggcatttttttacaggacct

SEQ ID NO: 11233 - DNA, 1456 bp, Heterodera glycines
  unsure (1)..(1456): unsure at all n locations
aagaatcgtgaagcgaaattaaaaatcttcagagaccttctaggtgnnnngaatttttgggaatttaatttaaaaaagctaagaaaatccggaaccaattttataacggtgggacttaaaagcattgttaagcaaaatttaaatcgagaataattttcgtgtatattttcatttcaatttcaaaaacaaacaattgatacaattttggtaagaaatagtgcataaagaaggggggggtagacgaaaagagaaatttttaaaataacgcaccccatctgatattcccctttttctgttccacaactcgccaaacgcgactgttctcgttgacaagaatttgtccaattaaggtacttggactttccacagaaatgtggtacaaaattttggaactgtccggcctcacggttggacttaaaagaatcgtgaagcgaaattaaaaatcttcagagaagatttctttgttttgaatttttggcaatttaatttaaaaaagctaagaaaatccggaaccaattttataacggtgggacttaaaagcattgttaagcaaaatttaaatcgagaataattttcgtgtatattttcatttcaatttcaaaaacaaacaattgatacaattttggtaagaaatagtgcataaagaaggggggggggggtagacgaaaagagaaatttttaaaataacgcaccccatctgatattcccctttttctgttccacaactcgccaaacgcgactgttctcgttgacaagaatttgtccaattaaggtacttggactttccacagaaatgtggtacaaaattttggaactgtccgacctcacggttggacttaaaagaatcgtgaagcgaaattaaaaatcttcagagaagatttctttgttttgaatttttgacaatttaatttaaaaaagctaagaaaatccggaaccaattttataacggtgggacttaaaagcattgttaagcaaaatttaaatcgagaataattttcgtgtatattttcatttcaatttcaaaaacaaacaattgatacaattttggtaagaaatagtgcataaagaagggggggggggtagacgaaaagagaaatttttaaaataacgcaccccatctgatattcccctttttctgttccacaactcgccaaacgcgactgttctcgttgacaagaatttgtccaattaaggtacttggactttccacagaaatgtggtacaaaattttggaactgtccgacctcacggttggacttaaaagaatcgtgaagcgaaataaaaatcttcagagaagatttctttgttttgaattttttgacatttaattaaaaaagctaaaaaaatccgaaaccattttataacggtgggacttaaaagcatggataagcaaaatttaaatcgagaataattttcgggtatattttcatttcaattcaaaaaacaacaattgata

SEQ ID NO: 11234 - DNA, 1637 bp, Heterodera glycines
  unsure (1)..(1637): unsure at all n locations
aaataaaatcattcaactcaattcctttctcatttccgccgaaaaaatgtttaaatttaataaaaataaaaattatttttggcactttctattataaaattagaaattaattgacactttttgtgtccaaataattcattccacaaaataaattagaacacaatcattattaactttgtttaactttgtgtgattttataaatgtgttatttgaaccgtaatctgtgctctcaattataaataaatgaccgacattttcagcacaaaatccgtcgaatgaaattaaattgatcacttaaaaagtgaataaaatttaaattaattttnacaacatttttnttttcaanattatnaaacaaatcnaatnttnccanttatancttaattnncntnacatatttttttaaatatatnacaaaaaactncaaattcnncaaaaaaatttttaaacaatgggcgccacaaaagtttattttaccatataagtaaatgaagcaatgtacaaaaaaaatttaagaaagatatgggttagtaactaaaaaggtcacccaagaaaattggcatacttgattttgaaacaaaattataaaaacatttaaatataaaaaagtgacttaatgactttcggtttatcgtattggacattcggtacttttccgttatatggccaaaatttgaatttattaatagatcgcgcgtagtaattgcaaaaatccattcttattgcatcaataaagaaagggcgtttctttctgccttcccacaatttttatgaataaattagcacaaatggaaaatacttatgctttcccctcctcattcttcctccccacccgataataaaatgagccttaattttataaccctcttcaaaaaaacaacaaatgaatttactgcagcaaatttcctacaagaaaaggggattattatgcacagagaacgtgtctgtgattgtggtgacgaaatgaaaagggacaaaagaaaaaagtcaagataaggaaatcccagtttggcgttgcaaaacatgccacgccagaaaaggataagactcaacacatggcttgacccgtcctaccgctcgacacaatcgtccatttcatatattggtggacgcgagaaactacttccgtagttttctgcgaaagagaacttgggatgaaccataattcgaccgtggattaatcgaattatatgcgcgaagtctgcgcggactttctgcttaaacagcatacgggggggcgggaaagataggcggactaaacttaacagtggaaatagatgagtcgctgttttctaaaaggttgcccaattgtccttaacctgtttaagtcttaaactaaatagaaaaaacaatgtcggccggatactcactcctcaatgggtgtttgggggaatatgccgccagaccagagaaatcttcatggtagcagtgccagatcgcagtgcagcaacccttttggcagtcgtccgcgagcgaattgcggaggggtcgacagtaatgagtgattgttggttctcatataatatggtgtgcatcgcgtggctcttttgtgtgtagtttgggtcattttagcttggcgcagacggcacctacaaccacctgcgangtaatcttaactgcaacttcattgatccag

SEQ ID NO: 11235 - DNA, 1805 bp, Heterodera glycines
aaaaaacaacacggcacacatcgccagatgcttgactcgtatttgtgcgaatttctctggcgcgaaaatgtcaaaacccgtggcgcagacccattcgaagagatcttagctcaaattgtggcatttatacctccgaaataattttggcgcgtagtcttagcaattctatgcgcccgttgttgatttttttaaaaaattcaaattttggccatataacggaaaagtaccggacattcttttggctttaatgttcttattgtttgggctggcattggcacgcgtttttttgaatgggttaaagagctaaaaaaatagttgaaaattgctcttttttcatcaaaatcaccaaatggtaataggtgggaaatttaaaattaattagatgaaatgttaccattattttttgtaaataggtcattcagtggtgcgcgaaatagtcgtttttgaaaacccaacatctgaaacatcaaataattattaataaaaaaattagagattattaaattttattttaagcttaccaaattgggtttttaaaatatgaaaaaagtgagaattcgcttaaaaggtgcggagtcgttcttttaaaccatcaaatgaaaattttaaccaaaaataatttttaactttgctcaaaagcaacgaaatttataactattgatatcattcgatagctttaaatcttctctatcagtctacaaaattacaaaaaatttcattaagtttcaacaaagttatggctagaagaactcaaaaaatcaagtttttcgaactttttggccatattgctttagagcaaagcataagcaaaattttttattttatggtttttaacgacatagcaacgcttaaaatgccataaaaacccaaagttacactcagaatatttataaattttataatttttcaaatttttaaattcccaaaatcaatattggaaaagtatttgatttttaaagtgtttttttaaaatattctctgggttttcattatttttaaaattatatttaccccaaaatagagacaaatgcatatagctgctacctctatacatggccaaattgattagatatccgccaatgttaataaaaaaaataatgaccaatgaccgtaaaactcgtgtgttcgttcgtctgttgggttactgtaaaaagtattttgaattgttttggcgcaaaataaatgccaaagaaatgaatggcaaagttaccaccatttttcgctgacccacaaaatgtccagcccacgaaatgtccaagtctcgaatttgagttttttattattcagatgggcctaaggttaggcaaggggtaatataaagggtatattcgtattcagcgaccccgaaaaccttaaaaatcctaaattagactcattttgtttttataaattttgaaaaattttggacatttcgtgggtttttactcttttggacatttcgtggcttggacactttgtgggggtgccccatttttgcatcggatgatcacagaaatggataactaacagcaagtgctacaaaatgaaataataaatgtgccgttaaagaatttcaatccgatgtgactaagaaaagttgcagcaacagagccagtgactgcactaaaataataaatatgggaatttgtatttagtaaaatagatgagtgactgtaaaatacttaattaagaaattaaaaaatcaattaaaatattgagaccaaactaattattcccagacttaaattttgaaatgacagcaaatagtcgatcaattgctgcacaaaacattgccattaagccacaatttaaagcaaaaatcattg

SEQ ID NO: 11236 - DNA, 2090 bp, Heterodera glycines
aaaaattaatttattgaaataatatattaaagaaatttttgcccctcgccccgccccccccccccattttgtatcgtatttaagtctcttctcgtcaccactttttcacgtacactgtaccccgttgtattccactgttctacatttaatcaacacaaatccatttacccttcatttaatcaccgaaaaatctacaccgacgaacagctgttaaatataaattatttactaaattctatacttgttaataaggggaattaacattcatttaaaattgtcatttaatgaattttttggttaaatttatttccttattaaattaaatgtggttttgatatatgttctttatgttgggatgctattattaaatttattgaccaatttctactgggtaatttggaagctgaaaaaaattctggcgtaccgaaaaatatgaaatgtataataaaaatgtaagttcagtaaatacggtaataattggggttgttcacggtcgtttaaccgaactgaaaccaaagaccggcggcttttttggaccaaaaaccgaaaccgggggtatcggttaataaacggtcgtgaaaactctagtaataatgtaactgaatacttaatacttcaatacattcagcggttgccgagttgttcctgcggcagcaaaatttttttttaaatggggattaagtcgtccgacggtgcctaggggaaaatttttgcaaattttaggtgcaacttgttaagaatatttacacaaatagaataaagaatatataccgaataaaaaaagaagttagattattaaaaaacggtgctgggacgttagtcaaaaaccatcaaaatgggcgttagtcaaaaaaccatcaaatgaataattgttgacagaaaattattcataatttcgcctaaaatggatcaaattttataatattgatatttttcgatagccctaagtgttttctattatcctgcaaaatttttaaaaaattctttaagtttataaaaagttatgacctgagaagctcaaaaaaccaagtttttttgaacatttttagttataactttcttgatacttaacgaaactttttggaattatttttaaaatccttaatttggtgcccaaatttccggtgcccaaacatccggtgcccaaacttccccccgcgattgagtttgctacttatctcaggtcttcacttttattttattattcgatttagagttttttttcttaactatttttttaataactttaaaatccttttgttaaattttttttctaatttatttttttatatttttagctttcttttttgaatgatttaaaaaaaattcatacgtctttatttataagaaattttctgattttggggtagtgattaaattttgtctaattttttttaacttactcatacctttttaaaatttcaaaaaatttcattgaatttcaaaaaggttattgccaaaaaacacttaagatttttagaaattttataaccataattttttattctatttaaaaatttttgatattctgataaagaaccctagagctactgaataatttggttgaatttgagccaagctatgaatttttatgtcctagatttatgttttcctatcccttggcggatttaagaaagttattgagatttatttcgtaccattttggccaaattaattgaacaaaagaagaattttggcttgataaataaactgttaaaaatggtcaaaccggacttagaaaaaatcgccggacccgtgactggacatttggacagtggacatttggacagaaccggacaattgtacagtggacattacgacattgagtgaattttgttactattataaattgctttagcaatgacaaaaatattttcttaaaccatttggaaattcttccaatccgattagtcaatttgtaagcgcacggttcattaataaagagcaataaatttcatcttgtttattttttaaaaacataatttatcttgactttagaaggaatcaattacctattttagtgcctgatcagacttaagaaaattcaatttacctaaacaatcttaaaaaactttttttttgttgctgcg

SEQ ID NO: 11237 - DNA, 1119 bp, Heterodera glycines
ccctttggattttggctacaaaatcacttttattttcataacttttttcaaaaaagtgataaaaatattaaataaatataaacatgtagagaaaaaaattgcgcattttatcaatgtttgcttataccttaacgccttttatggaatgagtcatgaattttttagtgaaaaattgaatttttaaactttttatggaataacttttttcattttaaatatagaataaccaaatcaaaaagataaatttttcccgatttttctgcattttttcatcattcaatcattcaaatagacacattttaaagggagttatgatttttcgaaaatccccccaaatttcccttgaccgaaaaatgaaaatttcaaacccagccaattttggtcaaataaaaaatttaaaaaattgaaaaaaatatagaaaattttttgaaaatatttccaaccgcttagaacatcgttacacgtcataaaaaatcatccgcacatcatgggattcgaaccctggcccccctctatgggtcccccagcagataccactggaccaaccgggtttcaagcgaaaaactcactttggcttttcaaaattttttttatatcaattgatagctcttgaaatgctgtgacccaaaagtgtcatgcgtttttcgatgacacaactgtaaaaaaagttatagtcaaaaaactgaaaaactttgagggggcctagctcttaaatttttgaaaatttcaaaaattcaaaaaatccattcgatgcagctaatcaagctgtacaaaaagttcaacggcgccaagacactcagcgcaatccccagcgagttattctccaaaaaccaaaaagcggaaatttggaaaaaattttttgccaaaagctacaggccaggcctttgatgctagggcctcggtgaagaagaaaaaaattttccaaacatttcaatgtaatcgcctcccagcagaagttttgtgatccgggttcccagaaaaaagttttgatccaaagactgaatgcatttttcccgaaaaagccatttcagcgccgctggcgctcacctggccaccggaccggaatgccattatttttcctggatgcgcctcaaaaagttgctcaagcaatgccacact

SEQ ID NO: 11238 - DNA, 2536 bp, Heterodera glycines
  unsure (1)..(2536): unsure at all n locations
atcatcactcaaaatgaatgtatattaaatggttgcctatgtaattgtattgtgtgtgcnnttaataaatgctcatatgtgcttcaattcaaatgcttttgtaggaagggggcggggggtggtaaaatttggcgtctgtctggtcggagggttagctcgcgcagaactcggtctgctcactccttgtaaattcaggtcaaaatgagttttagacaaaagtggtccttcctataagtctaccagtcacacatttcgtttggaattcgaatgttagccgcccaaatttggagataaactgaaattcagagtgtgcccttccttctgtttcaattcctgagataggtaacactggtacaaaaatgacgaaattcacaaataaggacagaactcgttcaaaaaatcacaaataacaagccggacaatcaaatctttcctttgaaaaagtcattgcttgccttttattggaaaaattggccttttttggtctgttaacaaatcagttttccgccggaccccctcccctcgcccgttcaccagaagttttatggaaaaactgcacccgcaaaaaattgttaaaaatcttattgtttgatcccgaatgcactgaaatttacgatttgcttatttcctccccaaaaatcgttaaattcgacaatcggaggcgaaaaaataatacattattgatcgaataattttaaaaataactaatttggaggcagtttcgcaaaacaaaatctgttctgattttgaaaaattgtcgatccgagccctgggtttaacgactttttaaaattttcatttttttcgaaaatggggggaacaaggtaaaaaaaattcagggggatgacaaaaaggataagtaccgtatgtcgaacggtttctgtgatgacccgctaataggggacgaatgtttaaacgccaaaaaacttaatgccatccaaatgtctacgtcaaacagagagagggagggagggagaggaccaaatttcagttaataaattgacacacgcttaatgaccatcaattcaatttatttcggaacacagatggaaataaagtgataatacacagcaaatgatatatgcatacaaatgtacaatacatcaataaatacagatcacgattatgagacatcttctttatctttgcatcttctgacaggtcgctcgctcttcaggtttcgtccatccatccgccggtcgttgttgcatcttctcacatgtaggcgctctgatccggggacttctcctgctgcaaaaacaaaagattagtgatgcgtttgctcccgtgtcccccttaaaccaaccgctggtggctcgtacgcgggcgaggctcccatgtaggcgctcgcgactcctgacgatggagaggcttccgcggcgccggacgacggtgcaggctcggcggggccggatcccatgtaggcgctcgcgactcctgacgatggagaggcttccgcggcgccggacgacggtgcaggctcggcggggccggatcccatgtaggcgctcatgtcgctcatgatgaagtgatgagttgtcgcgacgaaatgtgtagacgagcttggcgcgcactggtgttgatgttgcgttgagttgaaggctggctggcactggtgaaaagtgaagaaaaccgtcgccttttatacacttttttttgatgcatgaatttttgcacccgaattttgtatataaggaggtggattttgcacattctcctcactcagcagcagcaacacttcaagcaacgctctcaacgatcacacatcaagcacccacaaagccagcccgacaacagcgacaacaacagcaatggcgcaacttccaccagaggacgtcgcaacaatgcccacgcagaaggtcgtcttcaacgccccgttcgacaacaaggccacctactacatgcgggtgcgtttggcgtggtgcacgtggcatgcggaataaccccccccccccctttttcaggtgatcaaccctgggacgaagcgcatcggctacgccttcaagaccaccaaaccgaagcgcatcaacatgaacccgccgaacggagtgctcggcccaaaggagtccgtcaacgtggccgtctcctgcgacgccttcgaccccggcagcgaggacaccaagggcgaccgtgtgaccgtggagtggaccaacacgccggacccagccgccaccgcgttcaagctcgagtggttccagggagacgggatggtgcgccgcaagaacttgccgatcgagtacaacgtctgatggaaggatgcttcgtcacctcaacatggacatgataggatcccaccgtcccaaaattgtcattttgtcccccatcatgtaaattgttgtatctgtatgtaaatttctgtgatcatcacttcaaatgaatgtatatttaattgttgcctatgtaattgtattgttgttgtgcttaataaatgctcatatgtgcttcaattcaactgcttttgtaggaaggggggcggggtggtaaaatttggcgtatgtgtggtcggagggttagctcgcgtagaactcggtctgct

SEQ ID NO: 11239 - DNA, 5354 bp, Heterodera glycines
  unsure (1)..(5354): unsure at all n locations
agaaaagagtaggaaatggtgaaagaaggagaaatttttgataaaaaattaaattttatntcatntagtcatgggattacacacatgcacatgtggtgtagtggttaaactttctacctttcataatttttcgcctgggttcaattccccacttggatagaatattcctcacattttctttaccattattttaattaaaattttaattttaaaaaatattccaacttttttctttcatgttaagcatcctaaaaacccaaaaattaatcaattggtcattttttttacaaattctgtttgaaagcaaaaaagatcattgatttacattaatttacatggccggagacccttcgcaaaattggaaaattggccgctgatcccttgttttgcaataatctgaattttgaggtctacatctgaattttagtgttctttatcctgaatttgaaaaaaaaaacttggtcaacctgaatatacatatacttctgaacaattctaatgctaaaaaacaggcactcgcgcgaaaactgaataaaaattttgtatttggaaaattttgtccaaaaatttttatgttctaaaattaccggtttttaccggtaccggttgaaaaagttggtaccggtaccggtaccggtttttgcagtaccggtcagtaccggtaccggtttttttgcaattaccgattaccgctcaactctagctctaaccaactgagctacacggacacattctacactcctctcaattccatagataaggaagagagagactcattcccaacatgagggaattgagccgcatcacatggaaacaagctgatcagaatttcttacaagagagaggcattgatcagcagttctttctaaaaatgaagatcagggaaagcggtctaagagatgtctgcttttattaccggagacttattttattccggatatcatttttgcgaattggtgaccaattttagtttgacggcggctatttattgtccattagaggagctaatgtcggaccaccaaaatttaataaaagttttgcctcatttcagagaatgcccttccaactggccggaacaacggcacggactgttcggtgtggcacagcgaatttgaggcggacgatgcgaacattgcgctgccgctgagttcgttggacggtggtgccaaacagaaaacgcagcccaaccatttggcacgccgaaggcggacgaagaaagcgacggcaccgtcgtcaacgaaaggacttttggcactcggaagggaacgaatggccgcaatcagtccggtggcagaagaggatgaggaggaagaagaagaaactgatcgggaagacgaggacgaagacaccgatcagcgggaggaggacgaccggcgggagaaggggcgacggaaggagacgaagcggaggagagagtcgagccggggcgtgacggagctttgactggagcggggactccgatggcaccgaacaaagggtgccatgcttttcgacattaagctaattcgcttttctctcactcacttcgttggcattccaattcttttttgttttacattttcattttcacatttaaatttgtctttttgtcgctctttatgtttttgtttggttgggtcacagttgagaagcaaaggctcaaaaattgtgatttttttttttttgaaaaaattgctttgctcacttcccaattaaatattttgatcataaattacagaatgttgttccaaataaagtacaaatctttaaaaaaggaatgtctgcattaaaattggaaaatgtattcgtaattaactttaattaaaaaataattgtaagaaaatatgaataaatttctattctaatgacgaatttaacccaagcgaaaaataacagaagatgaaaagcttatccaaaagacaaatacacagaattaattttgaaaacaaacagaatagtagttatgttttgttcagttcctcaaatacgaacaatgatttcccccgcgtcaagatgctcaattggagttgttttgtcacctgaaaaatgataattgtttaatttaaaatacatttttaataattaatattaaaatgtatttaattgtttaatttaaaaatatatcttaaatattatttatttaattcaaattcatttttaatattaatttttttgcccatttatttgcctttttcgcttttgcgcctccgtccgtctcgccacgctccacgtaaatgaacacggcattccaacactgctgcagttcgtccaagttgcccagctcgacaacggccgtcgtctttttccgctgttcagcaaaagccccgccattttctccccccagcaaattcgaattgccgaaaatcaccaaatgcttgggctcggagatgtgcatcattttggagcagtacagcagcacattcaaaaggccaccgcctgcaaaaattggaatgggccactaccaaacggaaaagcttagaaaaaaatacaacttggtccatttgtgtgaaaagttcttatgttagggggaggggcttctaatacagaggggcgggggcttataattcagcgaatacagtatgactaagactgtagacatgttaaaacgatcgaatttaggtcgattagatgcacaaaattcatctcgaacagcttcaaaacagttgcggttgctgtttctcgtcccttttggcattgctcgtctcccctttctcaaacagtcattttctctcttttttggtgaccattaatcccattttgatgacaattcgtcccaatttggtgaccattagtcccattttgatgaccattcgtccctttttggtgaccatttgtcccactttgatgacaattcgtcccaatttggtgaccattagtcccattttgatgaccattcgtccctttttggtgaccatttgtcccactttgatgacaattcgacccaatttggtggccatttgtcccactttgatgacaattcgtccctttttggtgaccattcgtcccaattttctaatcatttgtcctcatttttgagctgcggtggctcatcaatccgaacttcttgtgaaatcattttgtccagttgcatttccacctcatctttaatttccgccaaccattcttcttctttttatggcacaatttttccgaactttcgttcatccgaaagaactggaaaatttcaggttggtttttgtccgcatttaatagagtttttagtccctaatattaatacgaatgcagcagtgctaatactcgggactaatatgaagacccgagactaaaatttccccagaatcggggccgagtctctcaagagcagcaggggcggcgaattgaatttttatattttataattaatacatatgtgtaattgtaactattaaattagaaaatattctataagtgtcttatacatttatagaattaatttaaaaataatctactggtgctttgtataattaaaaataaaacaattaataagtcactaaataaggatgataattgacacataatataataaaaatgaaaaaaaatttttcttggaatgaaaacaaataaaaattcaagaatttaagaaagcgcagatgactcagccggggaccccaggaaaaacgggggtaaaaaactgagattcacaagaaaattaatatttttctcttgagtaggtgggtgatccaacttaattttccgcatcctattaatcatattcttttatttttctctgatttgaattccgctgtttttcctctcatgagtggcgaaacaaattccaaagttcaattaaaatatatcaatatttcaatttaaaatcacaatttaacaaatcatcgtgttttttcgtcacttttcattttgttggccttttcttctcacaatttctttttcattcggaataataaataatattaaataataatttcataaacagtaaataaaatggaaatatttggcataaatattccgtggatcattttgtttttgttgttatttgttccacatttatttaagcaatcaaaaatctgttgtcaaatacctaaataaaaatgagcctataaataaatgagaaattcaccaattaaaataaccattcccccgttaattttgcatttatttttcattttttaagaagcatttcaattttcaaacgattaaaatgtcggacgaaccaaagcctccgcaaacttcgttcttcctttggtagtcaaaaattagtgcaagcgggaattgtaactaatcggaagcaatttaggatgaacgaaaaccgggaccaattctatgagccgggaatgactcaggcggacgttgcgattgtcgcaggtcggcacaaagcccaaaacggagttcggtcttgaaatccgtagtgtttttcatattgttccatgtcacaaagtcggacgaaggattgtttttggggaaatagggctaagtaaagagaaacggggagccgattatcaatacgatgaaaagcatcatccccaaattaaggcgctgagtggcgccgattgccggaatctgagaaagccaaatgggcacagaagtcggaggaggacaaagaacgcttcgcacacggcaaaaaaagggggggggaagaaaatgaaagaatggcatttttgacatttgcagagaaagccgagaaaagccaatcgcagcagaaggaagaggaggaatgagaagaataaaggaaaagtggggaaaaggatgaagcagcataaaagtgaaaagaaaaagctaatgaaggacggatggattgatcacatttgatcatttttaagtttatcacaaaacacagagtgccattattgcttttgttgaagcaaaacataattagctcgtaaagttggattaataaatcgttatttattagttttaattaattttgattatattttcatatacagcgctgatcattatggacgagatcattatcaaactcctaataatgaaaaatggtaaaaatgccgaaacaatggcaaaaagaatggcgaaaaattgaaatttgtgaaatcagttaaacgaattatgaatatttcttccttcccttaaaatttgattgaaatggaaaaaacaaacgtcactcgacggaattaaagaacaaaagttgaatgcatatttagaaagatacaatagttttcaaagccaattagacaaatcaaatcaaaaaaggagagataaaccaaaaatagagagtgcagagaaaaaaagcatatcttttgttacatgcttaatggattttaattaaattgaccattttatttatctaaaaacaattctaacggccgcgaagggccgccaaaagggatgcgatgacggagcaatcatatcatatgtcaattagaaggcgtaggcagggggggggggggctgaggggg

SEQ ID NO: 11240 - DNA, 1898 bp, Heterodera glycines
agtaccattcttgtgtatttgtagtaggaatcagcgccctagagcagttttttccgcaagtccaccagtccaatcaatgcttgccatttcgtttttacttcggtgttaagattctcagctttgacccgcgtttcggcatgtaattcgagtgtaagtgtaggcaaatttgaaaatttctccttctcttcgtaaaatcggctcacattctcttcggtcgcctgaaaatgtattagagaaaacgaagagatttgaaatgggacggacctcaattccgacacgaaattcatcgtaattcctgttttccatcgccacctcctgctgatttccggggatgaaaaacatttgccgaagcgccatttggtgttggtcaatcgcactgatcacccctttggcacaatgtcgcaatgcgcctaattgaatgccgagctcaatccgttccgacacatccatcgcaatctgagggaagaaagtgcagaaggatggtatcagcaagcttttgctttacttgcatcccttcttgctgcaaattgtgcagtttatttgctgctgcgttgactatgtcgttcaacggcgtttttggcgcagatttaaagacaagttgcaaattctttccgcgaatggactgcaaaacaaattatttaaaaatatttatcacctgttataattccacgttttttgtgttggttttgtgcgtttacctgtaacagttctctttgttttttcattgcatcggacacggtctgttgcaccctgacagtgttgtcggtgtgaaactgcttgaacacttcgacatccctggccacggagtgtcgcaatccttcgaggtcctgccgccagttctgaatttaaatatttctcattccatttaaattatctcaaagaatgtataacctccaattgaatgctaataacttcacagtcgcgcagaaacactgaaatgttcagtgctgcgttaaggtaaaatcgttgcttgtgccatcgttccttctcttgctgatggcgcatttctttaggaaagggtgcaaaggcattaattattgggaaatggtcacattaaagattgaaaagcaattcaaattgtgtgccgtccaactcaccgatgtctctggtcagcctatgaacatggcaagctgcctctgagttatcaacttcgagcagttccctctgctgtttgagtgactgtagcagttgctgcgactcgaccatcacgcgttcgtatgcttgcactgtcccgtcattttccgactgaaatttctctttgttctgctcgcaaagctccactgattcgggcaccttttggatgaaatcaattctgaaaaaagtgtttttctatccgattttgtttccaaattacctattttccatgcgaaaataccaattcataatctcctcgtagtgcaagaaaaagttggacgacaaacaaagtctgtttcatttcgaaattttttgttttaattgctcttttcctattttagccttacaaatttgttcgctggtcaatgcatcggcggaatttttcaatgcgctgtctcagttcttcgactcgtttcagtgtttctgtcctcctcggctcctctaaaattttcttttggatagaaagaaatattaattagcattctgatgacctaaatcgcggacaaggtggaagatttgttcggcatttctgtttgtgttgtgtgccactgctcgaaatttgtcgtgggtttcacagaattgtgccgccgttgtccgatcaatgccaatgccaaattttctacgcatgaaaggctcgccgtgttccgtcagccaactgaggacctgaaaacagacaatgttacccaataattaaagtatcagcaaataaaaaaccgatttcaaatcatgattaagcgcattgctggacactttagttttgatct

SEQ ID NO: 11241 - DNA, 3227 bp, Heterodera glycines
cgttatgcctgtgcatagcattaggcaattcgtcctcagagcggatggagttcgggtcgaccccagcgttgggcagccaacgtttggcatttttaagaagctgacccgaataaaatagaaagtaagccaaaaaaattgtaattaacttcaaaactcctaaaatacttacaagaatcgataaaatgataagaaaataattcaaatgcaaaattagcgaattcaaaacggaccgtgtcgcattttctgtgcatatttagcgtaatttgcaaaagagcggttcgttgcacaatcattcccacaaattggtcccaatcggcctgcaattgttgcgaaatgctctcaattcgattgacaccgataaattggaattgttggagaaggcgaagactgacggtgatcacttgctcgtaactgacttgggatgtctgcaaagaaatggaaaacattcaaatcatttgggctgctcacattcactgagtccgcaaagtctttgtgctccttcagcagtcggttcgtttccgtttcactttcgccaatgagcacaaatcggtgactcagaacattcaaatgggagcaaatccattttgacaactgaacgaaagtcaaaaaatgacgagttaattaaaagcgaattggctcgcctcctccgcatctttctcaaacagtttcaactgaaagtaccggtcgaggtccttcttccgatagtcccatttcgcataaacaatgcctctgaaaaactactttattggaggacaattccgcttttggcacctttgcttgtctaaattttgcttgagcatttctatttgtggaaacactgacaaaaggtcggggtttggactggaaaggacggagccattccgactgcccacactttgtttatggccggaaattatcactctgtccctcagcgattggatttccgaagtgaactcatccatcggaacagcagtgataattgggtacaaatcttggtgctttgcaattgatgtttgggaggattgaacatcgatgggcatttccgcgttgtccatttcggtggaaattcggtccaaatttttgagaatttcgcacattctttgcaaaatcctttcaatgtcctgaagggtagtttattttaaatagtaataaaatagtcagaattataagcgccttgcgaagttcgatccattcgtcgtgatcataaggcaaagagccgccaaactcgcggataatttggcaaaagtcaatgtattttggcattgcttccagagagatcatttggacgtcgaatttgtattttgtcgttgaaattttatatttttcgagaattttgtccggcttcactatgtacacacaattaataagagcggggaaatattcctgaaactcaggaatatataatatgtagaaataaagtcaggatattcacctgtaatatttttaatatcggtttgacaatttcccaagtggtccctcgacgcatgtcaatgacaaaagtaaagccacgagtctttgcatcgtctctaaaaagacccaagtaattaaataaaccaattaaattgtaaaacaattaaatgatgaagccgactcactgtgtaacttcgtagagatacgtgagaaggttgcgtaagtgatcggggtgagaattgacctctcgggcgggcacaaaaataattggacgaccttcacgatccctgaaaaagcgtttttttttgggaaaaattctaaatttgcattttaaattatgtttacctaacgccaggcaacaaggccactctctcccttagcacatgttcaatatcctcggcacgattgggaacatggcactggggaaaaacgttgtttaacattgcaattctaagtgaagagaaacggcaaaaacataaaagaatttaattgtattaattagtaatttgaaaaagaagaaatagaaaaccaaaggtaaagcattgctaattgtaagtcagaagaggaaaaggaaaggaaaagatgaaaatcccaagggcacaaactcatttttttaaaaaaaagataatcagaatgccaaaaaaaattaattaagcaaaggaaaagaaagaaaatttcaaatcatctaattgtttgtaagttcctgctaatactctttttttcattttattatgcttacgaattggtcttaatttaatcctttgaattagcatttctctgcataatttattccaatgctaataaaagtgaaaacgctgaccggaaaagaaattgagttggacattgagccgacagacaaagttgatcggatcaaagaaaaggtgctaatttgaaattaaaattcaaaataattctttatttgaccatttcttaggtggaagaaaaggagggcattccgccgccgcagcaacggctgatttttgcgggcaaacaaatgttggacgagaagacggcgcaagactacaaagttagtattcgtaattaattacctattgtgaaaaacaaaaggcgatcttttaaatttggccaaaaatgtactctaccttttgttcggattcgagttaagcattgattcaaaatggaaatcaactgattcgagatcagctaccccgtaacccagagaacgaattttcaagattttgacaataacaaaaatttggaaacccacgggtctcccctttggttttggtactttcctgttttatttatttatttattcagaagaaataaaaatatccaacgaaggggtgaccacttacacgttagattttagtaaagtaatataaagtccaaggagctcttttacagactttcttcggaaaacaatttctttttttgtatgtcctcccttttagatccagggtggctccgtgcttcatcttgttcttgcccttcgcggcggatgaatgttcgccatttggacgcttttgttggataaatgatttgattgtctaatgtctcactgactttttaaaaatatttaaatacaaacataaattgagttccacttaaacatcgtcagattggtctttctttttttctttggattttcgtccctccgttcgcttttccctttcaaacattcgccattagtttatgttgtccggtgggtcgaacaaccgttttttctgcaattctaattttgatttagtaaaatcagattctgtgctgacttaaaacaaattaccgtcacaggagggcgttcgggcttatgccattttaagtgggctttcaaatgcgaacttttttctaaatacgagacaatctttttttctgtt

SEQ ID NO: 11242 - DNA, 656 bp, Heterodera glycines
  unsure (1)..(656): unsure at all n locations
ctaagcancacttattgatgtcaacagaaattcaactaatataagaaaaaaaaaatttacaaaagcctaaacttaggcctagtctaacaataagccattgttcgagttgcctgtgtatgagttgtcatgataaccttaggtttaacaacgaaatttatagttaaaaactttattgaatacctaacaaaaaaaaagtttttctcttagttattaggacaactataataccatgggaccagggatggcacggaatttcgatttccgaaaatttttggggcctcggaatgccatccctgccatggacacaaaatgccatgggacgcgtaaagtgttgttgggacgcgtaaaatgtcatgggacgcgtaaaatgtcatgggacgcgtaaaaccgactagaaccaattttaattattttttccgtttgacgcatatccgaccaaactgacaaattattgtagaagatactagccgcaagaaataaaaaagttaagaaatttgtccgaattcgggttcgggattcgaaacatggatgttttgcacaaatccgaccaatttcagtcctaaacaggtactcacgcgaaaacgtaccccacgcgaaaacggccacgcgaaaacgtaccccaaccacgcgaaaacgtccacacgcgaaaacggcca

SEQ ID NO: 11243 - DNA, 3467 bp, Heterodera glycines
  unsure (1)..(3467): unsure at all n locations
gggaacggatttatatgttgcgttttttatgcgcatatgctatcgcatgaaaagctcataaatagcatttttacctgttttcctntcaattagagcgagtttttagcacatataaaaacatattttgggcttttggcgaataaaaacatattttgatggtttgaccgattttagcacatattttagcgatttttaaaaaaaattttgaatttttttagaaaattctttttttggcacccaattcttggcaaaatgacaaaaaatttttcaaaatttttaaattatttttcattttttgacctttttcatgatttctcatttttatggcaaaatctaaattttagcgaaaaaataccaaaaataagcattttgctagagaaatgggtaaaaaatgagacttttatgcaaaattcacgtatttattaagcagtttttttcagtttttggcacatattttggccttttttcgggtttttagcacatattttggcgtttttttggcacatatatatgtacatatttggcgttttttagcacatataaatccgttccctgcttatattacatctataattatgcataaatatcgccgccatgttttgacatattaaagaatttagttaaaataagtaatttaaaatttcagattccggaattttttaaacctaattataaggagttttcagtctatttaaaacgaagaagtgatgggtgaacggcgccgggaaaattcgccccattttttataagagttttcaattttcataaaacgtaatatttttttatctgtcataatataataataatttggctattttttgtaatttattttaggaaaattgattttattgattacttctcttttttcttttagcattataaaattatatttgtgaaagtgctttctttttaacaatagaattagttagaaatttccctactcattctattggtaaattaataattttttttcattttctcatttaatacaaattgaaatattttataattcataaataggaaatttatttactattgaatctataaatatttaaattataataattcgtgaaatattattttttgaaaaattataactaattctttaacgacccggtaatcggacccgggccccgcttttctgggcccagggactcggttcttgcccaaattcccggactcgaatatacgaacttaaaaacaagcatctaaaccaccaaataagcacggaataagcacagaatgataaccaagcacgaagaatttaaaaaaaaactaaaaatgccgcagttatttcgaattattattttttaaaatctgtaataggaaaatagatttaaattccaaaaatttgttagaaaatgtaaaaattgtaatcggaaattcctacaataaaaaaaagaaattttaggtttttttttttgtaaaaagtcttcattcataggggatggttttagagatgctttttgctctttcaaaaacccaattaagaataaaactaagcatctaattacaaataatatgaaatttaaatgcctctattaagcaagaaaatcctaaatcactctctattcataaatttgaagaactaccctttaaaatattccctttcaaagaaatgatgctgcacaaattatcctttccatttttgcctataattatgatggattttgcgatcggacgcattgctttaaacgacgagtgccaaaaaggtgtgaacacagtttgttttaaaaatgttaataaactctcaaaacattttaaagacttttttggaacggctgatcaattggaagaaatggcattggaaatttttgcagcggcggacaaacaaacggaaaatggaaaattttttgaaaagggatttgacattttctgttgtattgcatttgaaattgaaaaagatgctttaaacaaagatgagttggcattaattgatgaatttgaagcaaatcagcgcaatttttgccaccaattgaaaaagggccaaaatatttgggaagcggtggaaagtccggcagggaatgccattgtaacagcggcgagaaatgcgaaagttaactctctaatacatgaagaaggacttcgaaaattggagaaaatgcaaaattcgagccctgaaaatcaagcagaaattggaatgtttgccaaacattgcattgccgcgttgaaattgtttcaacaattcatcaccggtatttctttaatgcaaaataattaagtttcagtcagaagcaaaaatattcatcaaaattgctaaaaacgcttattctgggctctattgcactttatgaatataaagttacaaaagaaattactcaacaattacttaattaatctaatcttttttggcaattgcctaacactgagattttatatatatttgcttcttaaggcttttactttgaatgataccaaaaagataggggtttgttcgaataggacattacggtggataatcgatcaaatgatgttagaccgcggcaaaagtatgcattcaaaactgctaaaaagtagaatcagaatcccgcggcattaaatttcccgccccggggtccctctcgaccgtttttccaaaacctagggattgacctggatcggtaatccggctgggatccaatttgtttgcttattaattgctacagtagcgactgttttatacaacaacaaattaagatgagcgattggctcagactttgctcgctggtggaggacagaccgtgtctgatcaaagttcagccttatagctcaacaggcgcccactcgatctgatcagctgccgaaggggaaatcgtcacggcgaaggaaaaggtcgagtaaatggccaaaatgccttggtgcttttgcattggccggcttttccggctatgtgtgcagtatatttatgaggctcttgaaaatgaatcatgttccgatattgacttactttactgctgactattcttctactcttcctttactcattcgtcgtttgcaacggagctgatagttgtgttgtacattttctttgctgtttctttgggcagcatatttttaggcatttatcattgctttgtcaagcgttcttattaatggaaggatttgctttatcggacaattagccggggccataaaattggacaaggtcatattttacatgactttatttttattccataaaatgaagagagtcattttttgacactttttcagaaaattttcgttttttacaaaaatttcataacaaaaaggcaatacaacaaaatatctaacctttttttcttcaaataatgggcagcaaaatatgaaccaatcggttcctttcggcatttaaattataaatccgaatgccacaggcggtggactgcgggggcttaaggacccccgccaataagtcaaccccctacggatcacgcgcgggtacttttttgttttgagaacccccccccccccttttttgaagttttcagataaaagtcatttctgag

SEQ ID NO: 11244 - DNA, 1918 bp, Heterodera glycines
ctctattcataaatttgaagaactaccctttaaaatattccctttcaaagaaatgatgctgcacaaattatcctttccatttttgcctataattatgatggattttgcgatcggacgcatagctttaaacgacgagtgccaaaaaggtgggaacacagttttaaaaatctttaaactctcaaaaatttttcaggcttttttggaacggctgatcaattgcaagaaatggcatcggaaatttttgctgtggcggacaaacaaacggaaaatggaaaatttatggaaaaagcatttgttggcattttgtgttgtattacaattaaagctgaaaatgattccatgaaaaaggaagagttggcaatgattgaagattttgaagcaaatcagcgcaatttttgccaccaaatgaaaaagggccaaaacatttgggaagcggtggaaagtccggcagggaatgccattgtaacagcggcgagaaatgcgaaagttaacctccaaacatacgaagaaggacttcgaaaattggagaaaatgcaaaatttgagccctgaaaatcaaacagaaattgaaacatttgccaaacattgctttgccgcgttgaaattgtttcaacaattcatcaccggtatttctttaatgcaaaataattaagtttcagtcagaagcaaaaatattcatcaaaattgcaaaaaacgcttattctgggctctattgcactttatgaatataaagttacaaaagaaattactcaacaattacttaattaatctaatcttttttggcaattgcctaacactgagattttatatatatttgcttcttaaggcttttactttgaatgataccaaaaagataggggtttgttcgaataggacattacggtggataatcgatcaaatgatgttagaccgcggcaaaaatatgcattcaaaactgctaaaaagtagaatcagaatcccgcggcattaaatttcccgccccggggtccctctcgaccgttttcccaaaacctagggattgaccgggatcggtaatccggctgggatccaatttgtttgcttattaattgctacagtagctgagtgttttatacaacgacaaattaagatgagcgattggctcagactttgctcgctggtggaggacagactgtgtctgatcaaagttcagccttatcagctcaaccggcgcccactcgatctgatcagctgcagaaggagaagtcgtcacggcgaaggaaaagatcgagtaaatggccaaaatgccttggtgcttttgcattggccggcttttccggctatgtgtgcagtatatttgctaggctcttgaaaatcaatcatgttaacattttcacatctcatcatcctgttgttcagccccatcctcgtatatcgttagtaatggaggtgttagtttcaatgtacatgttctttgttctttctttggtcagcatctttttaggcatttatcattgctttgtcaagcgtgattactattgatacgatttttagggttttcaattttttcctgagcttcctatggtctaaaagaaaacatatattttttggtgtttgttatgctatttttcgagttattagcacctttctaggtttttatttttagaacctaaaaacctaaaagaaatctgataaaatcaagaattttaattttaaaaattacgtatctcaatactaattgtagggctgggaatcaaaatatgtaaacaaatttataaaatggttttttttttgagaaaattgttaaatggtgaataggcacaaaatgccacaaaaatgagctaaataggcatagaatcatcttttagtattttaagaattaatcagattctaatataaaagcaaattttcaaaaattcgattttcgactttttggacgaatttgggtttcggagttcgga

SEQ ID NO: 11245 - DNA, 4362 bp, Heterodera glycines
attcctccaccagccgcggcctctccccccatcttttcccttcccttttccgcctccctttccggcaccgccttcgctttccatgcgcccgcccgtggaggcaattccgcctccctttttgatgagggccgcgatgatggcagcggcgccgcgggcatttcacgcgggcagcttttggcacaacgccaacacgtaatgatgagcaatcaagtgctaattatactaattgactatgtgtcaaaatgatagtaattgtgattccttttttagtaattccgcaacaattgtcggccttcgatgggtcaaatcgttcgttttttcctccgttgtccatcggaattcaaacgccaaatcaatgccaaaaaggggaggagggcccattggcaaagccaacggcgaattgccaaaatggtgaagaaagcgaatggtcgacaaaatcagcgccaacaccaaacgaaatgagcggaaacaaaagagcaaaaaagcggaagagagagaaagttgccaaaaatggacaaaatggggagggagagggggagcaacggaacgccaagaaatgcaacaccaacgccaaagacaacaacaacccaattgtgcaaatggtgatgagtgccgtcgccgaaggcaccgccgcaacgacagccatcaatttgaacacgtgcggtcagttcagaggagagggagggagggatacggtgctgtggggatgaccaatgaaaagcccactttctttgtttgtccgttggacccatcccccgagggaattccgtcatgaaattgcccttttagccatttgcggggaccaattccgcctcatcagtgaccttgtccaacatgcgcgaacgaatcaccgccaaacgagcagatacgatcggaatgggccgagggcatcgattgcggaagaagtgcagagactaagcaaagagtgaagcggagagaaagagagacaaagagagattggaggggttagagaaggagagactgtcagactcacaacaagacaaaattaaaagtgatcagagtgatcaatcagccaatgatgaaccgagcaaagtgacgcgaaagtgagaaaagacttatcaactgtgaaagtgttttgtagataccttatgtttttgtataaattaattaattgttagtcaacaagtgttagttcgttgtaagttttctctgattgtctgctgaattaagcggtgcactctatctgttccctttcgctccctcgtccctctcatttttgccgtattctttctccccctctccgtcattcatccctctcgtctctccgcagtctcttccgtactgtcctctctctgctctttgtctattttttctctgactcccccctcggggcatagtttttccatctcttccaaaacatccaccggatgttctatcaacagaggttgcgaacatgtcatcctaaattaggtcagttttggccatttttatccacaaaatgcaaagtctccgagcaatggcatgttggatgaaagcagccgaaaggaggaaacagaagcagaacttaatggcacagctaattattattaattagtcaggcaattagcaacaattagcgaatgccgagaggcaattattaatcataataagagcaaatacccaccttgaaaatggtgtccaagtggaaattgttccaaaggatgccaatgacaagcaaattcaatggcacacggaagaaattcattgtcgttgaacgagtctgaggaggacaattttcaattgaaaatgattttcgtttgtcgcaatttgccaatgtccgaccttttcgggaatgtactgggagcgcaggaaacccatggcaggccaaaaaatgccaacgcaaacttcgaagagagcaaatgagatgaaaataatggtggaagatgaagggaaaagcaccggggcacacatcaaaagggaggcgacgaggaagacgaagcttaattagcactaattagtgttgaaatgaaaagaccaagagagagagaaaaagagagagagagagacaaagagagagagggagagagaaaaagagaggggagagagagaaagatagagagacgcggggaggtgcaattaacaaataatcagagaaaggtaagaacgatcagccgattgatctggtctcagtttaactagcctaattagttttgatttgcaattatgattagctttggtttgccgttgttttggctttgttttcttaccgcataaatgactcgggtcggttgtactgactgagcaaattgaacacggccgagcccatcatcactgacaacatgaaggaggcctatggaaaaaaagaagggcaacgtttactgcgttttccattttcttttgaatgtttattacgcacaaaaataaagccgtgagggattgtgccggtctccgaggcgcggctcaacgcgggtgtccattccaagacgaaaacgtacatggaactgacaaaagagcaaatgagggggaaggggaggataattggacggagggaatatttatccgaatttaaatatttatccgaatttaaatatttatccgaatttacccttcgaaaagactttgggccaatccgaggcacaaaatgcgttggtctgcaaagtgtttcatacacatttcatttttcgtcgccttttctgaccatttcgaattgtgttaaaagcttcgccaaacgtttgtgccaaattcgccctttcgtcgccgtaattttcagtccaagtgaatgccattagcagtgccatcacaatgagtaccacaaaggcgcaatcgaatggggcactgacatcgaaacagtgatccaattgagttttgaaaatgccgcggttttaacccacacaaatccgaatgcgttggccgccgcctgtgccgtgatgccggccaaaatggcgatcagagagttggccaaagtggcatttgcaaagatttgcttcagcgactgatcgctgaagccgcgctggaaaaagggcactttgatgacatcccaaaaagtgagtgagtgaccttccgatgctcaaacacaagccaagactcaaaggcactgaacaaaatgctggtggcgatgccgcccatcaatcggccgatcagtaaaatgttaaagtccgcaaaatgtttggtcacacagctgacaccgtacaacagggcgtacagtagacaattggccttgcggccacttaacagaattaccgtaacccatcggggaaagggacgagcgaagcgggggaaaggaggaagagacattttacccgctccaatttgttcaaattgcctatttaccgcgcctaaggggctttagggactctgaaaaagcgactcacaatttgtcggcgatggacccaatgaaagtgccaaaaaagagactggagccgaagccggcgatgaacagaagttctgcgaattgtggaaaacgaacgaataaacgccccggggaacgccacccaaagaccgaccgatctgatgtttggtcatccaataggactcgtaaagtgcgtacacatgggggccctggggaaaagccgagattagcagtggcaaaaatgtgcttaattaggcaaagagggggagggggggatgaaggacctgaagccaatcgcccgccacggctaaacagtaaacagccaagtaaatgcgttggaagctgagaaagtggccatctaagacggagggggtcagacatttcgggatattaaattgaaatgagtcatggccaattggacacgggcaaattcagtccctttccgtcgacggacgcccttttcggcaaaatgtcctctcctccctctccttccgttttctgtttccttaccttcgtccgttggttttccgccgctcttttccgtgggcctccgcttaattttatgggccccccgctttttcatttgaatgctttgctttttacggttggaaagggatcgattgaataaacaaatatttcatggggcgggggaaaggcaaccgaagggaccgtcccattttaagtgttgttaattaggtgtcaattaacgataattaattaatcggtcattaatttgtatttgtttgtccgaccatcgctcattcattgctttgctcaccgttctgatgttcgtgctgaacctttcgtttaacagccgcacaaataatcgcacagcaaacgcacaaagcgaaaagtgcaaacacaaaaaacatttgcgaaaatccgaagaattttattatttatttctgtgttatttgaaacagtgaatcccccgagggttcaaaaatgccaaaaaaggcgcttaaaactctcacaaaatcccaattcaattgaaataggaaaagcatttcttaggggggaaagacagtgaatgaatgaataataaataagcaagcaaacactaacactcagca

SEQ ID NO: 11246 - DNA, 3864 bp, Heterodera glycines
ctgaaggaaaatcaattaatgctatggtaaagtctaggttgaggagccccaccttgatctgacggaagagacgctgaaggcaccacatttagttgatgcgcatgttcaatcaaatggtcaggacgagacacagtccatgggctttgcggtggtccggttgatgagcgtcgcggcacatgaacattccttgggctttgcggtggtccgtttgaagggaattgcggcacatgaacattccatgggctttgcggtggtccgtttgaagggagttgtggcacatgaacattccatgggctttgcggtggtccgtttgaagggagttgtggcacatgaacattccttgggctttgcggtggtccgtttgaagggaattgcggcacatgaacattccatgggctttgcggtggtccgtttgaagggagttgtggcacatgaacattccttgggctttgcggtggtccggttgaagggaattgcggcacatgaacattccatgggttttgcggtggtccgtttgaagggagttgtggcacatgaacattccttgggctttgcggtggtccggttgaagggaattgcggcacatgaacattccatgggttttgcggtggtccgtttgaagggagttgtggcacatgaacattccttgggctttgcggtggtccggttgaagggaattgcggcacatgaacattccatgggctttgcggtggtccgtttgaagggagttgtggcacatgaacattccatgggctttgcggtggtccgtttgaagggaattgcggcacatgaacattccatgggctttgcggtggtccgtttgaagggaattgcggcacatgaacattccatgggttttgcggtggtccgtttgaagggagttgtggcacatgaacattccttgggctttgcggtggttcggtcgatgtgcatcgcggtggttcggtcgatgtcggcactcgcaaaaaggaaggataatccgatggacgacgcgattgagaccacgtacgacgctgagcccgatgtttcactgaaggaaaagggaatgagtgttttggtaaagtcagcatttgaaaagtaccacaccattcgctgaagtcgcccgacgacgggttgaagccggcggacgatgcgtttgagacggcgtatgacgggttgaagccccaacaatatgatgatcattcgactccacatccgagcgaactgaaggcgaaactgtcagacgacgctgaaattaataaggtaagaaacaaataatgaaatggagagttagttgaacgcgcctcattttggcgttggcgttgtcgcgcgttgtcgggcgctctgtcggcggacataataacaaataatgtgaatgaatgactgtaaacgaaaattcccctctttatatacacattttctcttccaaatcgacacaataacttcactatgggtcaactccactgtgcagagaaaagcctagtactatctcgtcgtttctctttttctttgtaatttctcttactttggcatactatctcttcattttaattatgtaaaaaagagaaattaatctgatgctaatatcttttttttaatgctaccaatccttttcaaacttttggggccgttttattagaggttttttggaaaaatgccaaaatatgcacataaaatatgcacgaaattccaaaatatgcacataaatcgcgaaatatgcacaaatatgcaaaatatgcatatggaaatacagtctagaagcttcaaaagaagctaaaaacatgtttttcgtgcgtttcaggcctcccacagtctaggaaaaaaatatgcatgtgctggtgctatgtgatttcgacagtgagtgatttcgacagtaccggtaaatttaaaaaaaaacgagtatatgaaaaattggaacctaaaataaagtggtatgagcacgttcaaagaaaatttaggattacgattttcaaaatcttcgaaggggcttgtggatcgtgattttgctctccatgtcaccattcatttataatttttcacaattatttcaataccaagtataactttttatatacaagtcgtagctctaccattcaaaagaaaattcggtagtaaattttgtgttctttaaaaggagcttattaaaaatttacctggaaattttcccaactccctatgattttttttttaaatttcagcgattttcaacgtattttgtggtgtcccgatcaccatgaaggaatgatctgatcaagttggggtaaaagaattttttgatgaagaccaaaagataagcaagcatgaattatctcagatttttatatgaactatgagatggtttttcatcttaagtcaacttttttccaccactatatcacttcattttaggttccaatttttcatatactcgtatttttttaaaatttaccggtactgtcgaaatcaatctctgtcgaattcacaatttttctgatactgtcgaaatcaatcatcgtcgaattcactcactgtcgaaatcaaccactgtcgaaatcacctggcacgcatataattaccagccttagatattagattcaactaaaacgtgaaaatatttgtgtgacatcgttttgtcatcatttcttgcacacagcggcccaattttgggctccaagtacaattaagttggatttttcgtcttagtggtctgtgagttagtcaccaaaagggggggtctcaggttcgaatcccatgcatgctgtaactgtattttgaggtttttaaagcaaataatacaagtgaaatgataacacagtttttaatgaagctcaaaaatttaaaaaaattttatttcctgtaaaaacgaagaagaaccttttatcgaactgtgtctattcaaaatcgaattgctcttctccattgttttcttcgtccgtctcccgtcgatcaccaatttctttttctaaatcaccatcaataaatgacattgataagcgaaatttcgtcagtttcctcttcagattgatcgaactcatcatgctcttccctccgatcactttgtctctgaattattatatataaattttaaaataaaacaagtttaacgcaatcaccccctccaaacatacagacctgcttcatttcatcaattttgcccgtgtcgaggagccaattgttgacaaaatggtgctccaattgctgcaaaatttggtctgcgtccggcatacacttccacagttgctcaagtcggcgccaaactgaatggagcgcctcgtcacctttaaattcagattaatgggatagaaaacatttttcaccacaaccctgttcatctaaaaggccaagaaatttgtgctcgcgagcgaagggaacaaaatggctcaacaaaagatgtgccttgggcttctttgagagaaacacgcgcattcgctcctgggcagacaaaaaagatttaaaatcgttgacacgctcctctagctcatccaggtcattcggtgacaatgggctctggcctaaatttcataatttagtttgagaaagaagaaaaaagggacttttgaaaatttttggattttcccgaggtgcacaagggttctctgcaaattgaaaaattttcgaaaatttgttcccccaaccagaaaaatgaatctgtgcgatatcgtttgccatcatttcttgcataataccaaacatttcacactgtttttttcagtactggaaaacctcccgtgccggtgacaatgaggcggtcaacgaagtgcggacggcacttgatgcgggaatggaatgtcatgcagtggttgggcacccgtacctcaacgcggtgagaacagaggagacaatggcaaattggcagaaagcaaatgcgtcccgcttcaaattttttgtattttttaaaatgaaaat

SEQ ID NO: 11247 - DNA, 461 bp, Heterodera glycines
actccctctccccttttctcttctctccccctccccttatctcactccctctccccttttctcttctctccccctccccttatcactccctctccccttttctcttctctcccctccccttatctcactccctctccccttttctcttctctccccctccccttatctcactccctctccccttttctcttctctccccctccccttatctcactccctctccccttttctcttctctcccctccccttatctcactccctctccccttttctcttctctccccctccccttatctcactccctctccccttttctcttctctccccctccccttatctcactccctctccccttttctcttctctccccctccccttatctcactccctctccccttctctcttctctccccctccccctccccttatcgcactccctctcccgttttctcttctctccc

SEQ ID NO: 11248 - DNA, 393 bp, Heterodera glycines
tcccgtaatcactccctctccccttctctcttctctccccctccccctccccttatctcactccctctccccttttctcttctctccccctccccttatctcactccctctccccttttctcttctctccccctccccttatctcactccctctccccttttctcttctctccccctccccttatcactccctctccccttctctcttctctccccctccccctccccttatctcactccctctccccttttctcttctctccccctccccttatctcactccctctccccttttctcttctctccccctcctcttatcactccctctccccttttctcttctctccccctccccttatcactccctctccccttctctcttctctccccctc

SEQ ID NO: 11249 - DNA, 2747 bp, Heterodera glycines
atcgagaacacgataatcatgtgagcaaacaattcccttaccaacgtaaggtttataaattttttggaggggagcggaggtgacattgccttgaattacggtgggacggaggaaatttgggtacaacactttaattgggtctgtctttccggagcgggcaaattccaggacacgctgtttgaatgtgtcataacgaagtccttgattttctgtcacgtcataattgagcgtaatccctcggagtttgaggacgtactcaaagtcgtctgcggctcccttctttcgcagcttcagcccgtactgctttgcgccgccgcttacgaattccaaaatatcgtgctaaatttaaaaaaatgcagcgcgatttatattggtcttttacctttgggaactcgtcagtgagttgtcccaagtgcacccccgtctgaaggaggtttgagtcttccgggtgtacaagaaacaatgaatcggtgtctaaaatttagaataataaagaaaattattgtatgtttacccgtgtataaaagagtgcagccgggacttctgaccactttctgcattgatttcagtaaatgtagtcgggctgctgatgttgtgaacagtgaaatcacaacatttgaacaaggatgctctttgatccagtcttttttcaattgataactgatcagaattctttccggcgtcagcatgtcaaggctgctgatttcaatctttttgttgtccaggtaatttccaagctcagatgggtcatctgtgatgagcgtctgcgaaagaccataatttcgaagtgaaaatcggcccccctaaattttttgtttataatattttcataggacaacgaaaaaacatacataaattattcacagccaattttgccaatgatctctttcccttgttcgggaccatttttgttcgatcaatttttattccaaattggtcccagcattccgcaataaattgctcttcggcctcaaaattgcctttgatttgctcatcaaacccagaagcatggagttttttcaacaacgaactcgctcatgtatggcctgaagagtttgttgtcacttttgtggtattcgagaacgccaagcagctctgtcactcgatatccctcctctagtgccgcatttaactaaaaataatttgaataaaatattaaaaaataaaactttacttccaacgaggtgcatgtactaatccagcctcttcgtcggtcatcgtgagtacaactgtatgatgatttgacggcaccatttggaaattttttgcaacatttgatgcaaagtggaaaacaaagccgatcgtcaactttgaccggcaaaacggggatgtcgagagttggatgtccaattggataatcggtcacacaactatttttttttaaatattaaaaatgttacgacaaattttcacttgataaaaggatagaggctggtaaagtcatagtagctaattttctcgccccttgtcgctttgtgataaagcttcaaaggaccagttctcccgcccatgaagcaactgcgaatagcttttggttgagttctcgtatgcggcccgcagattttccacatggtaaaacttcattgtcatccgggtagcactttgcacatgcgtgccagggatgtgccgagccagacaaaatccgattccgattaaatcgccgattccgattatggccaaaaatccgatacggttttaaaaccgattacgattatggcccaaaatccgattaattgcgattccgattacgattccgatttttttaaaataattttttcccaaaaattttattcataatcaaaatcataaattttaagattgtgatgcaaaaataaaagtttgtccacattctgaggcaataaacgttttctcagatctgtcacaatcaacccagcggtggagaaaagccgttcgctttcagtcgatgtagctggggctgagaaatatttttttgatagcttagattcggaaacgaaatgtcttctgcatacagaagcccaacaactgttttgttttgcaaaaacgatcaagcatttggaaggtggatgaccaacgcacctgataggaaaattgcaacttagtaataattcattcatggttcttttctgctttaatgtcccaacaaattttttcttcaaaatttcgacttttggttcgaattcgggtccgggattcaaaaataggtgaattggctgccatgttcttaaactgacaccattaacaacccttcaaagactttgacatttttgctaaataacaaaaaacttgattatatcggggagaattaatccggcactgctttgtgagaaaaatttaatttcagtcattatcagggcggccaagtttttattttcaaaataaggacagatgaggctaaaactaagattcggaccccaaaaataagattttttctaaaactgatagtagcgcgaaggaaacgcaataaaaacatgaaaaaacgacttaaaacaacattttattagcataaaaacgaaggcctgtcaactgaaaattttgtaaatcagcattttgaaaaattttattcaaaatttaaaaattaattagtttttgcggcgtgctttttccaaaaaacttttgggaattggggggccggcagtgccgataggcgccgccgggaaaatttttgaaattttgtatgtgatttgttaacagattttgtataaaaaagaccaaatttagagattttaaactaattttttaagaaaaattgggatttggtgtccggt

SEQ ID NO: 11250 - DNA, 1315 bp, Heterodera glycines
  unsure (1)..(1315): unsure at all n locations
gctgtaaaaaaaatttggggcgatttgaaagagaatagaaagaaccaggttcgatgaagttttggtaagccaaaaaaaatccaaacatttaaaaatctataaaaaatttaaaaatgagaattcatgcgagattttctggaaataagcttaattgggcctagttaagctgtaaaaaaaatttggggcgatttgaaagagaatagaaagaaccaggttcgatgaagttttgttaagccaaaaaaaatccaaacatttaaaaatctataaaaaatttaaaaatgagaattcatgcgagattttctggaaataagcttaattgggcctagttaagctgtaaaaaaaatttggggcgatttgaaagagaatagaaagaaccaggttcgatgaagttttgttaagccaaaaaaaaatccaaacatttaaaaatctataaaaaatttaaaaatgagaattcatgcgagattttctggaaataagcttaattgggcctagttaagctgtaaaaaaaatttggagcgatttgaatgagaatagaaagagccaggttcgatgaagttttggtaagccaaaaaaatatccaaatatttaaaaatctgtaaaaaatttaaaaatgagaattcatgcgagattttctggaaataatcttaattgggccttgttaagctgtaagacacccaccacttttgcacttaaaaaaatttcaaaaaatttgatcgtccataaataatttgtaattgatcagcggctcaccaaattttgcagagatacgtatcggaacactacaaaagcttactaattttcctagatttattaaacccggtgaaaattttttgcagacacccaccacttttgcacttaaaaaatttcaaaaaatttgatcgtccataaataatttgtaattgatcaggggctcaccaaattttgcagagatacgtatcggaacactacaaaagcttactaattttcctagatttattaaacccggtgaaaattttttgcagacacccaccacttttgcacttaaaaaatttcaaaaaatttgatcgtccataaataatttgtaattgatcaggggctcaccaaattttgcagagatacgtatcggaacactacaaaagcttactaattttcctagatttattaaacccggtgaaaattttttgcagacacccaccactttttcacttaaaaaaatttcaaaaaatttgatcgtccataaataatttgtaattgatcagcggctcaccaaattttgcagagatacgtatcggagcactacaaaagcttactaattttcctagatttattanacccg

SEQ ID NO: 11251 - DNA, 1702 bp, Heterodera glycines
agttaagcttgtaaaaaaaatttgggggcgatttgaaagagaatagaaagaaccaggttcgatgaagttttgttaagccaaaaaaaaatccaaacatttaaaaatctataaaaaatttaaaaatgagaattcatgcgagattttctggaaataagcttaattgggcctagttaagctgtaaaaaaaatttggagcgatttgaatgagaatagaaagagccaggttcgatgaagttttggtaagccaaaaaaatatccaaatatttaaaaatctataaaaaatttaaaaatgacaattcatgcgagattttctggaaataagcttaattgggcctagttaagctgtaagacacccaccacttttgcacttaaaaaaatttcaaaaaatttgatcgtccataaataatttgtaattgatcagcggctcaccaaattttgcagagatacgtatcggagcactacaaaagcttactaattttcctagatttattaaacccggtgaaaattttttgcagacacccaccacttttgcacttaaaaaaatttcaaaaaatttgatcgtccataaataatttgtaattgatcaggggctcaccaaattttgcagagatacgtatcggagcactacaaaagcttactaattttcctagatttattaaacccggtgaaaattttttgcagacacccaccacttttgcacttaaaaaaatttcaaaaaatttgatcgtccataaataatttgtaattgatcaggggctcaccaaattttgcagagatacgtatcggagcactacaaatgcttactaatttttctagattttttaaacccgctgaaaaagttaagcctaaactttttcggcctgtttaaaaaggaattagaaatttttaaaatatttattcatctccctttttgataatataagagtcagagtgccttattcaacttgtaaataaattttggtgcgtttcagagcagtttctgaaaaaaatttatgaattaattttgcaaaaataaataaataatgaaccctcctccttaataattttcctgcgcccaaggtactcactcggccgcttcgcggcctcgtggctgtaaaaaaaatttggggcgatttgaaagagaatagaaagaaccaggttcgatgaagttttggtaagccaaaaaaaatgcaaacatttaaaaatctataaaaaatttaaaaatgagaattcatgcgagattttctggaaataagcttaatagggcctagttaagctgtaaaaaaaatttggggcgatttgaaagagaatagaaagaaccaggttcgatgaagttttggtaagccaaaaaaaatccaaatatttaaaaatctataaaaaatttaaaaatgagaattcatgcgagattttctggaaataagcttaatagggcctagttaagctgtaaaaaaaatttggggcgatttgaaagagaatagaaagaaccaggttcgatgaagttttgttaagccaaaaaaaaatccaaacatttaaaaatctataaaaaatttaaaaatgagaattcatgagagattttctggaaataagcttaattgggcctagttaagctgtaaaaaaaatttggggcgatttgaaagagaaaaggaagaaccaggttcgatgaagttttggtaagcccccttaaaaggcaaacatttaaaaatctataaaaaatttaaaaatga

SEQ ID NO: 11252 - DNA, 1070 bp, Heterodera glycines
  unsure (1)..(1070): unsure at all n locations
tatcaaaacgaatgattaagaaaatantttgtgatttctctttcgtcagatagcaaagcaaattgctacttgggcctttgctacagcgaacagaggcgggaattggcgaagaaaggcgcagaggagcagcaacagccgaacgcggcgaatgggcagcagcagccgcgatacaacgccgtaagggggcggggcaggggaagcggaggacggcatcatttggtgatttatatttgacaggaccaagcggcacaaaacgccttcgtctcttatcgaacggcgatagacagcgacgagtcggacgcgaacatttggcgcagcatcggcgttctctaccagcagcagaaccaaccaatcgacgcgttgcaggtggtgaagagacgagcaatgaataaataaaacaggggccaaattcacggaggaggtcaaaaaatttctagaatttttgcattgtttaaaactatagaaatttagattttaattatcattatttttttattaaaatttttgatggttttttttattcataaaatttgtttttctttaaattgcctttttggtttcttaatacaaaaatagtttttatttaaatttattttttattatatcgcagaacctgaaaaaatacatatttaaggggaaaagagggggaccctttgattaaataatagtgcgattaatttgtcttaatgttgattagatgagaggacataattactcgccccataaaaaacataaatcgctgttataattaggcgttttctttaacataaaaacgtctgtccgccaatgaccaatcaccactgattaattaattacctaatttgttgtctcccatttgtgcgtttgtttcatttccgcttttccccgttaggcatttgcttgcgccgttcagctgaacgaccgtcacttcggcgcttggcttgaccttggccacctctacgaaagccaccgacagtacgcggaggctctcgccgcttacacaaaggcgctaaaggcgacatccggtaaatgtttactatgcaaaatggctttatgttttttgttgttgctttctttggtggggggggggg

SEQ ID NO: 11253 - DNA, 3671 bp, Heterodera glycines
  unsure (1)..(3671): unsure at all n locations
acccccccccccccttccccaccgccctcttttgctgctgacgttggcgcttggtttcccgacgattgagtgtgtgttgtttcatcgacggatgcgtcagacactcgcttaatgaatggttctgtttctttctgtcttttgttcgtcgtcgtcgttttcctcctcctctcccttccgacccgttcgtctcgttcatttgttggcatttctcttctgaaccatttgtttggtcttcggtgttttcacacctttccctccctcccccctttctctctctctccctcctttttttttgcttctttccctcatcatccatcgttcaaattccttctgctgttgctggtctctccagtcggagttattaatccctcctccctctttcacctgtcacttattcactctctttcagattgccttccatcgaaaacgcgtggcaattgggcatcccggcgcaggtgtaagtgaagaagttaaagactgaaaatgtttcacaatttaactcaatgattattcgttcaaagaacgtgccttccttcccccattattaaattgtttcgcacttttcagacgtcagcgactggccgatctgaagaacgtaggtgaatttataaatactttgggcttgtatttatagaaagtttctcccattggctaattcgcttccgttttatcaataagagtggacccgttttattgaagcattttcttttatggccagaaaaattttaaatggtcaaatttccatctccaatttatttttcattcattatcaactgttttattcgcttttgcctcttttttcactttcccatatctgaaaatgctttttctaatcaccgccgaccttttctcaattatttcttattttttttgcaattaaaaatgaatttttggattgtggaagtcaaacgctttctttctaaatctaattaattatctcttgcccattcacccccatgtaattgtgcaaatccgctcggcttatttcgttgggtgttggattgcccaggggcgggggtgtgagagaatgaatggttgtttggtgcgcgtgtgaacaaaaagcattcgcacctgggcaattagttagtgttcttttttaaagatttttgtcgaggagggtggcacactttgcctcattggcttttgaccccccataacctggcgatggcattcgttcatctttggcactttgttgcatgcttaaacatttgccatattttagcacaccattctcaactaccgtgaaggctcttctctgtggagctcgcaagaattggtcgcggattccatgcaaatggacagtccgacaaccctcaacagattaacgcccacccaaagacaaattctgcagattttgaaggtcaacaaagaccaacttgagggcggcagtttggaggtgagggaaaacgcatggccgaacacccccaattcctttctatctgttcagacgacacttttgtatgagttggagcaaagggtgcctacgaccgctgatgctcgggagggggcgaagaacgacgcgagaaatgggacgaccacgtcaccagggcacagaacgaccgctgaccagacggatgtcccgcggccgctgaatgtgaggaaaggggcggcttaatcttcttacaattagtgagagtaggggagggggtaagtacacagtttaatggttgacgatgaatcatcttcgaatgatattacagtggattaaataattcggaatggtcatgttgatcaccaacaattaccttccctaaatgtattgattgatcattgcttcgcctttttcagcaaattgagtgccgtccttcgtcggcatttccctccgagcggccccattcgccgtccactttcgcctccccccctctccagcagccgcatgaactgacgctgccctcctcgatgatgtctccgaaggaagagacgccgatggacggggaggaggacgaagaaagcccctcgtcctcccacaaattccaccggcaccacaaacaacatatccaagaagagaagatctcctcctccacctcgtcctcctccgatttgccgccgaacttctcactgcttgcccctgtcaatgtccctgtcaccgtttcttcggaggaaattttcgatttgtgtatgctttttatcatcggtttaaattaataattttttggtttcctcattttctgaacatttaggcaagaagcgtgcttccaaacccgacgaatactttttggcacccatttttgacgaggacgtgcccccgccaaggcgacccgtgccgtcccaagcacccgtctccaaagacaaactcttactgaaaacaccgcttctgctggtcgagaatcagaaggacgcgagcgcaattgagctgcagcagtactgctacgcgcagcccattgtgctcatccacgggctgacaatggcactgaaaatcgacctcagccaattctccaccaaaacactcattcagacggcacctgagcacgaggtgaaattgcacacaacgacaaagttcatgtcgtaacactgtgccattgccatgttcaggttgaagtgcggactcagttcaaaatgccctcttacgatgtcaatttggaccaaatgggcgagtcgacctgggccatcgtaatattttttcgcaaaattggaaaactttataccatctttttgtcatttatagaggagttccaagtcgtggtcgaccatttcgcggtacggccaataccaagcggagtcctttcggtgtgtttggttggatttgttaccgaacagcttttgtaatgcctttttcagccattctctgaaagaggaaacggaaaaactgcgccaggccaaccccaaattgttccaacagcaaacgcccagcacttctgacacgccacccgtcgactgtgcttcgccagcaccgtcgaagaagcgcaaaacggccgcttcaatggccgcggggagcggaacgccgacgagcagaggccgcgtggaggagagcagcccgtacaaaatcatcaaattcggcaccaacattgacctgagtgacgagcgaaaatgtaatttaaaggggggggggggaattaaaaatatatatgtgaaattttcaatttttcttcgaggggagaggaaaaagtgatacgaatgagtcaatacattaaaaactaattggaatatccaagttccacaaccctaaaatttcagtctatgtccaactgaaggaattgaacaaattgcccgccttttgtcgcctccattccaccagtaatatgctcagttatctcggccacaccgtttttgggatgaacactgtccaattgtatttgaaagtgcccggctgcagaacgccaggtccatcccaaccaaaagcgaattttattaaaccattaattatgttaattaggccacctcgaaaacaacagttttgccagtgtcaatgtgaacattgggcccggcgaatgcgaatggttcggcgttccttacgaatattggccgggtactttactttcccatttccttttttcattgtcaaactaattttccccactttttagtgttggaaaatctgtgcaaagagtgagtgtccctcttccatttccccaatgtttccctttttaattttttccattttaggcggaatatcgattttcttcgtggcgcgtggtggncgagtgtttcggacttggtaaagtctgacgtgc

SEQ ID NO: 11254 - DNA, 575 bp, Heterodera glycines
ccccccccccaccctcttacgatcgactaagagaccccccccctgacccccctgtgaaagtattataaaaagggccccattttttcctaactgaaaaaactaggtaaataattaaaattatgctaagaaccaatcttccatccttttacttcccccataccgtatcccttccctccccccgtttagtcctaccagtcgttggtgcccatgcaacatttgtgctgggccttggcccgcgatgtccgtttcaccaaccaagtcagtgtagtctctccgtcggcttgcacttcgttatttcatttcagaagctgttcaaccaggtcaagcacatgctcatccgctcgttggcctattgccaaatgctcgtcgattatgtggcggtagcgctcaaaagtcccatcaaaaagcagcagcgacagaagggcgagtgcgcccactattgccacctgtgcgaggtcgaagtgttcaacattctttttgtcaaggaaattggcggcaaatggaaagtgagaagagcacttaatctgacgaatggtcggaagaaacgcctttatttttttatcattttttagatt

SEQ ID NO: 11255 - DNA, 4769 bp, Heterodera glycines
cttccgaaaaatgatctcttccaactgttattttattctttttttttgcattaatcatttttaaatgtgttgcgtaaaatttacaatgtgtgaccaaaattcatcaattgaaaaccctgaccaacaattcccttaccaacaaagggacggtagcatttctgcattggcattgaagtcagacgtcccccctccctaatgttttgccttagaaaattgggataaatgacatttatcggctcatagtccccggtcgttgcgtaattgatcacttcgttcttgaacgtctcgtatcggagaccctgattgtttaacacatcgtggttcagcgtcattcccctcactttgagcacatgctccatttgggcaccgggctcagcccctttgcgttgcagacacaaaccatactttaaatgcaacattgaaaaaaaacaaaacaaatgatttttacttgttttgctcctccactgcaaaattcgatgattttgtggtccgggtactcgtccgtaaactgtcccaggtgcgggccagttttaagatgacaccgaccatcgggatggacaaggatcaggctatcggtgtctaaaaattgaaattttatacacatctcatggtttcgattgatctcttgccgatgtttgagcacgcgtgctcgtccacccaaatataattaagccaacattagccctttagatgtggaaaataaattttgtattgatttgtttaattttgttttatgttatcggtaatagttttgggacttgtttattcaaatttattcgctacaatatatttataacttttctctattttttattttaattattactatatttaacatcaattacgaacaatttattaatttttttctttaatttttaatcatatataaagacataatatgacaataaaattttttgattgttaattcaaacttttttctttggtagtttctttcgaattaatagatttatttactaaatttttgaatgtccataattcagtaatttcgaaattttaattttattatttctttcatatcagctattctgatttgttatgaaattttatattatattttcataatttatataaagataatgattatatccattaattattatattaaacatagaagatttgtcctgatatggagggaacgatcaaaatttgtcctgatttcttaaaattcttcagaaaatttgtaattttatggcgtaagtcactcagagttcaaaatttttcaacggcggtgcttaacggcaacgcctgaccctaagaatcctttgttttattaaaaattggctcaaaatcacaaaatttggacaatttttggacaaaatctgttaacaattatacccaaattttcaaaaattttcccggcggttccgccccgcttgttcctcaaaagtcattgaaaaatgcgccgcaaaaatattcttaaaaatctgtttttttgagaacgataacaatttaatgtaatatttgcttatttcctccctaaaaaagttaaaaatagtcattggagggaatacgaaatatgattctatatttaatctattaaattgataaacaaacaatttttagctattttccaaaatgtcctgattttcgaccccaaaatctgaatttttgggcccgatgtcctgaatttgaataatttttgatacgcaccttgggtaaaacacattattaattgctttaaattaaatacaatattttttatttgctctgattttttttcttttaaattttatattgcatatacctgcatctatttgcattgcatttaatgaacttattggaatttttttttatttttgctatgggtttatatatagttaaacagcattaataaattttttattccttgttatttttatcgggttttaatataaacaagttgtttaaaaaagaagtgcagcagcaagaagttgagtgcagaacgttgaccaactgctttgcttttcttaaatatttattaaaatttactccattttgaaatgtattattttttttaattatagccttcataataattttcaagcgaagtctacatcggtttgctcttcgtgtaaatggcaacatttaaacactataattttggattataattttaaattttgttttcactttgtaagaaataattattatttttgaatttgagataataaatgcatcaaatttaattttagaatgaaaagaaataaaaattgatttattttgggttaataagtgttcttttaaatttcatatatttgattgtttaaataacaatttttaaatgcgcctacaacaaaaaatcaaattatcaattttcataattggatgatgtgtagtttttgctcgctattaacggggtttttacttattttttctgcggctttaactcgacgagaaatgcacaaaaaagatatttttgttcgaaattttgcgttttatcgcccttatagaattcaatcggaaaatttaaaataagttttgaaagtatttataataattaaattgcatgaaaaaaattgaaaaaatttttcaaaaactgccactttttcacaagcgccaaaaatattatgtcctattttttgctaacaactgaaaaactttttgaaatttacaggcgattggagaaattttgagtcatagaatttaatcaaaaagtgaagcgttgaattttgtcgtgtcattttattgtcgtataaaattaacaaaaatatcaaatggagaaaaaaataatagtagaaaattaagtggaatgagggaagggaggaggaacgatcaattggattgggggcaatgccaagccaaatgatgtgctgagagcagtgccaaaggtgtgacggaacagcgtcaatttgtattggttttataacaaggcatacagagaaaaaaaagatgaatgagagagacagagagataacaaaggttatgactttttatttaaataattttctttgtattttacatagaatgtgcttttaagaatttatcgaaatttagtatattttaaatgaaatttatttgaaaaatgaactctaaaagacgattccttcggaaaagggaaacaaagaattaatttttaaaatttataaattatattctaagcctaatgaagtaactttgtggtagttttgtttttcaaccccggcctgaaaagccgagtctacactttctaatttgttgtttctttctttaaattactaaaccatttattcgtaaacttaaaaatattttttagttaatttttaaaagtaaaatttttatctttattttacttgtgatatgactttatgtgaagtgtttgttgagtgagttacaaagtgacaaaacattagtattcttaattctttctcattaaaacattgctttgaggagtttttcggttttgaggcagaaattcctcatgaaatattgcatgattgtctttaatattaagatgttagttttttttttatagcattaagcgaaacattaattttttgtttaatttgcttatcatgaagaaattcggtaaaaaaactatttcgttttgtgttttctgtacatgatatttataccttttcataaacaagaccgagtattaaaatacttaatgaataattatcatttgaaaatattttaattcattatcaggtttgattggtttataacttttttaaattaattttatttattttttattttcaagagatattaggttttctttttcttttaaattttgatttttattttacttgaaaattttttattttttatttatctcattaaaaaattctattatgaagtttcattattgcatgcattatttttggtagaaccatataaatgacagaatagtaataattatttttgattcattaattgaccaagtcaatggtggttatataccttcaaagcaaaaaattatttatgcaatttaaattttttaaatttgatttgctataattttgagaaagaattaagaatactaatgttttgtcactttgtaactcactcaacaaacacttcacataaagtcatatcacaagtaaaataaagataaaaattttactaaaaaaaattaactaaaaaattcaaacaaacatctaaaatattttcagagatttctcttacgaaatttatttaattaaagtaaaaaaagtgttaaaaaggtgcagatggtaaatacaaactataatataaaaaacataaaaaccaaaatatacaaaattttaattatatgcagaaaaagcattattaataaatacattgaattacaatagttcttcatcgactctttctttaataacaaaagcaacttttacaaagcagattaaatttttaaatttaaatattgcttaaataatcataaatattaattttaccttttaatgctatttttcgccattgtaatttttttcatattttaatagaattataattaaataagggttttaaatatctaaaacgaaatgaaagctttgtacaaaataaaaattctaattttaaatgaatgatttttttgttaacttaatttcaattaattaaaaatttgtcaaagaattccttcaacaagtgaatgagtgcctgttaacaaaagaataaaaattaattctataattataataaaaatatttaatttttttttcaaattaattcgaaaaaatagtgcataattgttgctgctttgatgagtacggaagatcagttgaacaatgcaagttctgcaaattcaagcagcttctgctcttaaaaacataattgagaagtggttacaaaaaataaatttaaaccaa

SEQ ID NO: 11256 - DNA, 1114 bp, Heterodera glycines
  unsure (1)..(1114): unsure at all n locations
cattactatgtgcggttgagccctacanatggtcggttggaaaatggctccattactaagaatagatagtctcagaaaaatggctaactcttttttctacagcctccaacgagagggttttccccgaaaacgcattactatatgcggttgagcaatacaaatggtcggttggaaaatggctccattactaagaatagatagtctcagaaaaatggctaactcttttttctacagcctccaacgagagggttttccccgaaaacgcattactatatgcggttgagccctacaaatggtcggttggaaaatggctccattactaagaatagatagtctcagaaaaatggctaactcttttttctacagcctccaacgagagggttttccccgaaaacgcattactatatgcggttgagccctacaaatggtcggttggaaaatggctccattactaagaatagatagtctcagaaaaatggctaactcttttttctacagcctccaacgagagggttttccccgaaaacgcattactatgtgcggttgagccctacaaatggtcggttggaaaatggctccattactaagaatagatagtctcagaaaaatggctaactcttttttctacagcctccaacgagagggttttccccgaaaacgcattactatgtgcggttgagccctacaaatggtcggttggaaaatggctccattactaagaatagatattctcagaaaaatggctaactcttttttctacagcctccaacgagagggttttccccgaaaacgcattactatgtgcggttgagccctacaaatggtcggttggaaaatggctccattactaagaatagatagtctcagaaaaatggctaactcttttttctacagcctccaacgagagggttttccccgaaaacgcattactatgtgcggttgagccctacaaatggtcggttggaaaatggctccattactaagaatagatagtctcagaaaaatggctaactcttttttctacagcctccaacgagagggttttccccgaaaacgcattactatatgcggttgagcactacaaatggtcggtggaaaatggctcccttactaa

SEQ ID NO: 11257 - DNA, 997 bp, Heterodera glycines
agaaaaatggctaactcttttttctacagcctcaaacgagagggttttccccgaaaacgcattactatatgcggttgagcactacaaatggtcggttggaaaatggctccattactaagaatagatattctcagaaaaatggctaactcttttttctacagcctccaacgagagggttttccccgaaaacgcattactatatgcggttgagccctacaaatggtcggttgaaaaacggctccattactaagaatagatattctcagcaaaaatggctaactcttttttctacagcctccaacgagagggttttccccgaaaacgcattactatatgcggttgagccctacaaatggtcggttggaaaatggctccattactaagaatagatattctcagaaaaatggctaactcttttttctacaacctccaacgagagggttttccccgaaaacgcattactatatgcggttgagccctacaaatggtcggttggaaaatggctccattactaagaatagatattctcagaaaaatggctaactcttttttctacagcctccaacgagagggttttccccgaaaacgcattactatatgcggttgagccctacaaatggtcggttggaaaatggctccattactaagaatagatattctcagaaaaatggctaactcttttttctacagcctccaacgagagggttttccccgaaaacgcattactatatgcggttgagccctacaaatggtcggttggaaaatggctccattactaagaatagatagtctcagaaaaatggctaactcttttttctacagcctccaacgagagggttttccccgaaaacgcattactatatgcggttgagccctacaaatggtcggttggaaaatggctccattactaagaatagatattctcagaaaaatggctaactcttttttctacagcctccaacgagagggttttccccgaaaacgcattactatatgc

SEQ ID NO: 11258 - DNA, 5819 bp, Heterodera glycines
  unsure (1)..(5819): unsure at all n locations
ataaaattttccagtggtttttttcatgtcttacacggtaacattcgaactgacaatggtactgaccaaatcactttaaatccacttttatcgtatagaacatagtcgatttgcaattaaattttaggcttttggcaccgggccaaaagtgattagaaaagatcgataaaatgaaaatattagcaaaaatattttaaatttaatgcgattttcccatgggttcggatccgctcgactattgatgaattattttgttttttctttgggggttcgattccctttcacgccgtaaatattttttgtaatttttttatcaattaaacaaaaaaaaaaatctaatttattataagcaagaccgacataccaaatttccataattagatgccaacactgaatttatcccggtaaaaataaatttgatcaatgtctcttaaatttggccctgaggcgccattttaacaaaaaaaatttcgagaaaatggcccttccaaatgccgctccttttttaccttaatgacatgttgcacatgtaacaaataggacggtgggccaagcgccgcgtcacgaaacccaacaaattggggcggctcagcacattggaggcgaagataggcctgttcagcgggcaaatggtgataaattatctggaaaatggacaaacggtttggtcttagattttttgaaatttttttttattggttttcctccattttatgtatctcttaatgagattaactatttgtttttcaaatcaaattcttcccatgtgtgtttaaaaagagattttccggtttttgctgaccgttttcttaattttttttttttaaattattatattttttaaatataatttagatttaaaatttaccaaaattttatataaaaaatagagtagagcgggaccgggaccaaaacacggacaactgagtacaactgagtaccgaggtcccggttttgaccgggaccgggaccagtcccgggttttttcccggttttcccagccaaaaattcccggtttttcaacccgaaaaggtcccggtcccggttaagcccaaaattcccggtcccgctcaactctattaaaaaataaaaatattttgctaggcaacaccaaatttattggctttttaacttattttcactcaaaaaatgtaagtaacaccacattttatatcaaaattggagaataaccatataagaagcaatcaggaaaacggcgttcacacgacattgtgggctaaaatggcgagaaattattgcgggaaaaattagaattttttgtttcagggggacccctcaaatgtttttaagaaattttgggcatttgatctggttgaaagattgaacatcatattcatgatcaacattcttggaaaatgccccacaagataagccaaaaagctaataatgggcttatatacatatttgagctcgacattttgaaaaaattctggatcctggattcctatttgacctggccctggattttcggtacaaaaactcagaaaaatccaggtccaagaaaaacccatgcttgtcatggcctggcctggattgctttgtttttaaaaaacaaacaaatgtttgagaaaaaaaacaattaattgtttaggaaaaacttaaattatctaattgacaataataaaatatttaatcattttttgacaagtatcttgaaataaaaaatggtcacttgagaaataacaagtcaagttctaaaatattatcctgaaatccatattttgactggaactggatttaggaaaatccaggcccttagtattatccaggacatccatgagtttggcctgggcctggacccaggaaggatccaggcctttacccaggttcggatcaagctctaaggcacatgcctttaacagatactttaatgccgaattaaaaatattatgttaatgacgagaatttttaaatttgaaaaaccaatttttggggtgccatttttactcggcacttgtgtagagaaaaatccgcttcttctgctgctgttgctgagcattgttctgttgcagcaccaatgtgtgaaggaactgacagaaccggtaaagcacagccaaattcaatgggccaaaatcatcatagaaggcatctatggatttgtttaaaaatggattttgaaatttaacttcggatcattaatttgtaaagtttaattttctgaatttttttttcttgtaaatcctttaattagccaaatttcacctaatttttaaaaatattcggccgaaactcagcatgatgcaatattcccgagcaaatcacccttttttatgttttctaatttgtaaaaagcgtaattttctggatttttttttgtaagtccattaattagcttaattttgcctaattagttcgtccatccgctggaatttttttgtaagtccattaattagcctaatttcgtctaattagtccgtccatcccctgtttttcccgagaccatagtgcacgtggctgtcaatgtcaatgtaaatggtttttgcgtcgtttttcggaggcacaacaaaatttttatcgctgctgtaggtggtggtggaggcctcattagttcgaatgttgtaagaagtgaaataaaggcatcccgggattatttgcgcgattggaaatgccgccgccggcgccgctgtggtggcggtgccaacaacagcggaagacgaggacggatttttggtggcatttttgttggacgacggcggatgactgagcaaagtcattattctccggcacggctcctgctgctgctggtggccaacacaacgcgtatccgacgggggacggacggcgttgggacccgaaaatttttaaaatattacaaacaatttaaaatgcacaattttcttagagtttttgcattggtatggcatcgcaaaaaaataaaaataaaaaaatatgtggatggatgtggaggtaaagcgttggcatagtgttggtgtgttgggtgagtgagtggtgggatgatgatgatgggggattgccatcaaaaatgcgcctttttggcaaattttgtaaaacaaaataaatgaaatttgaaatatgtaaaatcatttttgggattttaaattaaaataaaatcattctagcgctatttttccattttttgaaaaaaattattattaaaaatgcaaaaagtaaataaataaaataaaatgcagcaatgagggatcatcagagagctctcctctctctatccaccgatataaaaatgctcatttattaatctagttttcttttttgggttctattgcactttacgagtttatgagtccaatcggaatttatgagtccgatcaaatattataattgcattttttgaatccaatcaggtttatgagttatttaattaattaaatcaaattttgagtccaattattttttattgtcgtaaaccatttttaagcgtaaaaatgaaaatgaaaaattcttcaaaaagtgtcagttaatcgtaaaaatttattgactcataaatatttgatcggtggattcaaaatatttgattggactcataaaattaataggactcgtaaagtgcaataaaattttttttaccactaaatttacacccccaatagaatttataatgaaaaaatagcctaattttaaatttttgtggtcatagtctacatattgatcggaatgaacgcgcgcacatttaagctcatttgttttaatgagatctgctgatgatgatgaactcgctgctatgaaatgaatagagtcagtcagtgggctgctgtggcgtcaatccgtgccgtcagaaaaaaaaagattgatcgatcggggggggggggttagtgcaaggtgtttaggccaattatcatagcaaagaaattcatatttgttattagttttttgacaattatgtaattctttatatgcattttttcttgttttaattatgtctgctttttggtattctttcttaaattcctttttaatcgagtatccctgaagataataaccaacatagtcgcttgatagctttaaaaagatgcaattaactgagtagtgtgaagttccttatttttaatatataattggtagaatctttatgtaatatactggattaaaaaaataagtcttaatatgtattttctgcttatagttgggatttttgtttagaattttattttcccactttagtctttaaaataatctgactaatagttttataaactcataatataattttattgccccttattatattgctaattttatttaaataactccattaaataattctttttanaaattcttccctttttgccccgtgtcgagacacctatgattttaccggatggcatttggcattcgtagctcagtccatcccaagtaattacataaattgaatgagattatagccattactccgaaggtggaccgcaccaaaataatagtaattgtgaaaggggaaccgaatttccaactcataataaataatatttaatatttcttcaagtattcaatgaaattggtattaagctgataatttttttttttcaaaaattattaaaagaatatttaacctttaaaattgaatatcctatttttttaatgttatttcctacaatttatgcatttatgcttaagatggaaagcccggttgctgattaggtattatttttttattcataagttgcttaattcctcaaccatttttctttgtttacataagaatcatagtaaagaaaatttcgatacataaatttgtattttattttttttaattcaaaaactttattttatttccatataatagagcagcctttcatttgctttaagaaaccagtagagtaatgcaggtcatttcttgtttatgtgattttcatctcaataatgtcatcatatgagattttttcaacttcccatccataatcagttttttaatttgttttttttgttaaatattttattatttttaaaaattttatttgttgttttcttctgtatttttgcatacgaatcgagttacatattctttaataccaaatttcgtttttttaatgtacttgaaatttcgctatcgttactcccgtcatgaattttttttattatgggaagaataattttttatgcgtccttgttttccaaattgaattatgccccaactcatggcggcgtcgcggttgtgggggctctcggtcccaattttgatgccgcattggcggctcattttcttcggagatgatctcaaataattcgacgattgcgagttctccggcgtgtttccttagtgccacggtttatttttatttctctcttgatatttttcagcggtatttatacaattgaaattatttaatgtaaatattttatgctttgcgcgattggattaaattattttaaattatcttgtacttttttctaatcctccaaatcttgttgactcgcggatttattccgtaaattataatatttcattaattaaagggttttatgtgttaattttattacataataaccacttaccttcacataatccagatgtttagaattttcgttatttattaaaagattaaaaaggtaataaataaacaattatagtcaccaacattttataatttaattttcatgagatgagaaagcgcccaatggcaatcttttcttttgccatgagggcgtttgttcttttcaggcattttaatattttgctagtgcatcattatttatttttgtttgataataaatgttttattataaaagtttcatttttttataagtctaaaaattaattaatcgtataatagtttgtaattaaaggttttaaaataaattttattagagtttttgatttactg

SEQ ID NO: 11259 - DNA, 1274 bp, Heterodera glycines
aattatatatcagggaacccaatactttcttgggattttccagtacgggtttgtccgtgaaatttgaaaaatatttccaaaattcctatttctttttctatccttgtggactgagtcggcccttgaaattatatatcagggaacccaatacttccttggaattttccagtacgggtttgtccgtgaaaatttgaaaaataatagtattatatgcagtgaacccaatacttcttggaattttccagtacgggtttgtccgtgaaaatttgaaaaatattccaaaaatccctatttcttttttctatccttgtggactgagtcggcccttgaaattatatatcagggaacccaatacttccttggaattttccagtacgggtttgtccgtgaaaatttgaaaaatatttccaaaatccctatttcttttttctatccttgtggactgagtcggcccttgaaattatatatcagggaacccaatacttccttggaattttccagtacgggtttgtccgtgaaaatttgaaaaatatttccaaaatccctatttcttttttctatccttgtggactgagtcggcccttgaaattatatatcagggaacccaatacttccttggaattttccagtacgggtttgtccgtgaaaatttgaaaaatatttccaaaaatccctatttcttttttctatccttgtggactgagtcggcccttgaaattatatatcagggaacccaatacttccttggaattttccagtacgggtttgtccgtgaaaatttgaaaaatatttccaaaatccctatttcttttttctatccttgtggactgagtcggcccttgaaattatatatcagggaacccaatacttccttggaattttccagtacgggtttgtccgtgaaaatttgaaaaatatttccaaaaatccctatttcttttttctatccttgtggactgagtcggcccttgaaattatatagcagtgaacccaatactttcttggaattttccagtacgggtttgtccgtgaaaatttgaaaaatatttccaaaaatccctatttcttttttctatccttgtggactgagtcggcccttgaaattatatatcagggaacccaatactttcttggaattttccagtacggtttgtccgtgaaaatttgaaaaatatttccaaaatccctatttcttttttctatccttgtggactgagtcggcccttggaattatatagcaaggaacccaatacttccttggaattttccagtac

SEQ ID NO: 11260 - DNA, 5350 bp, Heterodera glycines
  unsure (1)..(5350): unsure at all n locations
ccccccttaggtagtacgattgtattataggattatgaatgataaaatcgactggctcgtccgcttcgcggcctcgcatccttttcttggctttttctccaatcaccagaactcagtccaccagcatttcaatcactggtactcaaccctccagcatttcaatcactggtactcaaccctccagcatttcaatcactgggactcaaccctccagcatttcaatcactgggactcaaccctccagcatttcaatcactggtactcaaccctccagcacgtctgttctctgcgttgtatctgtggcacgggcgaaatgtgaagccggaagagacgtcgtacatcatcagaaagcggaggagctaaacaaagcgaaattgggagaggaatggacacggaaaaacagcggacgaagcggaagagtgcacaaatcccaaccacctcccgccgccgaaaaaaactttttaaaacttaaaatttaattcgccgaaattaagtgccgcgggagaagaacagccagccaaaaaacgagttttgagtatttttgtgtgaaattctccaaaaaaaattgcgaatttggtcgaccgatagctcaggatttctccttgctaattataatcaaacaaaatttataaaatgacatttaattttcattaaaaagtcccgttctcacgtggtctttgaagttttgcacttcttgttcggatttgcttgccaaaaaatctgtgaccgttctcaacgacaaaagtgattgggtcagtacaattgcgttgccattgtccacaaaattggagagtatttcaatgatttgcctccgttcttcttctgccaatggcttatgactaaacaatcggaacaatcaatgaaaacaaacggaaacgaaaacgaactcaaagctcattttatgcgtctgaaagcccaaaattgtatccacgagaatagctgtacagagatctaaaaacggtccaagtggagtttcaaaattcaaaaaacaaattcatccgaaccatcattttcacataattccttgggagtcatttggtggctgcgacttggacgcaatttcagtaaggaagaggcagcagcacaatgggtacgccccactgtgcagagaaaagcctagtactatctcgtcgtttctctttttctttgtaatttctctcactttggcgtactatctctttatttatttatgtaaaaaacaacttttacttttctatgtgtacctttttttccttatgttaaatctgaactaaattttgcatatcgatagagaaaaaaaatctgcatccaaatggacatatactaaaattggaacaatacagagaagattagcatggcccctgcgcaaggatgacatgcaaattcgtgaagcgttccaaatttttttgttcattccaaatggacatatactaaaattggaacaatacagagaagattagcatggccattgcgcaaggatgacacgcaaattcgtgaagcgttccaaattttttttgttcattccaaatggacatatactaaaattggaacaatacagagaagattagcatggcccctgcgcaaggatgacacgcaaattcgtgaagcgttccaaatttttggtttaattacccaagtttgagctcaatatcgcagtcctttctgaaacgccccttaatttctaattccccgaatcaaattccgcaaaaacgtcatttcctcaacgaagtgacttcaacaaatttggccattgacacacttaacgacgacccgtccatttctcaagctgcccgtgtcatcatttcacaactaagcaatctcctcaaaatcgccgtctccctcgtcgacaattctgtctcagacattgactatgctgcggagatggaaagacgccgctctgtggtcatcaccggacttccagaaaaccaatcggagaccccatcagttcgtgccatttctgacaacaatgccgtcacaggttttcttgaccagctcggggttgagactcattctatagtcagctacagaatgggatggtacaacaaagaccgagcaagaaatggtgcctgccgtcccataaaagtcgtgctccccgcctcttcttttcagcgcacatgccttcaccaatggaacaaaaaatcattggaaattcgccgacagttggacaacaaaaggctgaacatcagggaatctctcactcaagaacaactgaaagcgagacgtgaacttcaagcgcagtgtgccgaaaagcgaaaagaaacatccgctgactggatcatctataacggcatgcttgtgctccgaagtgaaatcaaaggaaggaggatgaacggagagaacttgaacgggccttttcctcacattgactctctgctgacacgcaatcaaaaaaactaattcatgccagcaatgttctgaggtttgggggtagacaaaatttccaaaaaatatattctcaaaacagaaaatcccctaaacctcatcctaaattttctcatgctaatgtaaatacaaatatgaatttgtccatctctggttgtttagttaatgcacgttccataaaaaataaactaaatgaattaagtgcattactgacagtaaataaaattgacataatggggattacggaaacttggctttctgaatctgatgaaataacttttcttgaacaatcactcaatgacaaatatgttgtttttaatgcgaaaagattaaaaggcaaagggggcggaacctctcttattataaataaaactattcagccttattttagtaacacggttacaaaatttggttgtgaaatctgtttttgtaaattaaaaaatgctaaaaatttatctattttatctttatatcgcccccctaataccaaacttaaagcaacaaaatcactttttaattaccttgaaaaatttattacagcttccaccttaattataggagaccttaacataggcaacagagacataacttggtctaataattgtcccatacctcatacctgtcttggcataacttttgttgattttttcaataaattttctttaaatacaaaaattataggtcctacaagaggaaattctgttctagacctttgcttatgtacaaacccgaacctaattcattttgttgaaattaaggacagccttatacattctgatcattcagccttattttttcaaattaatttgtcattacagaaatctcctccaccaagaataactattagaaactttaaccctaacaatattaaaaccttaaattcgtatttactttctaatgttacatcaaatttaaccaatgtttttacattagaaaataaatacaaagttttttctgaaacaatttcgagtgctttagagcattttgttcctcaaacttcctttcttaaaaaaccaccaccaaaataccctcttcatataagagaatcgatcagacataaggctctcctttggcagaaaatgaaaatagacccaataaaatataagaaattctatgattctataacattacatatcagaatacaaacaaaaaaattctatgaaaacagacagaaaaaatttctctctgttaatccaatgaatctttataaacttatcagaaaaagttttgtaacaaacaatagtattccacctttagaaactgaaaatgggtttatttttgatgacaaggataaggcacaatattttgccaagtatttctcagaaaccttttcaaataatttggattcaacaccttgtttgtctcagacagacagcctcggctattctatctcggatttaaattttgatgtctctgatgtttttgataaacttaatcgtttaacaaatagaaataatacttctcctgattttataaacaataagattcttaaaaattgtttaattcctcttgagacctgtaactgatcttcttaaactttcttttcactctggaaaattgccaaaaatatggaaacattctattattctcccattacataagaaagatagtaaaagccaaattaagaattatagacctatttcacttacatgctctttatgcaagatatttgaaaaaattcttgctgaacatattttaaagttcttgttagataaaaaattaatttctaattttcaatttggctttgttagtagaagatctactattactaacttaattacaacacttgaggactggtatgacggtattagggataagaaaaatattgatgctctttatcttgattttcataaagcctttgataaggttccccataatttacttatatataaattacataaaattggtattaggggcaagatattagcttggatttctaattttctacttaacaggacttttcaagtcaaagtaaacgaacattattccgaaatttttaaaattaactctggagtcccgcagggatcggttcttggaccacttttgtttctgatttatataaatgacttacctttatgtattcctgctgaaattggcatcaaactttttgctgatgatactaaattatatgttatttataaatctgaagctgaaagaaaacacatggaccttgcactttctaatgtactaaattggtcacaaaaatggggaataaatttctccttggataaaagttttgtactttattttgggctaaataattctaaaacactttacaaaattggtaatcatatagtcagagaagccaagtatgtccgtgatttaggtgtgttggttgacaataatttacagtttactgaacatataacccatttaattaaaaatgctttttatcgatctaaacttttatttaagctaattaaatctaaatcagttagaatttggtccttagtttataaaacatatataagatccttattagaatatgcaacagaaatatggaatccaaagtcagttaatgcacttaacagaatcgaaaattgtcaaaaatactttaccagaatagccctaaaaaaatgtaatctcccttacatttcatataacaaacgtcttgaacttttcaaacttgatagacttgatgttcgtagacaagttattgatttaactacggcttttaaaataattaatagtttttcacatttagaccctaaaaacctttataccttttctaaaagaataaatagattcaactgcaaacaacttgtttctaaacacaaaacaaacaagacagaacattctttcattaacagaacaaccaaattatggaacaaacttaactcagaaattacaacatctccctctataaatatttttaaaaacagagtccttaattgggttaagacccctaaataccataaaaatatttacattgcatgaaaaaaatgaaagaattgttttataattatatattttacaantgttgatgtga

SEQ ID NO: 11261 - DNA, 1318 bp, Heterodera glycines
tttgctttgatccaaaaattaaataattattgaaaacattaattactttaattttaataaacgcaatgaaaaaataagaaatacaaataaaatatattcatttttcttaacattttttaaaataaaagatatatgtaattaatataagaattaataattgagtaatttcaaattttattcaattgagggataaaatttaattcaaattttaataaataaaaattcattttaattggactaattttaatttaattatttgaataaacaaaagaattaattttaattggctaattcagagtgatatgccttttttgctcgaagccgaatatttcacatgtggccattcggatgccgaattggccattgatttggacatttttcaaacacttattagcattgcattggcaatggaactgcgggacaaattagtgcgctatttggccgatgaattgcccaattttcaaaatgacatgcaaaaaccaaattttgcaccatcacccaatgacatcatccaacaataccatgccaaactttgcgcattggcaacaccattttttgggaacaaatttggccagaaagaagaacagcttgtttggccaagcttgacacggtaaaaattgaaatttcaatgaaattttggaattttaaattttctaaaatagatgggctcatttggctgaccaaagtgacattgaaagtgccatgctttttcttcatacaattcagcaacaaaatgtgccaactcgaaggtattaaatggctaattaattttatttttttattttttaaagcggttaaattaataaattaaatattttattttttgcagatttttacctccacttagtgcccaaaatcgaccaaaatggtgctcacttttgttaatggatgcttcatcggaccatgcaataattggtgcttcattaaattgggttggccatttggaagtgtttgttgatgaggagcaaaagttcaaggtgatttaagcaaaaaagattattttacagtactctcaataatcttttacagtactatcaacccacaaaaatattattttacagtactctcaacacattaatactgtgtattcagcttgtaagcactgattttgcgcgtcttcgctttttggcccaccgtatccaaatggtgccgctccgatcacagccaattcaaattttgctccattttgacccaaacgaaatttgtacagtagtcgatgaacaaccaaaccagcaaataccgtatttgaccaccccatcgattaacaacgactttcacactcgagcaatgatcagcagcaaacacagcaacactgatc

SEQ ID NO: 11262 - DNA, 3710 bp, Heterodera glycines
ctctagagtcttaatttcaaaattaaagtgttcgaaataattatggaattttttttcacgtccaaaatttttaaacaaataaataccaaattcaaatttgaaaatttagccaagtgatgaacaattaattaatgaaatggacacaattggacaaagacttgaatggattcggcaacaatttgaacagcggactgttgtgggacaaattgatgaagccgaaatgtcaagctcattggaggaggaaggcaaattaagcaatgaaaatgggaaggatgccgtcatcaaaattccacaaaatgaagacagaaagccgaaattcggagatgaacttgaaaagataagggaattaggaaccatcactgagaagacatgccaagaaaattccaaagtcgaaaagcctgcttctgtaaatgccaaagtcgaaaagcctgcctttgaaaatggcgaagtcgtcgaaaaactaccattcgaaaatgccgaacaacaaaagccacatcgacaaaatgccgagaccataaaaacgactcttgaaacagcgagaatggcaattccggctcttaaaaacggtgaagaaaagccatatttggacagtgccaaagaagtcaacaccaagacaacttccgaacaagctgaatttgaagaaaaaattattgccgagattgaaagtcctcaacaaaatgccgaaattggactaagattattggaccacgaatccgacagatcttttgtacgtcagagcccaccttcatctgctggctatcactcctcacgtccttcgacttcacaaaacaatagtcacgaagaagaagctaatgtcaatgctaaattaaatgccaatcgaagaaatcaaaatgccaaaactggaaatgtgccaacgcctccgattgttgaaccaatggatttccgcggtttgagaagcagcgatgaaggagaagaaatggagcagcaacagcaattgaatgtacagcagaaaaggccaaaagtccgttcatggaaagagatagaggtgaggaaggaggtcttggagggggtacgaacagggaaaaatcaaaaatttcagcaaaaaatgcaaatttcccccaaaaaaaaaatttttttttttacacaaacccatctctgggctaaaaagtacgggaacggaactggtactcgcgacaaaccttaaagtgtaattaataaaaaaaattttaatgttcaattttaaaaaattaacaaataatgatttaaaaataaattgactgtattcagttgaaaagtcgataaatcatttgttaattgctgagctgtttgttttaattttaaagaatatttaaatcataattctaaattatatttaaaattaatttcaaattcaaaattaaggtgttccctcggaacagtccatcaaatgtggaaaagccatcaattttcgttaataaatgcgccaaatcgataccaaaatccaaaaacaatgctaattaccccagcaaaaacatcaaagaagaagccgtccaacaaatgccgaaacggtcaccctggcggcggccccaatggctgcgtttgttgccacctttcgatggcacaattcgtacagaacgccaaacaaccacggcacagattaagcacgggcatccgttgctcgagcttaaactcgacggttcgccaatgttttttaattttctatttttatttttagagcatttttcaacgcctcggtctacggataaagtggcaaatgccggaggtgatgttggcacttttttaacaaatccgggacgatgccgaagaacatttttggagttggctgccaaaaaggagcgtcgtcatcggagccaaaattcgagcctcaacaggccaaaaacgacgatggtcagtttaaaaaaatgcaaataaataaataatctcaaacaaaatgtaaataaaaattgaaatttttgaatcttaatttttctccaaaattctttcgctttgtttgattaaatctaatggacaagatctaattgtaatttatgaattaactcattattgtataatacagggggtttagccccgaccaatcggggaagaaattctcggtgatcggggtaggggagcgcaaaattgtcaggatcggggaccacgatcggggaatgatcatatttttatttgaacaaaaaattcatttttttgccacttactagaaatgggctaaggccgagcccagtacatttgaagaaagggtcataaaggcatgccgtgggaaaaatgaaaaattttgcgcgatttggcgaaaaatttttttttttactccaaatttcaatttaatagatttttgagagccggtgaattctagcttttttcattcaactttccttttttttgacctaattggaccggataattgtcattcctaatggtctatttataattgatcagtttgatgatgaaaaaataataatataaaaaatatcctcaaactactaaattagcaattttgtaattaaaaatatttaaattaggaccaccagcagcagcaaacgcacaacaacggcatttacgacagtggcatcggacttgagcagcagcagcagcagcaacaacagagcaacaatggcacatcaagaaatggcattgtgctgtacacagttgagcttgaagaagcggatgttgcggcaatgcgaaggcgtgccgaaggccgtcagaattgatagttaatgggcaactaaccattttttgaataatttaatttagattttatgttggaaaatatttttattttctcgaaataataataaaaaaaaaattacagtaaaaaaaatagatttgggtaatctactgatgatcattttaaataattcataattataattttataaaaaataaagttaaaaaaatagatttggataatcctactgattatcattcactaatggtttataagacatagcgatttaagaataaataatttttatttaattagtaatcaaatttattttttaaattgatatttcaattttttattatttttaattaattattaatcaaatttattttttaattgctttgtaattttttttattaaaatataagctttaggtaaagatgtaaattccttatttttcagggattctacctattaaaaaaagtagaaaaaattttagcgttttcgaacaatagttgggattttatttacattttttggctttttcaaaaaaataaatataaaaattaatttaatattcaaaaatattacaaaactgaaattgctgatcattttgagaatcatttccttttattttgtcttccaaacttgcatttttatgctttttgataaatataaagtaaaaacgacaacaaaaatgatgtttattttctttattcctttttttattattgtttgtgatcaattttttattccattttcaattgcaaatccattggtgagttgattaatattttaattaatccattgttaattaggacgaggaccaaaggctaattgcagttatgaaaggcgacccgaaaatgcgactaagtgaatattcaacgcaaaaatatgaagcccaccttggcattgtgtatttaatgagaaaaaattggaattgtgacaaaattgcggatgaatttgaagaatatgaacgaacagaatgccaaaaatatcgaaaatatttggacatttcgcttaaatatttgcgaatgggatatgccggaattccaacagtcaagccaaaatttgtttttaaacataaatt

SEQ ID NO: 11263 - DNA, 2632 bp, Heterodera glycines
agctccacaaatggcacacgctgctggccaacaggtcggccaacaggaaaccatgggtgacacgctgagaggaaaaaatagaaaactttgttattgaatgtttggcatagtgctgatgcattttcccctagagtgtgaccaatgagcattgaccaataagaaaaggggcgtggccaatgtgcattggccaacatcaaatagggcgtggctaagaacatttgccaaaggcgtgaccaattagcattggccaattgcaaaaggggcgtggccaatgaacatttgtcaaaggcgtgcccaattagcattggccaattgcaaaaggggcgtgcccaatgaacacttgtcaaaagcgtgatcaattagcattggccagttgcaaaaggggcgtggccaaggttaacaatgagcgagaaaatatgaaattaactgcggcaaaagtggatgattagtgattaacttgcttacataaaaatccacaccgcgaaattgcagccacacctccagcttcaatgcagcgggcgaaatcactggcacattactgtaatgaaacagaagattactgtgcccactgtaaaagtgccaattcccaaatgttaggcacaaatgttaattatatagcaaaaattcattaaatctgaaattcttgaaatttttatgagtgtttacggttagtttttcaaactaaaaaaaagttctaatggctcagtggtaaaatagaaaattgattgggttcgagtcccattacgtgctatattcctacctgttctcatcaaatgcgccgattcgcggataagtgattaaataaaccacattttttctccagttctgtacaacattcactgaaaattttaatgtgccaaatcgttttagaaaattaaatttaagaatactatttaatccaacccattagagcaattaaatatatttatatttataaaataaacatacataactatttaaatgcatatgaattttaaataaattaaaagcaattgaaaatgtttttaattaattaaaataaaaaagcatttattttttgatacaaaaaaaaaaaattattttaccttctgccaacagtggcaaaaatctattcttcatatctgctataattttccgtacagcatcaatcatagagccgacaaaagggattttggcaaatacggaaacgcgttttgcaatgccacgagcacagaacattgcaaaactttttgctgacgataaaccactttgtaatggaagcattaagttaacaatggctttgctaaatttgttcataaaacgtgcaccgatgttggagtagtacacttcgaacacctacgtgtgcatacatacacaaataattgttaagaaatgatgtttgaaacataaaaggttgcattgcacgcgcccccggtgggaattgaacccacggcctttccataccgtatggtgaaaatcctctaaccgactgagctaggcgcggtaggggtcaacttgcttctggccaactgcgtctgagacaagtttaagaagccataacttttttcgttgttggccaaatcaaacaaacttggtttcattcgaaagctctatatgtttagaagatatttataagcattttctaagcgattaagctacgcataaacagttaaagcttgaaaattgcaaaaaactccgaatttttgtatatttttattttaaactgttttagttctttacgaatcattacgaatttttgttagctgatagagcttattaagagcttccgaatgataccaatatttttgatttggtcaacatagaaaaaagttatggcttttagtctcatgctggtatgcacaatgctaactatctgcagataaatcgttatccgcagataaatccgtatgcacaatgctaaggattaaaatccgcatgcacaatgagagtttcttttacaaataatccttagcgtcagctgcagctaggctacatatgcacaatgctaaagatagggtagcagctacctatctgcagattaaaatcactatcctcatcgagatgaggataatttcgatagaaatgtcgattaaaatcccaaaaataagtttaaaaatgggaaaaattgtactaaatgacttttaatacctctaaaattttttgatttacatttcatgatgattgaacaaaacccgaaaattcgacctttcgagttcgggttaggaattggttgaaataaatgtcagattcatgatcagcgacctagaaaagccccaggaataagtttttacgcctttttatgcaataaaattttgctaaccaaatttgagttagaaaatttctcttgagggatagaaaagataaaaagatgtgtgacgagagagttgctgcggatgggtatctgcagataaaaaaatcttcagctgcagatagttagcgctagcattgtgcatagagattttatctgcagatttttttatctgcagctaccctatccacatatcgctagctacagataaatatccttagcattgtgcataccagcatgagagagagaaacagagagagagataaaggaagagcgggtcggtggcagttcgtacaatttcaaatgggaatggccataacttttttgttcatcagttaatttcttcaaaattggtatcatttgaaa

SEQ ID NO: 11264 - DNA, 1956 bp, Heterodera glycines
aatatttttctatgtagaaaagaaattatgagaaaatttctgctaagttaatttttgttgctgttcaaaaaagttttttggacgaacttttcgtaccattccttcatggtgatatgaaaacccgaaaatgccttaaaaaattttcgaaaaaattctagggggttgggaaatttttcaaagataatgagtgggcctatcagaaagaacgcaaaattctaataccgaatttccctttgaatgatgagtctatttttgcaaaagaattatttgtaagataagcaattttaggagaagctcactcatgctggtatgcacaatgctaactatctgcagataaatcgttatccgcagataaatccgtatgcacaatgctaaggattaaaatccgcatgcacaatgccagtttcttttacaaataatccttagcgttagctgcagctaggctacatatgcacaatgctaaagatagggtagcagctacatatctgcagattaaaatcactatcctcatcgagatgagaataatttcgatagaaatgtcgattaaaatcccaaaaataagtttaaaaattggaaaaattgtactaaatgacttttaatacctctaaaattttttgatttacatttcatgatgattgaacaaaactcgaaaattcgacctttcgagttcgggttaggaattggttgaaataaatgtcagattcatgatcagcgacctcaaaaacccccaggaataagtttttacggctttttatgcaaaaaaattttgctaaccaaatttgagttagaaaatttctcttgagggatagaaaagatacaaagatgtgtgacgagagagttgctgcggatggggtatctgcagataaaaaaatcttcagctgcagatagttagcgttagcattgtgcatagggattttatctgcagatttttttatctgcagctacccctatccacatatcgctagctacagataaatatccttagcattgtgcataccagcatcagacgcagttggcccgttccggctaggggcgctcccttttgaggtgttctcctcctatgtcatttataccgactttcttctacacttcgaagttcgaacacctacaccaccagcaggggtgtgacttgtctcagaaaagacgagagcgagggttcggcgagaggcgagggtttttcaattttttttgtggccctattttttacttcaaaaagttcattcataaataaaatcgtttaatgtttcgttggggtttttagcggaaaaatggttttgtagtaaaatttttgcaaaaaacgatcccggtttcctttttgaaataattccattttttcgacatggtcacaccttcgaattattacaacgtgcaaaaacagagttcccaattttttttttcaaattcaggacaaaaaacattaacattcagattagaacaaaattcagattttttgcaaattaaatagtggcgctattaaaaacatgtaaaaattatcttgaaacgattttttattagcgtaaaacacagggcttcccaactgaaaattttcaaatttaggattttctcggcgcgctttttccaaaaaacgttgagaaacagggggtcccgcggtgccgataggcaccgccttgaaaaattttcaaaatttaaatgtaattttgttacaacatgccgccctttttatacttttaacggaggcctcaaaattcaggacaatctgaaaattcaggacatttttgatttgtcagataggtactgaaaaatcaggacacttgggaactctgtgtaaaagcaataattattattgaccatttatcctaaaataattgtgctatgattttaaaacatagaggaagcagagaacgagaattattatggtgttttttttgcgtaaatttgaatatttttctgactgctcaaaagttcaatctttacgggtgtattttcacctctcgc

SEQ ID NO: 11265 - DNA, 2617 bp, Heterodera glycines
gcatatatttaaacatttatcttgattttctaacccaatttcagcccaattgaatctgaacgaaacaaaaatgggcaccactgacaacgaagagaagaaaactgagccgatgaagaagttctgcaaaatgttttcatgggttcagcaaatgttttcatgggttcaggtatgtgttctctaaatacctaaaaacggatcacaaattttcatgatttccttattttgaaatccattaaatttagaaggaaaatgtcgaaacaaaaattgacgacgacgaaacattgttgaaacggttggacaatgtgttcatggtaaaacatccgccggaattgctcaatttttggcgacacgcggtcaaactgaaccccaaaaagccattgggtaaatatttttttacaaaaatttaaaaaatgtaaattttcaaccctttttgtagcgggggttgaaaaaaaaatttttttttttttttttttttgcgttttttgtttcatttctccattcttgggataccattgatctacacatatttccccctacacagatgccttttctgaattggactcgttggaattggtcggtccttttttgcttcttgccgccgcccacagcgaacggcacgccaaaaataccaaaaatggcgccacagcaacagcggacgaagacgcacagcagcagaatcaccttttgttgggctcacgttttgccaccgatttgcccgagctggaaactctgctggtgcaccggggcggccgcttttgctattggcgcgatgtgccggaggaaatgccgaacattttggtgcatgtcgagggacatgacctccagcagcagcactttccgacgactgccatttgcggagagcacgacctttttgcggcactccaatttatgctaaacaaattggtggacacgggtacaacgacgacggcaaaggcgaagagacaacagtccaacaacaccggcaccaccaccaccagcaacagtgggtaatgcaatgaagcaactaattgcccaattagaaagggtccgaaattcaatgaaaatttcaagtaaagatttttagtgattttttcaaagaatatttactggtatctctcaaaagaaaaattttccaattttgtttggataaaaattttgtgtactttcactaatgacagttttatttacttattttttcatccctttccctttcaatgcgcagcgtaaaacctgatcaaaaattggcacatttgttccccgacaatttcggcatgtccaacaatgggccggactatttgaaaatgctgaaaaagcggcgtgacagagaatctctcgaaatgctattccatggcattgtcaacaaattcccactggacgacaaaggcattggctaccaacagctgctgttggacgacgccaaggaaaatggtaatacatttttgttttttcttggtacacccattttcgtaaatttacgggtttttttttaattatctcagttttttaaccaaaatttcagcccaactaaagcggaacatcaaaacaatgggcaccacggacaacgaagagaagaaagctgagccgagtaaaaagttcttccaaatgtctccatgggttcaggtatgtgccctctaaattattcatcattttagctgttgttgttttttttgctcactcaaattaaacaacttttacttgtacgcaacggcattttaagcaaaaagaaacgatttttgtgtcattttacaaataaaaacaaagacactttcaattagcctttcacaaatgattggccggacatattattattccattatcatttccgtaactaaaaggaggtaaattcttttttttaagctgtccttttgcttggttttcttgctcctttcatttttggtgttgtgctgctgtgcctccaaccaaactcaaaccagcacaacaacagacactgttcgtttggttttttggggcggtttttttgggtttatttatttttcaacagatttcttccaacaattcttttgctgtcactaagccacccttttggctgcccactgatcccttttggcgtcccgtattcgatgcaatgatttatgcagccattgctataagtgccatcaccgtcatttttggagttccgtttatgattttcattgcttgtattgcttctagtgcggctagagactcggaaagatgggctgaaatgatcgagcgaagggagcagcagagacgcgaggcggaaagaagagatgaactgctgttttaagagattatatgaaatacgagcatattcacaaaaatattaaaatgaaatacatcaggaggcaaaaaaaaaagttccgaaaattttactttttaccaaagagttcggaatgccgacccatttcgactacggacggtggccagtaggtggggcaagacacgggctacagaaaaagtccgcgccatggacggtaaaaaacgaaaaaaattgccaaaaaataattggcgtaaaacaaaacgccaacacactcaaattgaaaaacaaattatattttcatctgatcaaatgttttaaaatcatataattcataaactaacagatagaatcaaaaaggaacagatgaatcgatgcagaatttttttctctatcgctatg

SEQ ID NO: 11266 - DNA, 1206 bp, Heterodera glycines
cattggctaccaacagctgcttttggacgacgccaaggaaaatggtaatacatttttgttttttcttggtacacccatttttaaccgcgtaaatttacgggtttttttttaattatctcagttttttaaccaaaatttcagcccaactaaagcggaacatcaaaacaatgggcaccacggacagcgaagagaagaaagctgagccgagtaagaagttctgcaaaatgttttcattgcctcaggtctgtcgttaatgttttaaaaaaaaatttttttttgtttcaaaataccaaaatactacagagaataagaatgacaagaacgcatactgctccgactcgtactgttttttgtatgatcaaaggaggccggccaaaaaaaatttagttggacggcaaaaaaaaatttttcgaaaaacaatatagatttaggctttgaactttttcccgcaaacaattacctttttaaaaaatcaaatgatcatttaaattttctttcagctttcattttgcttcgttttcctgctcctttcattcttcgtgatatggtacacatccgatcaaactcaaataaacacggtccgtttgcttggcaatcctggagaatgggtgtgcccaatttaacttttttttaattttgtgctcataatcagtttttgagcccaaattaaaataatatattaaaaattagggacacccattcgcgtgtcccggcatttgcggtccgacatttgcgcctttgtccaaaatcgagttagtttaagctatcagggattgaaaaaaaaaaaaatcaactttgagtccgattttggacataggcgcaaatgtcggggctcccccattctccagcaggattgccgtttgctttttttgtttttcgttttatatttatttattttccagaaaatgccgttgaatgattccacgtccgtcacacctaataagcctccgttttggccgtacactgatcccttttggcgctctgttgctcatggagtgttctacgcttgccttgccatttctgctttttctctcatttttggctttgcgtcattcattttcatttttgttctgctttcgcgcactttgacaaacatggagcatattaccatgacctgttatgaaatcgacgagatatttgcgtggatgcgtttgaaaagtgaggtatacagaagcgcgatggacaagctggaggaaaaaggaaaga

SEQ ID NO: 11267 - DNA, 4806 bp, Heterodera glycines
  unsure (1)..(4806): unsure at all n locations
tttttttttttttttttttttttttttttttttttgggaggagaagaaaaaaaaagaaaaatattattttttttttttttttttttttttaataaaaaaaaaaaaaacccccccgcccgaaaaaaaaaaaaaaaaaaaaaaattatttttttttttttttttttttttttttttttttttctttttttttttttaaaaaaaaaaaaaatttttttttttttttatttcccccccaaaattttttttttttttttcccccggggggggcccaaatttaaaaaaaaaaaatttttttttttttcccccccaaaatttttttggggggggggggccttttttccccccgagggggcaaaacccccccttttttgtgggtggcccgcgggcccctcttagagaacaagggggggaaaaaagtttggggggcccaaattttttctcaaaagggggaaaattttttttcaggggggttttaaaaaggggcccaaactcccccctttcggttttttgggataaaaccacccccccaaaagggccagaaaaggggccgttttgtctcccaaaatttttcccgagaagcaaacccaaattttcccttcccaataataaattttcaagagtaggggtttttaaaaaaaggggtaatttgcccaaaatttggcaaaaggggtaccaattcaccccatccataagtgaaaattccgagttttttaaacgttggncctccacaaagtcagatcagcgtaagaccaagctgctcagagaggcgagtgcagacnagatactcggattagtagaaatttgcgcgaacatttttaaatttaattttcgccttaatacgcgtcaacggccacgctaattcaatacgcggactactacagggcaattgctcgttcacgaagtgagagcacggcaaaaaagagacttcaagagggaaccggtgttgctcttggcgcaattattgcaccaataatcagtgtgcttgctcaacatttgctggagaaggcagcaacaacaacaactgctgtagcgtcatgaagtacacaaaaaagatgataatggttcccgagagtgaatatctcactttgataaatctgctgaagaggggaacaacaacttctggcccctatgaaagtgagagagctgaactggacacagacatccaaaaaaatttggctgatcataaacgcggagcagatgtgcaaatgaagcgccattcctggctgtataagcaaagacggcagctaaaagatttagcagtaaatagaccccaaaaggtggtcattgaaaacctggcagccataccgcccaatattgctccttatatggcaattcagtctccttccactaaagctaagttagagacaaaagttaaaaacacatcggatggtgagcagaaaacgaattctttttataataggcttactgcagcaggtgatgaacgaaaaagaaggagtcgtaaaaggaagttaggcaaaaaaatggtaatgaacactggcgatgagtctgatgccgacaacaatagtggagataatgccgatggctccttttattcttcagcgaaggatgatgagctcgagcagacatcttatcataaaagaaaacgagcaccttctttgttgacacaaatagaccaaacagaccctgaacactatgaagaattgaagaagattgtggaagcaaggctcataaaatatggaattgatgccaaaacgggcgcaattttgaccaatttcaataaaccggtcgccggatcacattacctgaacgcaattaagtacatgacaggccagctgaacaacaagccgaaaggacatagatttttaatccaacgcttgaacagggaaaaagaaattttaaaattcttcccacatctaaaccaatcgctgcagtccggagagggaatcaagagatttagagccaagaagaaaaaattcttagcccttgttcgcatgcaaccccctataaaaacaccgggactacaccgaactgcctatgccgaaaaactacatgcaaaatttcctccaaaacatcaacaacaaaaatttacgtttaagccagcaatatgggcaaaactgtagagaagctactagagcaaatctattatgaccttcgctcgccggcaagctacgcaggggttcttaaggtctggcaagaagcaaaaaaacataacaaatcaattggtattagcgatgttcaaaaatttttgcatgatcagcgaacctacactctgtttaaaccgcgtcggaataaatttccgcgcctaaagactattccaagcggtcttcacactgactggcaatgcgatttgtgcataatggatacactgaaagatgaaaacgatggataccgttacttattggtttgtattgatgtgcttagtcgacgcatttttaccgccgaatctgagtctaaaaagagtgaaaatatgatagaagcgtttgaaaaggtgtttaaaaaggcaaatgttctgcccaataaactgtatagtgatgctgggctagaatttcaagcaaagcgtatgttagactattggaaaaagaaggacattataaagcatgtgatgtattccccacatctgcatgccggtgtggttgaaagggctaaccgtacaatcaaggagcgtctttatcgctactttagtgaaaataatacaactaggtgggtggatatgattgataaaattgtggaaaatttgaataattctgtaaatcggaccacgggggtgaaaccaagtgcagtgacattcaaaaatgcacctccactatggcacaggttatataaggaagcggatatgcccaattcatcaactacctcttcaattaaacgagcaaaaaataataacaacaacaaatataaactgggcgacactgtgcgcataagcaaggagaaaggagagtttacaaaaggctattatcccaactttactgacgagctattcaaaatagcacaggttaaaccaaccaatcctccctcatatagaattcgcgatttacaaggtgaagagattaagggtgtcttttacgagcaggagttggtgaaaaccagtgagaaggacacaacccacagggttgaagtgttaaaatctcggacccgaaaaggagtcaaagaacaccttgtccgttggattgggcattccgatcagtataacaagtggattcgggacgctgatcttgtaaaagagcgcgaagctaaataaaaaaaaaatggacgaattttatgtggtactaccatccaattcacctggaccagggaacacgacctcaaaattcactgtcaggcttccacatacgcttgagctggacgcaaactggatggttgcactttcatcaattatctacccctattcattcccatctgtcggaattgatgatgacgacttcatcagcattaaacttgtaaatccaaattttaaatttgcggatgacaaacgttttgtggatattgagctaaaaataccgagtatgcaattctctagtgttgggcatttaaggcaaacattaaatgacataattaatgatgcgtataaacagcggtttgggctctcatcacagaaagccgccaaagttaaacgccaaattgacgttacggagcttttttttcacgatcaccctgtcgattattgggaaaaaattgaagagttggaaaaaaggttggttgaattgagagaggagattgatacgaaggagagggagcatggtgccgaaggtacagagcagaaaagaaaaaatgaacttgaaggtgaattgaaaattttaaggcttcgcctcaagagaaaagatgatgagctggaggagcttaagcgggcagcgaagcgtcgcgatgacgacacccctgagaatcagcagaaaaaaatacgggaattcttccatcaccatccggatgatcatgaaaaaaagctgaacgagtctcgactgatcttcacaaaatatttgtccggtttgcaagaaaaaatgagtgaatatatcggtgaaagagatggagcaaaaattgtgcaacttaatgaacagacagggaagctgagagaaaaaatcaaatacttgctgcgcaatcttaatttgtttgagagcgctgtgctacagcgcgccaacagtgatgacccctcgcgaaaaacgagagaggaatatgaaaagagcagccatgaacagaatagcgtatatgttcaggaattttttcaaagacacccgaccaattattggcaaataattcataacaactacgacggtctccgggaacagttcgacaagatagaagaactccaacaaaaaacggcacagaagcagctaaaggacgacgagcactcatcgttccagcagcaaattgaccgagcaaaacaactgctggaatacagacgcaagagatttgccgcattggaatttgaggcaaagaaacgtgacggacaacagcaacaatcctctccattctcttcaccaatttcatctgcattgaccgccggagaggcgttaaaggagcgattaggtgccgttcaagtgaagcagacagaaaagtcggatcaggataataataattcgatggaaaaaccaaaaacccacgctgaggttctcaaagagaaaatacaacaacaacaacaacaacaagatatagccacgtcgacaccaaatgagttgcaaaatgacggcaaagcagtagcagagccaaaaacccatgccgaggttctaaaagagaagctagaacaaaagaaaggcaccagcgcatcagctgagagggatggtgatcatgacagcgatgccgtcgatttactatcgcgaggtcataaattggtgagcatgcttccaaaaaaaggga

SEQ ID NO: 11268 - DNA, 3941 bp, Heterodera glycines
tactcaatagcagtttcatattattctatacgggcccaccctgatagtatatcccaaaagtttctaaatatcgaagcacgggtttgaaaaatacattttttggtctaatttttaaggacaaaaaacacaaaaatatttctatatttattttatccttatactcatattttagtattgaaatataaaaatttaatataactacgaatatataacagaaaatgtaaatttgttgtgacatttcatcacattttccccgtttgttccgtttttgcaatctgtccacaacaatatactagacatttcctattccatcggttcctcatcagcatcaatggcatcaacttcaccatcaccattggcatcatcttcaagcagttcgccctctgccaaatcgtaagattcggcactattcgcctctcctaattcttcatcagcctccatgacgtcctgttcttcctgttcaacttcagttgctggtgcgctggatggttcgttgttcagtgccggctcagcctttggtgaagcggccttcacagctttgctaggcttggcttaatttattctttattttaatgatttttctatcaaaaatatccattttaagttttgtaaaaactatttaaatagctgtgccaattcgtactgtcagaaaaattcttaaaattacgaaaaatctcattagaaaagttgaaacaatcgtggtcaatacatggtcaggatttacttggtgtctttttgtccttggatttcgatgatttggcggtttttgattttttgtctaaaataattaatttatgtttggaatttgcttcaataatttacaccttttgatttgcctttctttgctggcttatcttttttgtctaaaatttgaagaacattttgcagaaaaatttccaatacttaaaaacctttttttcctttggcatcctttttacccggcgattttgctgcttttttattacctaaaatatggagagttaaaaataaaatgtaaattataataattaacgaattattcttatttattcctatttccttcgattttaatttaaaataacataaatattaagtgttgtcttaagtccaatacttaattttactatagcaatactgtttctgtatactgtaattcagtagtttaccttttgctggacttgctcctcccttatgggcatctttgccttttccgtgcgctgccactgctccttataaattaaaaacgtttaaataaaataataagtaattaaattatttgctttttaccccttttattatcctttttcacagcctttgaatttgctaaattaaaaaaataaataatatttaaatatataatgattttatttttaatgggagagctacattttgaaaaaaaaaaatcttaattgtgattttattttatatttgatatagaagaaagccctttttcacagcttttgaattgctaaattaaaataaataatatttaaatatatatatataattttcatgggagagctatattgtgaaagaaatcttaatcttaattttggttatgttttatatttgctatggatttataatttgggacaaaatttaaggaaaatccgccctcgtaaactataatggcaaaaaatgccttatggggcccactttgtaaataattttcttatttttttgaccaacctgtttctagaagaacagccaacacaaggctaaccatggtcaagaagagaagggcacgcatttttattggataaataatttaaattagataaaaatatattttaaattattttacttttattattaattgtttgctgcttaaatatgccataaatcggtagcggaaatggtgccaaccaaatttcgttgcaatgtcattgcaaatttataatatttcgtctatcgatgttaatgaatttcatcatctttatgtttgccaacataattgttttgaatgatatccgacaaaaaagagaatggcacctagtaatttaatgttatttattttttaattatatttttttaataaaaaatttaacattatagaggcataataaaataaataattggcaaaaaatgatgatgatgtaattaaaggaagtcgaaatgaagcaaataaattatgttggcatcttttcaggccatcaaattaaaggtgtataaaaggaattaaataaacacatacaaacatagattcggattttacaataatattaattcttaataattaattaaaaatctaaaaaaatgcgtgccgttctcttcctggctatggtttgtctggtgatggctgttattttggagactggtaataaacattatttaaaaataaacaataataaaatatatctattttagcgaactcaaaagcagtgaaaaacgacggtaaaaaaggtgaatataattgttgaaaataacaatatattaaaatttaaggagctgttgcatcgcctgccaaaggaaaagcttcgccaaaaggtgccagcccagcaaaaggaaaaactgcaaagggtaacgaatttaatatgtttttaattatattaaataataatttaaattaataaggtggcaaaaaagatgcaaaaaaagcgggcaaaaaggacggaaaagtgaaaaagggttagttggtatttgaaaaagattttttgaaaatgtttttgaaatttagaaaagaaagaaaagccggcaaagaaggcaggcaaagggaaagatgcagctaagaaaggtaatattttaagaataatttaatttaaaaaatgaaatttagacaaaacaaaggacaaaaaggcaccagcagcaggtaaactcattaaattctaacttaatgaatggcattgtgccaatttggcgatttaagccaagccaaaggctgagcctgtcgagactgaagagccgtccagtgcacaagttgtagctgaacaggacggaggcgaagagtcggccaacaaccaagaaatggatgccggtgaagagatgacggaggaggaacagacggatttggcacaggatgaacagcttgaagatgatgccatcgacggtgaagaaggcgatggaatggcggaggaagaacaaccggagatgaactaataaacttattttttgaaaatatataggaaaatatttacacgggtcaaacggggccaaacctattgtaaacattattttgtataatatttaatttatcaataagaatcagaagataaatttgtaaacctatttatttgagattttgatttactaaaaaaaaaaaataaattactgtatttattattataaaatagaaattttattaaatttataatttacaatataatatttttaaatattaaaaagttcaaatgtgaaaaatactgatttttgtattccaaagtattatgccgacaaaagaagaaaaagtgcgaaataataaaaacaaaaaaataattttattaaataatttttctaatttatatgttcattgacataattcaatgaaaaaatagtttttattaattatatttatagcgccttttgtaaaagtaaacacaattgcttggtaaaatttttcattacttagtggcatattttctgaaattttctcaattgttaggagtatattttctcagaaatttttgggaccgattcttaggagagtattttcgtttttattgcatttttggtatgaaatttttggaaatgccaaaaataggtgctaaaattcgaaaatgccaaaataggtgctaaccctaccgttttaggttttttaggtaagtcgctctaaataaaaaaatgttcggagaaaatgtgtttttcgtgcttctctcatcaagtatttccgcaaaaaatatgttaaaacataaaaatccggtctctacttatcaacaaaaggatttgatagaagaattattaataacataatttaaataaaatgtgaaagattaaacccgttttctattgatgatacatggtataca

SEQ ID NO: 11269 - DNA, 979 bp, Heterodera glycines
tctaaaaagttccatttgccctggaaaggtgttttccgtgttctggaaattgatggagtccgggtaaccatcacgagctgtaattcgcctcaatccaataccagagtcgttcacataaatcagcttaaaaaatgcattgagaccttaggctccgctgtaacagttccaaatttggaaaaggaagaagaagaagcattggcgaaatccaaagcggaagagttagttgatgaacctgggttttcacataatttgagtcaaaacgttgaccatgaagtcgaaaaacaaggggaagaaattaatgaaaacgaagagcagaataaaacaaaacctaggtataatttgagaaaaaatcctaaggcaaggagactaagtttaaatgaataattgtctgcttcggcgagtataaatggaaaaaaaaaaaaatttttaacaacaaaatggaaaagacattttttttttactaaaaaagaaattttagccaagcatgtcaatccaaatcgtcacgactattgatagctccatgcggctggctcccttcttcacgaaggccttttgcttctccaatcattttggctgccaatttgttgttgagggcatctccttttgttgtagcgagcaatgctacatgtatcttaaatgtttggcatttggcgacaacagcagcgcttcggcgatccttcagtcaagcaatccggcagagatcaaacgacttggttcgggatcgcggattcggggtttcgacacccaaaaatggagacaactctccattttcgcgatggtggtggcgaattggaataagtatcgtcagaacgactatttgatgcagcgtcttttgagtatcgacacagacgtgcttctcgtagaatgttcgccgacagactgttattggggcataggtctacaattacgtgatccggatatccgcaacatggcaaaatggagaggaaaaacatcctcgggagagtattgacaggactca

SEQ ID NO: 11270 - DNA, 1780 bp, Heterodera glycines
atgtggtttgttcagaaaattaattggcaggcttcggtcgttgaaataagttatattaattacgcggtatggagagagaatttgggtattgttctgagagttaaagaaagtgtttcgagtgtatcaagtcggaaattgtatgcattagttatttctgcagaactgcaggtgtcttcgcgttgttaccgtcgacagttagttgacttggacttggacactttagttgagggtcaattagttaaagtttggtccgctgtgttgcctgagcagtacttaattgagagttcatacatccttcctccgcagagtgaatttaaagctggtactgagaaaatggttgaggatggaaagggagttcttgcctgcgttggtccacacgagccttggccgtatcagcacttctatcctttggctaaagaaatgagtatgagtgaaattgagttggctgagaaaatttttagtgcggttattgcttatagttatgaggatgaggagaggaaaattgtcgatggcagatttgagggctcagcgacataccatgagggcttattttggttgaagttttctgagatcgataatgtgaaaatgaagcgacttaatttgggaaattgatgcgcaggtaatgcttaagccttcaatggatcagaaacattttgcttcgggggttgtcaaagaaacgaatgtagagtcaatgagatccttagggagaccaaaatttattttgtggattgcggtgaaagtgacacaagtgcaagaaagaaaaaatagggatgttcatgaagagttggagagagctgaggaaggaggtagctttgtagcacatccgatgattccgcagggtttggagttgagaagggcatgttttgcgtcaaatcttccatctcgagttgccaagctggacacaaatcaaggaaagctgatgagggcagtaatgggtcgtccacgagaacagctggttggtgaacagggagagattttgggtcatgcgtcggcagttcaagagtttcacccgttgatgagaaagttaaatgagaggcaaaaagtgtcggccaaactgttgttagggaatgagtgttgtttgatctatcaaaatgcgccaccaggagttggtaagacttatgttgcatcaattgtggcggcgattctcttgtcgataaatgaaaatgtcaaaattgccattgtcacatcagcgaatcttcctcttgcaaaattagcccaagaattagacgaagtgttaggtagtgacgaaatggaagagtcgggatcgattgcgttcttctcgggttacgcgaaagaaaaatatagagagatggttgagaagttgaagcgtcacattttggtgtcaaagctaaaaagtgaggaaattcagagcaagtttgaagagagaagtgaagagaatcaagataagagagatgtgagagagtattgccaaaattatgagttcaggcctaggctgacaaaagagagaaaaatggcatcgttgtatgcggaagtggcgaacttgagaattgttttcgcaacggcaacgatggcagagaatgtattgtggacggcgttgactggcacttcggtgcttatatttgatgaagcaacacagggttcctgggtcattctggcacatctggttgctcggttgccgaaattggagaaggtatttgtgaccggcgatcgttaccaacttggtgtccatctgcaggaattgccaaaaattttgagaaagggatttggcttagattcgatggtcgatcagctggttgattctccgaatgttgtgcaataa

SEQ ID NO: 11271 - DNA, 991 bp, Heterodera glycines
  unsure (1)..(991): unsure at all n locations
accagcgagaggtgggaaggcaaccccggggcttgatcaccccgtggacccatccttcgggaatatgtggcacctttccctttccctccccattccgaattccaattcccaacgccagcacgtccaccgcgctcggccgcgctactttacgctcaaaaagcttctcaaacaattttagcgcttccaattccttctacaatcgcctttatacatcccattatgagcgctaaaattatcagagtgccgaaaatcgcatgtgatctaagcctagaaaaaatggtctaagtaaaaatcgtaattacgctcaaaaagcttctcaaacaattttagcgcttccaattccttctataatcgcctttatacatcccattatgagcgctaaaattatcagagtgccgaaaatcgcatgtgatctaagcctagaaaaaaatggtctaagtaaaaatcgtaattacgctcaaaaagcttctcaaacaattttagcgcttccaattccttctacaatcgcctttatacatcccattatgagcgctaaaattatcagagtgccgaaaatcgcatgtgatctaagcctagaaaaaatggtctaagtaaaaatcttaattacgctcaaaaagcttctcaaacaattttagcgcttccaattccttctacaatcgcctttatacatcccattatgaggctaaaattatcagagtgccgaaaatcgcatgtgatctaagcctagaaaaaatggtctaagtaaaaatcgtaattacgctcaaaaagcttctcaaacaattttagcgcttccaattccttctacaatcgcctttatacatccattatgagcgctaaaattatcagagtgccgaaaatcgcatgtgatctaagcctagaaaaaatggtctaagtaaaaatcgtaattacgctcaaaaaagcttttcaacaattttagcgcttccaatccnttctacatcgcccttatacatcccattatgagcgctaaaat

SEQ ID NO: 11272 - DNA, 3507 bp, Heterodera glycines
tgcatttttgaattttttgtgtttttcttagatatttttttcaaaaatgcctaaatatgtgcaaaatgtgtgccaaaccccgaaatatgtgcgatatgtttttatgtgcgaaaacgccaaaatatgtgtttttatgtttttataagtcgctctaaatcaaaaattgttcggagaaaatgctagttttgggcttctctcgccataactaagccgcaaaaaaaatatgttaaaacataaaaatcccagccctagtgatgagctgtgtctaaaaatcagagaaagaaatcgaaccgaggcaatctgagtgtgagacaactgagtcccagtaaaaagggacacttcagtaccaaaaataatggatgaagaaagataatttaacaagcaaactttgattttagacttacgtttctcgttcaagagctttatgggttttgggctaatttttgagatttttccatataattttttaaaattttattcttgtatttaaaaacccctacctaaaactttatacctttgtttgttaccaagaatcttggcattgaccgagaaataaaaagctgtggcttaataaactgaggatttattcaactagcaatacgccatttggcagaaatataatacagtatacatggaaatggtgccatttcacactttggcttaatcaaggcgacttatcaaatcggtggtccatgcccagctggtcgtgtaatcgtccttctcttcaccgctcatctctttgaattcgcgctccaccgcctcaatggtggtcgttggcctcggcttctgctccaccgttcttgtgacattttccgccgtgtaccgtccccatggactgtacgttttgttgcgacagtaacgataccaacggtggcgccttctgttgtccacgtagttcacatagacaaagtaaacttaaagtgtaggtgataaagcagaaaattggagtaacaaaattcagtgccgtactgaagcattcgtaagttctgtgcacttcgtggccacatgaatcacagttgaacaacacttcaagtgcggtgtgtttgcattctgtaaataaaatgcgatgggaaatggatttgctaaatgccaaaatttgtaaattttattaccaaaatacgttttgttgcagcaaaggaatactaatgctatatttatagcggtgaataaaaccatcgcaagagtcactaaaggggaaggcagagtttcatttgtctcaatgaagtaatgtataatcatccacacagacaacgcaacgaacgcctggggggagacggagaattttaattttttgaaattgaaaacggaagcttacaacgatggaaatggctaacacaaaccagcaacacactcctctgcatttgtctgtgtatgtggttttcacctgaaacaatggggaatgacaattttgaaaaaagaaagtttttttttaaatgttttaccttggtaaaattggtggccatgagttttttggcggggcattgacatcgcatctcccgcataaatatgccgtgttttcgcgcatttttcaaatttgcttcgaccattttattagaagggattcggaatcgatgaaccttacgaatagggttgggatttataagtttttgcttattttttctgcgcctttaactcgacgagaaatgcacgaaaaacacatttttttgttcgaaaattttgcgttttaacgcacttattcgagcttagaaatgcttattttggcgtttcgtgcttaaaaatgcatattttagaggttcgcccttaaaataagtttttgtacttattttagcgttttatgcttgttttcgttcttatttcgcgatttttggaaaatttattaacaaaaatgcaataaaaacgaaaaatacacccctaagaattgacctaaaaattttcaaaaaatacactcctgagaatcgacccaaaaaatttcggaaaaatacgcccctgagaatcgacccttaaatcctgaaaatttctaaatgtacttcatttctaactgcaatcagaaaataaaattgtttgacttaattttaactaatttacatagagaaaacagcaattttaacaaatttcacctctacatttggaattttgtcatgcttattttcgcacttatttcgcgctttttcgcccttatttaagcacttattttggactttttcgcgcttaaaaatccgagccctacttatgaaagctaaaaaatgcgtgcgcttcaaatgtcgaatattttgaaagtaagaaaaagggtcggttttttggtgaaatttatgctttccttgaaacagagtccaaaaatgtgaaacaaacaaataatcccgcagcgggattcgcaaattttgtttttgtatgggatcccgcggtccgtaattcattttcttgggaataattacaaaggacatataatgccaaatcttaaaggtcatacgagctaattggaacagatcttggttgatttttatcggaccaacattaattatgctttgttaaaggaaaaaatgtggtcaactaaccgtaaaagaaataaaaattcgggtggtggccggacaacatttacgtaagctgataaaaaagggttaactccttaatctcaaaatatatccctcccatatccttaatccttttacttataagttataacaaagtgccaattcattttccactgtttgtcacgaaagagcctttatcgtttattatggtagagcaaacataattgagagacaacacatagcgattaaatcgacaatacaacatcagaatgactgacattagggggaattcatacaacggaggtgtggcaagcatctcacgggcttataggaaatgaatattgtacaacacttggagaaagagggccactctcaacatataattatgatggagacaaaaaatagttaatttctgctggaaaatcgcttctcatccgattcgtcatcacccatttatccattgttggtgttcttccattgcttctactccgtggcacgacctccatccgccgctgtcccaccggtgttggtcgcctccgcctcagaaccacgcgatgacccatccgttgcactcccttcagaacctaagaattttgaaagtgtcagattcgaaatcagcacccgtactcctcccaattcttgaatttcgccagaaacgaacgttcactttgctgggaagcgttggtgttgtccgtcgccgtcgtcgaagtcgtcccggcatcagcaccagtggcggtggtagtggctccatccttcttcgacgatttcgccgtcttcttcttgctggcactgcgtcgacgcttgctggtggcacggcgccgcgacacggtccgcggacgacgacgagacggcttccgcgcggatgagccaggcgcagccttcttcttcctcggcgacttgctcacagaacgcggctttcttgaacgactgcgacgctgcgatgaccctgctccacaagtcctccggtgagttcgctgaacgatgtgggagagggggtggtaagtcgattacgaaaatg

SEQ ID NO: 11273 - DNA, 1471 bp, Heterodera glycines
  unsure (1)..(1471): unsure at all n locations
attcggacgtttcgccaactacccataaatcggacattttgccaaatgacatttcgccaactagacataaaatgtttaaaatcatttttcattggcctcagtttcttcgccactttcttcgtttccatgaacatcattaagcccctacaaagccttgtatgtatcacaagtccgaacaactgcaaagaatttgtcaatccttcttccgatccaaatttgacctcgtcaaagatcgcaccaattttttacttgatgatataccgttggggacttaatgctttactggaggtgttctgctcgtccgatttccagcttgcggtgccttttggcttttgtatttcgcgaacagttggcaattcttattataattttatgtttacaggacattttgaaaaatttatgttatcattttcgggtttttaatgaaaatttctgatccaacaactgtctggggtaatccgttgacaaataaaacccaaggtattataaaaggcttgttttctacaagtcacaaaaattatggattccataaaataaaaagttttggccaaattcttgaagccagaaccgagtttggcatttttggcacctgaaattcggattttggtaccaaaaaactgacccggcaattcaacgctggcaatttctgccagcattttccaaccataatctcagctcacagaggacaacactttggttaattccggcaaaaacagaaaatggcaaaatatgactgaaaaatgccaacatgaatttaaacttactcaattttcatttcatttccttacggaaatgaaatgaaattgataaaaaaattcacgtgaatttattttgtttttatgtttttcatattataataaagaacggaagttgaattagtctgatgtaatttcaacaaatttctgtatgaattttgcatataaatttggcaaattttctcaaataaattcattaaatattttaatttatatatttttttaatttttagtgtttgaaaaaaatgaatttttttctattcattactattatttttacattcgtaaaaagtgggtaaaatccattaaatatgcatttaaattaaataaataattattgatcacaattatttttattaaattattttatttttcatattttaatttgtaaatattaaaataataatatttaggcaacgcggtactaaattatgtggaagaagcatttagtagcagagacgaagttcaaaagttggccaattatgcaattgattgggcttttaacaacggaatgattcttcgttatgacatcagacagtanaataaataaataattataaaaattaaatggttatttttgccttatttagcaatttcatagcccaattctcanccgtttcgcttcttcccgtcccatttccgagagaagcatttgagaaaagcatcgctggtcaggaggttaaaataaacagacaaaacattcgttttataataaa

SEQ ID NO: 11274 - DNA, 3990 bp, Heterodera glycines
aacggtaacatgtagcacagttgtaacccttcctataggcgtcccggttcctgtgtcgtaaaaaaatcttaaatttctctcaatcatgcagaaacagaagagtggggtgcggtgataggtggcaatataatcagaatagcggctttcgtagtccctgtgtattataattttataatttgaagcctcaattaacaatgcctccacttctgctctgtttttctgccagaaaaaaatcttctttttcgagagcctcctcaaaatatttttgaaacgagtacattttaactaaaaattaataaagaaaaaaatcgaataaataataatggaatgaacaaaaaataatgaaatggaaaaatgaaaaaaattttatttaacagggaaagaataagtggcaataattattgaaattctctggtctaacaaattcacttccccaaatgattgctgcctgtgcatgaactcgttgaaaacaatgtctggattcgattgttggaaggggcgggcagggatgatcactgggtctgacagggcactgcaataaaggtccactgaaattttctcaattttccagcccggctcagcttctcggctcattgcatcccccattaattttttcaggatttttttaaacattttttcgggatcttcattttcggggcatttaaaatagaaagttgtcacgtgctcttttatcccaaattttttattttcctttatgtgactctccacttcttcgaaacatttttccaaattaggactgtttttgaaataattttttgtatttttcgagcggcggatttcttttgaagtttcttggaaatttttctttgacattctaaaaaatgaaacaaatttgattaatttaaaatattaaatgttataaacatgagacaaaattatcaaaacaaaaattattaataatatccaaagggcaaaacattaaagtgatcgtcaataattccttttttctgcaccggtgtatattctttttgtacgtcttttgagagaacccggaagtcgtttgtcggcccgatcttctccgggtagtgaaaaacttttttgacccctttcttgtaatccagcaccatctctttgaacaattcatatttaaattcgtttcgtctatccagtgtcatccctctgattttggttttgtgccaaatcacaccacccttcttccttctgagcttcaaggcgtactgcttcggacccgcggacacaaactccaaaatttcgctgtccgcatactctcgagtcatctcccttaaaaccacaatttaaatgcgtttcaaaatttatgttttaccccaaaaatttcccctccaccaacggacagcgccccttccgatgagcaaaagctagagaatctaaatttttgtgtttattttctttttattccttttcacctgtgtcacaatagagcagtttacacccctccttcttgtagacctgctccatgtactcgtacagctttagcctcgcagcactcgtggtccacaatgacaaaacaatattcgacactttatgctccctgatgaactcctcctttttccggtacacgactcttgatatctcttcgcttatttttactgggcgcccaaactcaattgtattgtctctccccaattccatccaacgttccatgctgcccacaatttccgtacttgaaagggtgttgcgcatcgaaaattttccccacaaactgtttaatcccttaaattcgaacattttttagagattttttataatttctcaccaattttgcaatcattcttagtccgggattaaacccaatcttatcataatccaaaccgatgtcatactttgccttgtacatttcgatgaatgctcttttttcatcttcacttttcacctccgccggccaccccgacgcttccacctttatcttcaaaaacatccgcacatatcctttgaacagttgactgtcaaactgttcaaaatgatacgctcgatagaatcccataattctatatcctagctctaaagccttccgcaactcaattgatgtgaatgtccccaaaaatgctctctgcgtgggacgatggttacattttttcacatcttttgtcatcacaaattcattcttggcccttctcgcacaagaccaacaattagggaagaggagcatttcatcgatgtgcacgtggaggagggggtacaaaagatttttcggtgggatcacttttactttcaaaagtccatcatagggtacgtcgtcgggtgctgtccaattcacattaaaattcctgctcactacaattttcgggactccaacggggtatggggtgtcttaagcgaaaggaaactaacaaaaattaagcagatttttaccataattaacaaacgggtacaaactaatgatgtcgaacattgatatctcaatttcttcggtagcctttgcgtacaaacaaaatggcatcgttcttcccccggcataagcatccctcggattgatcggtcccttgtccggcacactttcaaagaactttttcatctccttatttttcttcaattcctctctgacatcacactcctaaaactaacaattaataaatatttctaaatgttttattctacccaaacttctccgattgaaaaatttttgcacttttccctcaaaatttccatgcgaatttcggttctactttgattctcttccatagtccgtccgtttggcgctatagtacaaggtaaaaaacatctcggacacccgtgaaatgcacaccccttaagtattgtttaaaaagaaaatatttttccttttacctgaaactcaattatttttttctctgcccctatcacacagtccactttcagcccaccaaattccacttctcctccgttacacgcatgccgcacttttactccttttctttgggcaagccactcaaaatatttcaccgctattttactctgattttcagctctctcataccctccctcaggcatgatcggaatgtgcctctccttcaaaaattttgccctgaagatcttcatcacaactcctgcgattgtcacactgtctttcatcacatcaaaatcccctgttatttccaaaaacaattgtcgaaacttcaaaactgattgcaacagaatttccacgtcgttttcgcaatatatcttcagctgttcccctaaatccaatataatttaaaaacccatatttttctgtctacctagttcaaattccgtttgataattctcgttataccatttttccaattttacggcttcttcctctttcatattgtccgggcaatagtcttccaaaggtggcaggttgggcaatctcctcccaaagttctcattcttattgtatttgtggggaaaatacaatttttccgtaatgtttaatcccaacgtttttggaaggtccgccaatttattctgactgagcatccaaaagtcacgaaaaatcactcgtcccgcctttatctgataaattttcaaatctgccatcatcagttccgtcgcgatttccttcttcgttagttcagacaagacaaagtgggaatcgaatctcccagcataatgcgcgaaagcaatcgtttcaaatcgttgaaaactcattatccaaacgacaaactcgctcattgggtcaaaaccatccgctacagaccatgtgattttactggggccttcacaaatctcacattcccgctcttctcccgcacaaatgttacaagtacgtgcagcacaaacaagattaggccggtgttctcccccatctactgtcgtctccagatcgtaggccagaattctgtaggctttctgcggtcgcacttgaatttttttgatgaaacattgcctccctgggtggcaaactttgcaaagtttgcaaaacttttccccgcaaacgtgtttcgaacgtgtttggtagacttctgcgcatttttcacatttcttgtactcattacaagccaccttcatgggcgcttcaaaacattcgttgttatagaagttgcggtt

SEQ ID NO: 11275 - DNA, 3838 bp, Heterodera glycines
tacaattgtccatgagcaaacggctcttctgtaaaatcaattcccaatcgaactgccgtttggccttgagctttcacaaccgtcatagcgaaagcaagtcgaatagggaattgaaatctttcaaaacttacaccgtcaggacgcttgtctttatatgtatgtcggtttcgaggaatcccaataattatgccatttccagaggatccgctaccaatggtttcacattcaattaaattgtcagttagttttttaataagaagtctggtgccattacaaagcccttttgaagtgtttaaatttacaagtaagacgacaattgatccaattttaaggcgtaacaaatgggtaggcattcccattggattcagctggtttagctgggctacatcaaagtcagctgcatttaccgaaaacgggttttcatctgttgccttgtcgaccgagaaatattcaataaaatttccaagcatggaatgagaaatttgggaattatttatgtcaacaattctatttgtagtagacaaaagaagtcgtttcagcatttcgctacttggcatattaagcccttgatcaaatacccatgcaatcagatcttcacgtgaatcgacgagcatgtcttttgggattgcgaccgtgtctccatttactcctcttccaatatcatcaaaccatttaagaaactctatttcgtttggattaactcgcatgctttgggtcaatttgtattttgaaaatatagggtaaagcggggaggactggatgcatgccgcaacttgtgctgcacttccataagaattgatcacaactggaagtgactgtttccagtcaccggaaattataacacattttccaccaaaaggtaagtgagctttttgtgagcacaattgacgacagagtaaatcaatattttcaaaaactgtcctctccaacattgtcatttcatcaattattataatgtcactttctattattcgcctaccaaagaaactatcaaagggaatcgcaggtaatttcccaggttcaacattaattccaaatttaaacgccgaatggacagtggtaccacctacataataacgggtggaagccattcctgtagatgcagtgggaataattttggcacctatttttcgcaactgatataaaatgtaattaagcaaaaatgtctttcctgttccgccatcaccacataaataaaatagtcgagaattcgttgtatttaaaaaagcagtttttaccatatcaaaaaatttttgttgttccgcattcaaattcccatgttcaaatgctgttgtgtcaactgtgtcgtcagcatcatcatcctttacgagctgggggaagaaaaactcgttaatcccacgttgttgatcattcataattgaaatcgctggggttggtagtccataatctttacattgtttgttttgtgcaactaataatttttctaaaagagcaagagcatggtcaatacgagcaggacgctcagcttctgtgcagcgtgtgtcaaacatgtgtttaataaattttttccagagcagggctccatcaatgagacaattttcagttgacccaaaaattaatatgttagcaagcaattgtcgcatttgtgctggggtgagcgaggcagcaccctcctccatggtccgaacccacacgtcgttgtcatcaataagccccctgagtcgggctgtctccagaaatgtttcacagatatgcgttgggtttaccatttttaattgctgcgggtttcctggaaaatgttttgtcaacaaatataaggcaaataactccggatttcgtggtgagaccgggaaaattcgtccaataattggttttctgttgtgtatattatgtggacgtgtagaaaaaatacgttttttccaaaattttccagatttgttgaatgaatactggtcgggcatatgctcaaaaagaattttcctaacatcaggatccgtttcacacattttccaataagctgttaaaggagtttcaggcaaaatgcctgcctgtacttgttgtgcgacagactccttttcacttgatttataataaatcttttgctggcctggcaaatgaagcgacaaagcaataaccgtatgagataatttagcatattttagcgacatgatcctacaatatgcctcaggagatgagcgatataacattctggcataataagcaggctcgtcaatacttgtttttccattttcttcaatagtctttatgtacgaaaaactggggcctttgaacggatacttatacaaatatttcaagttggtgctttgcccataggcatattccaaattatggtgagtctcaaagtgaactaaaatatatgggttgtatgccgatactcgtgaattgtcatatgtaatttgtgttttgcctctttttacagttaacgtttgtccgccatcttcttggcacggacggaaatagattgctggccggtcatcatgcaagatcgtaaatttactaaatggcttcggaaaaccttttttacatttccctttatgattaaagcaatggcgtccgcagtcatgaaattgatactttggcaataactcgcgcactttgcgaataaaaatagcccaatcagatttttcattttggttcggttcaggtggaatatgtgcccaaatcaatccgtcaacattttcagggattgcgagcagatcggtatgatagacacgatgggcatgtggcccgccatattttttttgaaattctctacattcttggccaatcattttacccaaaatattttttttatccaataaataatgaaggtggcgtagtttgtcctcataaatgcgacaaattaaatcgggtctatcaacagtcctctgaccttggtgaagaaaatttcgagaaatttctggccatctgggatttgtcgtaaaagttaaaaagaatgatgcaaaacctggtctcttaaaccttgacataatggtggttgcatcgtaaaatttatgttgaaagtacgcccgtgttccaggctcagatctccggaacataacaacgctacctaattcttcggttgagttaagccccgcattacgagaaagccagcgaagcgcattttctggtaaagtactgcgtaaatttaattcaggctttcgcaaataattagcaacatttgtatcgatacgagctgaataatccaacataaatttctgactgaggcctccaccagcactccaaatatggtgaagcttcttgtcatttcgcagcgcaatacgatatcggatatatgacctaactgataagaattgacgtgttccgcacttttcacccgaatcaactgaacttgtgacagataaattatcatcggattctttttcgtcagaatctaaagtattttcatcagattcaacatccacttccatagcttcatcatcgcattttttattttttgagttgtaaggaatttttggatggaaaccatcatcgccatttggaaatattaaggggtagcaaagagaatcggtttgtgggtgatgtggacagaatttttgaagctttccttcatctgtagtgatccaaataccttttagtaatggtggctggtcgctttcggcccagatggaaaataaagaatttccctcgtcgggtaaattggcttgccttggatggagggaagggtcctgtatatttaaaggtgcttcacgagcttcaaccaatgtaaaacggaaattaagaacagattctggaccctgttccctctaagtcttttggtattgtgcatggaaattcattagctgtttggcaagcggatggtatttgcgaataataaaatcaagttttccgattgttttttcattaactctatccc

SEQ ID NO: 11276 - DNA, 1812 bp, Heterodera glycines
  unsure (1)..(1812): unsure at all n locations
cataatgtaatccagaatgaccanttttctcaaattgggagttgcaattctcttcggcttggctttggcaatgtcttttccggagactgttcccattggtcgagccaatatttggcatctttgaagccacggacaaacagctggaaactgccccgctaaatgaatttctgcttgagtaatggaagatgataaactgaaagtcatccccacctttggtggcaatccgatgcgcttgaaatgccggcccaagtcgggataattcctggcaatttgttcttttgtgttcgtcaccgtcctatcaattcgtccatagtaaaaggtgggtgctgccaatgccacaatcgcagtccttggcacaatgtccaggcccaatttttggtccaccagcgaagcacccgcctctgagagataaccctgaattgctaaaaggtcaaaagactgttgtaaattgtttgcctgattcgggacaaggcacgaacgaccaaaacagcagggacagagcaatttgtgcgcccatttaacccattttggatttaatgacccgtaaggctcctcattttttggcttgaacacaccgatcacttcctgaaaaacaaaaatatttatcactgaatgtttctttgttgaagcattaccccttgtaagtttttgacaaaatatgagcccgaagagccctgaggaattcgttcggggttagtccctcgattgatggctcggattgcctcgacgagacaggcggcgaagtcttctccgcttgtgcttccgtactgttcgttgactatgatgggaagttaacgccaatctctttaaaaaataatgtataatacaaatgcgatgcatttcttcgtctgatggctgaaaatccgttgtcacacgaacggaagtcgaactttcgcggtccgaatgagcattgacagaattgccaagaagaggaatgcgttcggttttcttaaatgattaatttactttacagaagcaaagccaaatcgaataaacaaaacggtcttggaatgtctgtacctttgaggtttgtggctcctttataagtgcagtcgtttcgtcattgtccgaacctttacaagacactgaaaaacaaatgtaaagttatgcatttgctattttctatcaccgttttccgtctcctcctccgtcgctgtcacttttgtcggaattcgatgctgctcagtgatcacagcagccttcgccttttgcttatcgcgcatgtgactgaaggactttcaaccaagaagttttataactaaattgaaacgtagaaacggctctatatagaaaattaagctttggttggaatcagcgataggaatataaataaattcgcgtaatatggacagaaaatatggaccaaaaatcgcgaaatatgcatgaaaattgcaaaaatacggacaaacataaatctttacaaataaatggtaaatttctcaaaatatcttcagatttgctaaatgtaattaaaactttaaataatgggctaaatatggtattaacacaaatttagctgatggggaccgttctaacagaggctttttggaaaaaatgcaaaatatggacttaaatatatataatgccaaaatatagaaatatgtgggaaaatagaatatgtaggtatgaactccgttctagaagcatgaaactaattgtaaaataaaaacttttatttaaacatatttaacaaagatcattcacattttacttcatatttaagggtggcgttaaacatatcaccaggactgtagttggtaaaatttggtaaaatgaaaaaaaaaatggaatagactgaaacgagcgcttggc

SEQ ID NO: 11277 - DNA, 3728 bp, Heterodera glycines
  unsure (1)..(3728): unsure at all n locations
ggtgacaaataatcaattcattggctttgattataaatggacaaacacattcctagtttgaaagtattttggttcactgattaaattcgctttcttatgtcaagttcaatctacagttacacaggtccgggtatttgggcaaaaaccgggtacgggtgttgcccggtccagaattacgggtccaattttttaaccggatacgggtataagatcaggtccaactgggtctaaaaaataattaaaattatattacattattacaataaataaaaatattttagatagagtcgatagcaaatcaaataatatttctgaaaaaattccagaaggcacaaaaaaaattaataatatttttccaaatcaattatctctaattatccactcgtctccattaatccccccgtctccaattatcccccccccctttctgaggaggttgaacaataatccccccggggggttaattagagatatatgcacacgcaaggggtgtctcaggacaagggccatacgacggacgattgagacaggggggggggggggtgtcttcggtgattttttttgtttttcacggaattttttgcggcgcgctttttcattttggaaatttagtgctatttgtgacagattttttcaaaaaaaatggattttttccaattttgagaaaaattggatttattaattagaatattcattccggttccaagtccggtagggaaggtttgaggacagaaatttttcacaaaagaaaaagtaaaattttcttacatatttaaatttttacagtagcctaaaaaactaaaataacattttctgttatttttttaaataagtaaaaaaaaaatctaaaatggttattttagagtaaaatctcagccaagtcattagtgcccagaatctgaaaggaaggggacagagatttgaagattgaccggggcgggggtcccgggaccttttttccggcactccttgtccacaatttttaaccgaagctcaaaaattatgttaaaaatttatttttcaaaattttgatctttgataagtatttaaaataaagatttacgaaaaagccaaaattttatggaatattgtataaattaaaaaaaattcccaatgaaaaaaaacagtgaataacaaaaccaaaaatttattcactgctgctggttgcagttgccaataaggcacatttttaggatttttctactataaatctttattctcaaacccgagaaagtctttcgaattttttatcgtaccacaactcactaaaatgtttcaagttaattcattaaatttaaaaaattaattgaaaaaattcgcttcgttccgacatttttttctagttttttgcttttttaaattattgataaaagatttttttatcgtccacagaattaccaaattttacagtatatttgtcgtttatggtgaattttctttcgaattaaccgaaaatttcatgatatgtacacagacattcttcaatcatttttgatggcgcctgaaaatgccgaatgcaaattcttttttttcatttttaatttttcttatgtttttgtttactcactgctggtctcttttttaatggatcataaaagaaaaagggcaacaaacaacaaacgccaatttcattctcacattttcttcccttaactttacaaatactctcaaagaaatgttttttaattttaattattcaattctcagttttgtaaaacataaaaattattattattttataattaattcaaaatggaccgaagtgatccgaaacaatagaagcagcagcaaatgatgttgagggaattgtacagcccgaaacattcccatggaccgcgggaaagggactttcgatactgaagaacaagcagacgaacaaggcaatcctcgatgagtcatagaaaaagtcgagaatctttctaataccgaaatccgaatcaaatgaacagcgaaagagaaattaacaaattgtaaatatcaaatttgaagggacttgcccattcgatggcggaaccttcgggtgaccgaccattagcaaattaattaacgaaactaattatttaattgcccaaattgatttggaaaggagcggaatgagaagctgttcttccgcgtgatgaggcagtttcttggcgaactgttgcccattgtgtatacggtagaaatcataccgtaacactggttgtgaactgtttgtttgtttccatttcagcccactgttggcgatgcgtgcattcattttgagtaccgacacccaaagtaagcagcagtcccccaaattaattgtcccccatttgcgactcatttgcccaattaatcccaattaaagggcccttttcctcaacatcaattggcataattctgtcagtgaaatctgaagtgacatttgtttgaattttcttttcaatcataattaattattatccaattaaggatggattggcccggctttaccccgagccggcggacaaagaactgtttgtccgttcccaagtttacagcacagactatgaggagctgatacaaaatgctctttccgtgtcattctccgccgatcgctctcagaaaagtcaaaagagttttagtgttgaaatttgatcccaacgataataataagcgaaggaaggagtaaaatcatctgccgatggatggggtggttttgtggttgttcggcattcatttggtgtggcgattggtgtgctttgacccctcccccgtgtcccccgctttttgtttggccatcggtgctcggtcggaccagggacgaaggaaaagacgaaaagcataaaaagttaaaccacttgagcaatttgtccaaacgttgtcagttaaactaattgctaatttctcaacaattaacagaattcattgttttgtttttaagtaaaacttttttaaattgcgcttattagttaattattaattaaattagcatattaaatattcattttaatttttgaagaaaaaaagcgcggctgttttttaggtaggaattgttttcaacctgcttaaattagctttaaaatggtttaattagggatttaaatgcttaataaaatttcaggcgccgtcccaattcattttattccgttggattttctttaatctttgattttttcacattaatcactctcatattaataatttttcattctgcgttgtttcaaatgcttctcctctttctgtgaatgattctttgattgggcagggacagctgtgcccaatggaatttggcccattaaattgacggtgatcgcttggccaacccaaccacacacttaaaatagccatttctcggcaattcctttccattcattcaaatggtcgtccaacagagtaatttttagtcttttcttttttggcttcaaaaggtagaagataggaaagataaaagaaaaaaaaagataatggaatgagaatgagtgagagcaattaattagcaattcaattgaaaggcgtgggaagcagcagaaggcacggaattccgacttccgatttccgacatttttgggggctgaattccgattttcgtgtttttggggcctaaaatgccatccctgctggtaggaagggaaagtcaatccgaagtttggatggtgaaaatgttttatttatttaaaaaaatacacaagagagaagcggcgactttttcttaaaatagaataaacaaagtttaaagatgaaaatatttacccaatttgccanatcagtaatcannatgacctgca

SEQ ID NO: 11278 - DNA, 1196 bp, Heterodera glycines
aggttagcagaaagaataaaaattttctacaggatttcccttgggatggaaggtcgatgactcaacaatatcacaaattgcttccatggcattattacctcattttccatttcatgcagtgtcttcgtactcagtgtgtccatttgagcaaaatggtccatcttttcgtcaagacagagactgatactgctgaggcgctgtcttttaactgtaacgagaaaagtttttagaattaaaaggaatttctattttgttttccgttagtattttttcaatttggttccctttgcccgcccttttaggaagtccaccaacggtttctgtccgccaccttccgctgccttttccgaacttccggccgtgtcctccatttcgtcttcttccattattcgtctcttcagtccttcccctcccctcaattcgttggttttcccccgctctgacgtcgttagcttttgctgttcatcgtcctcccgaaaaaggaagtctcttttgtcgactctttgccatctctcaaaacaggcatccaaccaatgtgtgtttactatgggaatacgaagacgttgagcgagacggaatttccttaaaaacaaacttgtgattgtttataaaatgaactaaatcgaatcaggacacgcggaatgaggaagagatacagagacaaattaaaagggtacacggtgacgtatctcacccaacccgccccaactcataatttaggaaaaaatattggaagtttttctttaccattcttgctcaattttttttgaaatttctcgaaaggggtggggggggctgacggtggaaaagaaaaccatctgctaattgtgagtgttaactctcccttcaagcaatgacacattaaaagtgaaaatcgcattcaaaatgcgttactgaaatcaggggcgtatctagaaccatttttcggggggggggacccgacctgaagaccttttttttgttgctatttaaccaataacttttgtttccactgctggttaaaaactgtacttttgcactaaaaatgacccaattttagccgttttaaggcaaaaaacgtgcaaaaatagtggaaagtggaggtccggcggtgccgataggcgccgccgggaaaatttttttggaactttgagtcctatttgttacgaaaattgcctattaaattttttaattttcgtttgggggggggggggggg

SEQ ID NO: 11279 - DNA, 2807 bp, Heterodera glycines
tcggccgtcaactttagcgccaaaacgcgtacacttcccgtatatttcacaagctttgaagtcgacccccagaggaatgatcccagagaagacaatgcgctcgccacggagcactttggaacgaaggcagcccaaaatgcgttttacatcagggatcttgggacaaaaaaagaaatgaagagagacttgtaaccaggaaacactctccaagaaattattttttaaggaaaaacgaaagcgtttttaaaaattcgtatcaattttcttatttaattcgttaatttttacggaaaatgagttttagaaatagtgggaaaaaactttttggaccaaaatagcaacaaaaaaaaaattctgattttccgattttatttttttgacaatgagacagttttaatacagagagtaaaacccgaaaatcagcacctttttgtccttgtcatattgttggtagaatagcgaatgtaccttaaccattgtttttccgttttttgttcttcataacctaacctcagccagcacacgttcgacgtgttccaatgcgttgtcatcgtccacaatggccgcaattggctcggctaaggcattttcagtccgttcttccccgttcccccctccgtctcctctctctttttcctccgtttcgcctttcttttgggcattttcttctccgtttttcgtcgttaaaagactcttttccccctcctttttgtcctcttctgttttcgatttcactttttgctttaaagtcttaacaaaattaaattaacgtgcaaaaaactaaaggtgaacaatattttacccatttatcagcttgcgtattttccatttcttccgacgcttgcactgagtcgagcagttcctgtggtggagcattgatatcgccaatttccacaaaaaaacgatatgggttgacctggaaaacgctaaatgaaaaaaaaattgagataaatacggacgcggatgagagcgtcggaatgcatccaaacgtcgggtctgtcgtccagcatcaaaatcagttgttcactgcatggaaaaagggccttcaaattgccggttttatgcatactaaaaaagaggaaacttttgaaaactttgtgactattagtggttttgcctgctcaacaattcatctctcgaaagaatgcgataatcgaaatatttctttttgggatccaacaattcagctattttatgggcatacattcgctgaccttttaaagataatattttttataggttttggaataaaaccgaatgtaacgatgtgcatttcgaacaaattgttcaaatggtcgaggaatcttcttgtatttggacgaattttggtgcaaaatgtgtaaccattcagccgataaacgaataaatcctaaaatgaatagttttttttagtatttactataataaatgcgaccgaagctcccatttcctcggcccttaaaggtcggttcgcagtgtgaacgagtgtttggtcaaggtcgagcagaaggatgagtttcctttgacggacaatgttctgatggtcacgtgcacccaattcgtccgctatctaattgccaaaattagtcataataggaaaatgcaatgctatgaatttttttgttggattggtcacctccttagagacaaccaattcgggaacatggtgaatcattgaaacattggccgtcgtcggttcaatacgttcaccggagaagccgccttccctaaattcgtaaattcaactttactattttaattattttcatcctcccatacggtcgaagatttttgccacaaatgcagcacatatccttcatgatcactttatgagcacattttccatgttcactggttatgtcccctgaatggtaacaaaccccaaatttatttttaaaacaataattaagctcttgtagtaaaaaaaaatgccgaaaataagtacatccacaacagcaaccagatttttacctgttgtagtttttccaaattgcttatcgttagaatgatgttgcacaatatttttgtccattttgatttttttttcataaaattgtaaaagtaaaataaattctgaatggatggcagaattaaattaaaacatgttggctagatcaatacttcggtatttttaagtttgatggcgtatcccatttaaaaagaaaaggaacaacaaagccgttcagtgtgcatggacttattttggcggcataaaaacaattttccgccagaatttcctcaaatgcatcgacgttacgtcgcttctcgcctcagagaagctcgcataaatatgtgcccaacatttgacgatttgtgccgtattgttttttgttgcgcgccttcgttgaacgccatatgcgttcgattgtcagcgtatgggcacccgaaaattagggttcaaatgggaaaattatctcacttcctttatattttgaatttaatatatgctttcggacggctttgttactctaaaaaaaagtcgggtgtggcatcaactcggaaaagtacccagtgcttaattgtggttggatagagagaggacactacataacactttaaaaaccgataaaatttttattaaaaatccggaaaaaatgattaaaaaaacaacacaaaagttatgtatggaactaaatttctgtatttacggtaggtaggtaccgtacttcttcgattatagcccccgggggctttattgttcacccccctcaaaaggggggctttattcgagaggggggatctaatcaagtggggggctctattgttcaaccctttttttcaaaaatttgataaaaaatggcgtttttttttgtaaaattttacaaaaa

SEQ ID NO: 11280 - DNA, 3622 bp, Heterodera glycines
  unsure (1)..(3622): unsure at all n locations
gcggggcggaaggcctgcggtgccgacaggcgccgccgnggaaaaattttgaaaacttgagtatattttgttaacagattttgtccaaattttgtgatttttagccaatttaaaaaaacaaaggatttttaggtccggcggtgattaggcaacgtcgtgatttttttttggaaatctgagtaacattacgccataaaattaaaattttggaaattttaagaaatcagaacaaaatttgggggctactccgaaatcagaacatttctgataaatcaaaacagatccgagcctggccaaaacgccaaaatatgtaagggttctgttcggcattttggttactcaactcgagttatgggaaagaagatgttcaggtgttggatcggcgacagaaatgttttatttattcaattttactttgtattagtcggataaaattatttgatgaactatgcttaattaaatcagttgttagaacgttttattaggtgaaaactcgagaaacaaatacttggaaatgcttgattttactaaaatgttgaatttttgagcttttctggcgtaatttttttttagtttcctacaatctgatgtaggaaactatagttcatttttcaatttattccctacaatttacctatttcttatttcgcttctctattttaggttttttccatcttatctacctccaacattaatggcaacaatgcaaaaaagtgcgcgaaatgtgcggcgattgatcgaatcaacggacggtaagcctaaagatgaattcagttgttatagccttctcgggattatcggattattgtacaataattatctgcgaagtcgagaaatttctctattttgactaaaaaattcatatacaaaccaggaccgatttagctaacaagggaacattccgagctttaagtcggaaaatgcatatgtattatataccattggatagagattttagcttggtttgaagcttctaggccgtattcccatatgcttatttgtgcatatttcgcaatttatgtgcatattttggcatttcgtgcatactgtaccttactgtattttgtcttacgtacgtaataaaagggttggcattataattgtaatgtcgcgccaattaattaatgggggtacgtgaaaagtacaaatgttaagtgatcacatgcttattcattttgtagcaaattcaaattttgaatatgactacgatttaaaatttgcttaaagaatgttaacttaatattaagaaaattatttttacctatttttgtgcctattttgcgatattttgtgcctaaaaatggaagccctaatcattataattttttgcacaaacattttttgtgattcatttattcccattacaaatccaatgtaaatgtaaatcaatgaaataattccaaatcgtaatcgtttacgtaaattaattaatgcttaaggtgttaaattaatgaagaattaatcggaaatgccatcgtaattatcaaatttcatttttaattgtcttaaaatcattagttcttcacttcgcatcaaattccccattctcttccatttatttcttctcattagctggtggaccagcagcagcagtgctctgcctctttaaaattattattaataaaacaattgaaaatattttgatttctaatcaaaatttgtaggaatgggtcgttttattaggcttacaaaaaacccaaaaatttctaacacttaaagacatccttacaaaaaaacttcagaaatttcgagtttttttgcaaattaatcgccaagcaataagaaacaatttctaaacatgtcagcttttgattggtgaaattaatgaaaattttcaaatcaaattttcttcaattatttcaagcaattaatcatttttggactaaatgatcgaatattgttagaaattcagatttgcttttcattagagatcggaccgggccgggcccggcaccgggttttcccgggcccggcaacccggcccggtgatttttgggaaaatccgggttgaccgggttatgagaggccgggcccggaacccggtcgtttttgaaaatccaacccgacccggaacccggcatttttgaccgggttatgatttagccaaaatttgttctttttcattcgaaaatctctttggcataatgtttataaatgttttttttcgattttctggttaaatttttctattcgaagaattcaactttatagaaatgataattttggtatttttctttttaattttaagaaaatagtcttatttgggaaattggactatttaaaaaaaggtcaaagttttgtgtacgtaaaaaataatattcaaaaattttttcattatcaaagtttttgatatttcttaaaaaaagtaagaaataattaaaccggactttaaaaattcttaattttcttgaaaaatttgctaaaatcgctaaatttagtcatttttggataaaatttgttgacaaatcgttaaaaattacaaaatttcccctggcggcgcatatcggcactgccggacccccatattcccgaaatttttttgataaaaagcgccgcaaaaaaaaaatatttattataaaaatttagaaaaatcgctatgaaaattttctaaaatttaattcttgaattttctcttatagaaaatctaagatctttttttgaaaaacttaaagtttataattgaagacgtcatttattattgacgcctgaagtgaaatagagcagaaatttaacacgtgacccactttttggtcaattttggtgttgaaaaatatgtgaaaattaaaatttttaccaacccgaacccagcaatttgaaaacccgggttgaccgggttttgagaggccgggcccggaacccggttgcttctgaaaaaatcagcccggcccggcccgacacttttgagaattccgatctctacttttcatcactttttcgccgtgcttttccaaaagtttgagatttataggctcaatttgtacggatttttaatttaaaatgataaaatatgtatcaattaaaaaatttcgactaaattcgaaccccggatccgtattctaacaaaaattcgaaaattcaaattttcaaaaaattattttatggtgcgaaaagtcccggtactttcaaaattccgggctctaataattaatcattaaaaaaaaaattcaaattatgaattacaatcactatttaatgctgattatgacctctaggattataaaaaactaattttatacctgtttttttttacatagacgaaaattttggatacgctaattgaatattttataaattctgaccaaattgttgttggccgtcgaatgagcagctttttgacgtgaatcgctggagactttgacgtaaaattaatgcaagaaatgaagtaaaaaatattaaaaattaatttaaaatgataaaatttgaaattttttaaattctctaaacgacactcagacaaaaagaaagaccaaaataaaaaaataaattaaaaaaggaaaacaatttttatgttttccttttttattaattcaattgacaaacttaattaataattaaaatagtatgaccttaaaaataataaaagtaaaataaaagtgagaataatccataggatcaatcttaa

SEQ ID NO: 11281 - DNA, 1951 bp, Heterodera glycines
  unsure (1)..(1951): unsure at all n locations
agatcgcaaaaaacaaatattctttcccaattaatcgtcatgaagcgaaccaacgcaacaaacatcactccgcctcgcgccaaacgtttaatggtagctacactggacctggacccaaacactgttgcactcgcagatcaagaacgccaacgcactttggtgttcattggcctcccggaaagcaatgcgctcgcccatcggagcgtgttcaggaagacagggaagcgaccaccaaaatcttggaccatcttgaagttgaggccgaaccaacggccgtctttcgactcggccagtacgacccgcagcgaactactccacgcccgctcaaggtggtcttgccaacacccacacaccaacacgtggcactcggaggatggaagcgcgagcgtgctcgactccgttctcaacagaacctgacccgtctgttcgtccgtccggcgctgtccaaagaacaactcaaagaggaatacgaagcgcgtctccgaaaacgccaacaaaacccagctccattggcacctccaacacagctctcacaaacgaaaaatgaccaaactcccgttgttgcaaagggtccaaaccagaacgaggacagtgaagacatttccaaacatccggaagtttttgacgaaacaatcctcgtatgttatgaagcattaaagccattgccaccaaccgacaaaattgttcaccaaattcaatcgctcgaaaaacaataccctcatcttttcaataaatagttctaccagacctcgaacaatttcttcaaataaaattaaaaaacaaaacatcctattcaaactttctttaaaaattttcctcaaaaaaatttttctccaacccctataaaaaaccaaatttcccttttttggaggtctgacatttctactttctgcttctccagtcaaaatttcaattgtcttttatcagtacttcccatttcaccttatttccaccaaaagtgtaagtggcacatgtccttcttttggttatttttatttttgaataataaataaaattacaaatttaatttaaaaaataaaatatgcgcaattgtaatttgtttattcataaaaaataaaaaagtcatcagaagggcgagaaccacttatctgacgactatcagataaatgtcgtagagtaagtgacaaaatatatggatgatcacaggaattaaaaaaagacaaaatatgtgaaaataaataataaataaattgaggtcaaagtcaaatgaggtcgaaataccaaatcacttagaaatttgttacattctaaatttcccggtcttacagattaccttagtgaacttctaagtttggttttaaattgatttaaagaatttgtttttattagttctttatcgagttgattccacaattttgttaccctcccagcaaagggaatgaattttttgcccagtttgtattttgtgttaaatctgtaaaaggggatgttaaagcgtgttgatggattaaaaatagaaaatagtttcagatctgttcggccataaacaattttatgcgccatgaacagatcaaacagctttcgcctattctcaagtgttggcagttgtaggtattctaatcgattttggtatggaattggcggaaggctgcatttaaaaatacccttttggtgaaatatttttgacacttcgatttttttaatatttttttgaagagacggattccaaacctccggagcgtattccaataaaggcctaatataagttttatataacgtaatccaaatcttagacgatttggatttaattattcgaaacaaggaacgcatacgtaatacgcattctttgnntattggtttcggaaattgtaatttgttatcaatgtttactccctaatcctaattgtatcacagcatttattgtatttcatcaaatttataggttttttttaagggttttttgaaccaaatataataacaaaaggttttt

SEQ ID NO: 11282 - DNA, 2348 bp, Heterodera glycines
ctagacacattgattttttattagaaaacttataaaatcaaattttgcttaagaaaaatggggtttgtgtgattttaagaaaatcatccaccattcttagtggtaaagtcattattttgaggtgccaatttcacatttattcgttaagaaaatcttaaaaatatttcggcaaatttcaataaaagaaaaatgtatttgttcgattagtatttttttatataattcagttttaaatgtttttccttttgtggataagtgcaaatgttgatttttcttatgaatgcaaaacgtaataatatcgctaatagactaaatatttttcgctgcttttatgatacatttattcccttctaacaaaataggataattatgaatatatttttctcaattaaaagttgatcggaagcgcgaatgatgaagcggaatgcgcttccgacggacggatcaaaacagaggcagctagctcattagcatgactcactttaaattccccgctttttggtccctaaatttctatgcaaatatttgaaagtgaaaacagaagagcatcttaaattcatttcatcattactttgtgatgatctagttcatttttgcttctttttttttgtagttaaatgtatcgtttcgaattaaataggtaattaaaactgtctgcatcactgaaatgcccctgctgaccttacgccgacaaataataatttgttaaactggcttcaaatatcgaaaatatgaaatttaatctctacccaattttgtttaattaccctttcatccttaattaattatctgtaatttaacgctaataatttcgtagaaaaaaccttaaccattcttggtatagcggcgctgccgtgcgctgtgggcgtgctggcattgggaattggatttcgaataaggggagggaatggggaaagtgccacatattcccgaaggaggggtccatggggtgataaagcccaggatttccttcccacactcgctggtcacacagttagatggctttattacggaaaaacttaaatgcgaaataaaattaagaaattaaatgtgaaatgaaattcctaaggcttcggcaagacaaacagcaaacttggaccctcctatctcacagttcatatcattcggtagcccgaaattttatattcatctgaaatttccaaaaaactttaaaaaaaaatttagactaataaagaataattataggagacaattttttttccatttgtggtcggacattgaaattggcctctttaattaacagatgcactatattatattctgttaaacttaattaatttttatcatttttttaaataattgcaaaactcccaaaaaattcccttttcgtcccccccaacacaaaatgcgaagaaaacgtgttcttccttcttcttcatcttctctttcttttttatatgtacacaacagctattttttcgtagcgcaccacacacaaatcaaatgtccagcagaatctctcaaaaacaactcacattaattgccttgcttttcttcctttcaaatgttcttttttattatttggtttctttgctttttattatttttaattttttttatttttatacattgattttgcataataattacgatgtttttttgtgtcgtcgtctcagccaaggcataaatttttttacaccaccgaccaaaaatggtcatttgaccaacataaaaatcccctttttaattttttcttttattacataggtaaatcattctttttttctctacccattttctctttttctgtgtgtcttctgtctgttttcttatgggctcaaccactctttcccaattgttccgtgctctgtttgttgctcttctgttcctgttgctggtgctgggccattggttgggacggcgaaagcgggcgaatgcgtagcgtacggacacgaaaaattcagtatcggacaattcagtattttgagcagactaaaaagttcttggtttcatctctttaaattaattctgcgacgtataactaaaaattgcgatttattattattttcgagacaaataatttaatttgtgcattatgaccaagtctaattaattggcctatgtattttgctgacataaaaaataaagaaaatgaataggtatgttgtccaagaataaacaaaatactcaattggaacgccccccacatttttctccgctgcgtacgcctcccccccccccccccctctccgccttttgttgctcgcatctccgccaccaacaaacaaaaattgcgtccgtcgtcgcgccgcatcgttttgttggcgaccagcggcgccccccgtgggccgtggcggggatacccgggggcagtggggcaacggcag

SEQ ID NO: 11283 - DNA, 1279 bp, Heterodera glycines
catatttaggaccatattcggccatttttgaccttcttagtccatatttcgagtctttagtagtccatatttaatgtccatatttcgcgttcattagtccatataatcaacacccctaccaatctctaatactcaattttacgacattccaattagtgagactcaattctgtggcattccagtcgctgtgcctgaatccaccagcattcaaaaacctcacatttcgtgtgcattcttcactccatcctacgaaattatttcttttcttatatttatccacaaaaaatccttccataaaattcgtaaggcaatctggtctctgatctcgtgcgcaagtatttgtctcttcatcaacatgttcggtactgccggatgtcaattcgaacgaagagttgcattttgatattctcgaatattgcattaatagtaaagaatcgtcctacattcaggaaacccattcgcactcattccctctaattcattctgtacctaacaagcaatcgatctatcttatctcttccccccccccccatcgttcaccttttgcttttttcaatttcaattttactcctcgcgcaccgtcgcacacaacaaaaaggcacaatttttaatcttcgtaattccccccccccctcccccgtccattcgttctcataaacatttcctccccttttttgccgatgatatttatgtggagattttgttccatgcattttctcaccagtccatgtacaatttattaaaatagttatttgtgttggcaattaacagcagagatgtcaccgtcgtgacagaacaaaatgccattgtcattaaagcgactgcgcgaaaataatgtgccataaactgcacaattcaaaaattatttccattattaaaaagctatttcttgtgaaagttatttgtatatacatataggattctgttaaaattaaaagcgaatttcgctacgaaatccattttcattttattaattttgtttgactttcgttaaaatgctattaattaaaattttattttatttagttatcaacatattttttgattcttaacgcattttatttgttaacgcaccaattgatactaaaagcgccaggacagcagcagcaaaatggacaaaaacaacggaaaaaacaacagaaaaagtgatgccatcgacgagcaacaacatcaaaggcaccgcctcgactattgcaattctttgcccggcacttccgccgcagcagaagcaacaacagaagaagcaacggtcgttcttctggagactctagaggtcccc

SEQ ID NO: 11284 - DNA, 1557 bp, Heterodera glycines
  unsure (1)..(1557): unsure at all n locations
taaaacagattataaatatttaagaaattacaactttatttaaataaaactntatttaaatatanataattaagagagtgaaaaattcagttgaaaaattaattgctcaaattgaggctggcaatgaagctggagcccaactcaatcaaaggggtgacggacaaggccagctccacgttccagcagatgagcaacttggagctgtttatcgaattctgccgcaagcagggagtcatcacgcaggagttgttccgcgccgtggacctggtcgaggcgcgggacctctactcggtgtgcatgacgctcaactcgttgggccgaattgtgagcataaattaataattaaaatattattcttttatatgtaaaaatttaaagacgggaaatttttgaattttaattgctagatttcttggcattttttaattatggggaggggattcaaataaccaatgattgcttgtagtgttaagcgtgaattattttatttatttatttatttttgtctcatcatttccaaacagtctaagtataatttatcataaattatttaataaattaatagatggaaaagcacggcaaaacaggtcctcggcgtgtttctgtacatgaaattgtcaatattccgctggccgatcagctgcgtatccatgatataaaaacgttttgatcattttcactgctgatttttcttttattaaattaactaaataaaaacataagctcttcgatttttgtatgaaaatagacaaatttagcttacaattttaaaatgatataaaattattaaaatgatttcgttataaataaattcattttttaattgattgaaaattatccattttcctttttattactgaatttaaattttcggtaaaaaattttgtttccatttgtaatagattttaaagaaaaaaattgccaatttgaaagagttcaagaaaatttttggagagctgactatcaatttgtaatattctgtatttttcttctacctgtatttttctgtacatttatactgggagtatgggtacaggccattcttggaatacaggtacaggtacaagataaactcgaaaaacctcgatttcctggacaaagttttcgaatttattatttaagtgaccgatttttcttcaaaaaatttaaatagaattaaaacacattattattgtaaaattgttatttttagatatcataagcaattaattcaaacgtttttttgctttttaaaacaaatttcaaaaaatccaggcatggatccaggtctcgaagagccttatttttcctttatgtgaatttttctgtacttttagacagaaagtacaggaacaggcctttcttggaatacagatacagctacaggttttacctaaatgtcgatctctagtttggaccccaaataataaaagtttagcactttaattttcatttctttattttttgttcattttaaaaaaagtttcatagaaataaattttgatttatttattatattttttacaatttttaaattttataatacaaaaaattaattttttggttcatttacaaaaa

SEQ ID NO: 11285 - DNA, 2545 bp, Heterodera glycines
cgactgagaatggtccaccgcagcagctccagcggactcagtgtggcggtgatgggcaaagtgaggcgaataatttaaaattaatataaaaattcttttttagcaagccaacaaatacaatacacaggagggcactctgttgttggaatggatcaaaaaggtcaccggagcgaattgtatcaacacagacggaagtgctgacaattttgtggcacaattgaaggacggcatattgttgtgcaagtaatgataaaacagattataaatatttaagaattacaacttttatttaaataaaactttatttaaatataaataattaagagagtgaaaaattcagttgaaaaattaattgctcaaattgaggctggcaatgaagctggagcccaactcaatcaaaggggtgacggacaaggccagctccacgttccagcagatgagcaacttggagctgttcatccacttttgccgcaagcagggagtcatcacgcaggagttgttccgcgccgtggacctggtcgaggcgcgggacctctactcggtgtgcatgacgctcaactcgttgggccgaattgtgagcataaattaataattaaaatattattcttttatatgtaaaaatttaaagacgggaaatttttgaattttaattgctagatttcttggcattttttaattatggggaggggattcaaataaccaatgattgcttgtagtgttaagcgtgaattattttatttatttatttatttttgtctcatcatttccaaacagtctaagtataatttatcataaattatttaataaattaatagatggaaaagcacggcaaaacaggtcctcggcgtgtttctgtacatgaaattgtcaatattccgctggccgatcagctgcgtatccatgacataaaaacgttttgatcattttcactgctgattttcttttattaaattaactaaataaaaacataagctcttcgatttttgtatgaaaatagacaaatttagcttttacaattttaaaatgatataaaattattaaaatgatttcgttataaataaattcattttttaattgattgaaaattatccattttcctttttattactgaatttaaatttttggtaaaaaattttgtttccatttgtaatagattttaaagaaaaaaaattgccaatttgaaagatttcaagaaaatttttggagagctgactatcaatttgtaatattctgtatttttcttctacctgtatttttctgtacatttatactgggagtatggtacaggccattcttggaatacaggtacaggtacaagataaactcgaaaaacctcgatttcctggacaaagttttcgaatttattatttaagtgaccgatttttcttcaaaaaatttaaatagaattaaaacacattattattgtaaaattgttatttttagatatcataagcaattaattcaaacgttttttttttgctttttaaaacaaatttcaaaaaatccaggcatggatccaggtctcgaagagccttatttttcctgtatgtgaatttttctgtacttttagacagaaagtacaggaacaggcctttcttggaatacagatacagctacaggttttacctaaatgtcgatctctagtttggaccccaaataataaaagtttagcacttaaattttcattcttttattttttgttcattttaaaaaaagtttcatagaattaaattttgatttattatttatatttttacaatttttaaattttataatacaaaaattaattttggttcatttacaaaaaatcgtttgtagaaatgtgtgtccaagtgccaaatttattcacagaactgccaataaacggaacacacatctttatgagccaataactccgatcactgcaaaaatttggtgccgcatacccaccccattttcaatgtttgatcactgatcaaagacgaagcgcatccgtggaggggatgttcacaatttcggatgccgacacgtgcttcgggtgggatttgcccttcttttgcatctaaattttgaaaaaaaatcatctggttgtatttataaggaaattaatgttttaattgaaaaaaaatatatattataatattttggttttttattgccaaaatatttaactatataacgaaattcttttgttaaaaaattgaaatttggttatttttatgagccattcaagaaacacataattattagcttaaaattcgttttctcatccttataaacctgtaaatatttcattgcataaataaaataattttcaaaattaattaatattttctgttgctcacaattcggcccaacgagttgagcgtcatgcacaccgagtagaggtcccgcgcctcgaccaggtccacggcgcggaacaactcctgcgtgatgactccctgcttgcgacagaattcgataaacagctccaagttgctcatctgctggaacgtggagctggccttgtccgtcacccctttgatcgagtttggttccagcttcagtgccagcctcaaattgagca

SEQ ID NO: 11286 - DNA, 2119 bp, Heterodera glycines
caatcgtttatttatttacataatgattttgatatcatctacattaaaaatgaattatttaaaatagattcatcaagcgctatgtaaaaacgaagacataaatttattaaattttggggcttttttggctttttacgactttgtcagattcattcaatgcctagcatttagaattaatatgtaattataacttttttcttttaatgctttattttctttacttgcacaacaatgtgccgtccttcagttgtgcttggaagttttcgcgcgttccgttcaccgtcattgtggcaccggtgacctgcttgatccagttgagcaacagctcaccctcactctcgttgtatttgctggcttgctaaaattttaattttatttttttttttaaattttccccctttttcttagttcactttgttcataatcgaagcaccaacaccaccagcgacacttaaaattaaaattcataatttttgttaaatccattttaataattacctgcgagatcccatgttgttggctctgtgtttacgcacaaattttacctaaaatttattttatttttattaattaattttaaaagaaaacaaaaaaattagggttgaaatttttaagttcccccgattgtaaaatggcaaattttgaaacatttttatctaatccatttgacaaagcattcgcttccgacgaggagctctaagcgtgaataaatagcctccttcccacgaattttcgagataaatcccatacattttgtgcccttccgtaacagctgttgcccggagagaatgaacaaaaatcacatgcttattcagtatgctgtgttgagctgagattgatcggaagaatggaaagtgatcagaaaaggtaaaaaaagaatgggtcgaaagtgatcagtgtaaaaggagagacgaagatacacagagagaaagagaaaggaaaagagagagagagaggagagattgagaaagaaaaaaaaatgaaaaaagagacagagaaaaagagaatgagagatagtgagtgaagaaaagagaatcatcgccgcttcgaaggtgatcatctgaagtgtaaggagagagaaggcgagaagagagaagaatgtaaaagagagacaaacgaaacagagagagagagagagaatcacaaatgatttggcctggccaggaaattcttcgcccggagagtcatgagctttttgaggccacaactgacgcaaaaattgttatttcctcttcacacacatatccgaaaaacgaatgtgtgatttaaagatttgaacaaaaataactttgagaggggaggaaggggagaggataaaaaaggaccactaaatatggacaggtaaaaaaattaaattaagattaaaatgggagttcaggaaaacgattttgaagaaaggtaatacaattagtatacattttactataatagcctttgttcaggacttgctgattaaaattttcaaaagactcatttagctcaaaaaggataatttaagcaaaaaaaaaaaaatcattttagaaaatttattcaaagagcaaaaaactgcgataatgatcaaatattattggcatttttcattaccaaatgatcattggtctggtcaaagaccactgtcatcaatagggatgcgatttttaggttttaaatatttttttttttgctcaattgttttgaagataggagctcaaaaaacgcatttctgcgttgaaatttttcgattctggtgtcactcactatcgatcggtcactagaaatcactattttggcgttttgtcactaaaatagttaaaattcactattttggcgttttatcactagtttttcactatttcgacattttttgtaaaatttattagtaaaaatggaaaatacaccccctaagaatcgaccccaaaaatttcagaaaaatacacccctaagaatcgaccaaaaaatgtttttaagaaatacaccactaagaattgtaaaattttctcaaaattcttcccccccaatttttttttcttgacaaaatttttgatttaaaaaacctcaatatttgctaagagaattttataaagaaaagtgtacctccatttgcaactgcaaccagtgaataaaaattatttttgctcaa

SEQ ID NO: 11287 - DNA, 2113 bp, Heterodera glycines
tatttctgaaaagaaaatttagctaaaatactaataaaaataaaatttagcgcataaaatcgccaattggaattttataaaattttacggtgctcggtgcttactgtcagcatcgtcgtggccccaaatttgacagggttttttttttgttttttttttaacttaaaattggttatttttctaaaaaaaaagaaatatttcaactataaaaaatttcatgaaaaatttttgcttaaatttttaaggagaaggagaaggaaaatacacaattattcgccctaacggaagtacgcttatggttcacggtaataacagttaggggacggacttttggcatcaaaaatcgaaaaaagcagaaaaatttaaatcgaaattttttttttgaaaatctctaaaaacaattttaagtggttcttttcataatttttttgttaaaataattgcaaaaaaaaaatgccaaattagcactaaaaatccagaattcaacaaaatcaatatgaaaaagttggggttgggtgcttaaaacacagatgaagcttgtcctgaatttgaaaaaaatatgagaatgcttgaaaattttgtccccgacaattacatttttcccatgaaattttttttaatttaacgaatttttattgttcagataatcattttggaaacaattgtgagttttgtttttattcaattttttaatgctagaacgatttcgttaagttacggtcgaaaaaattgaaaatggcaccattcgactcagcaaaaacgatcgaaaatagttgtttaaagattattaaaaatgtcaggaagggtgcggaagccgaaaaaaaaattacggaataaaaaattcaaaaaaccggaggccaggctcaacacacctaaaactgagatggaattttggcataaccaataaatatttaatagaaaaaaattcattaaaatccgtttatttcgcatatatttttttcctcaaaattttaaacataaatattataaagtaaagaaaattgtaattctttcttttctattttttcaggaattttgtaggcgaacacataaaacttagagctatcaaataattttaaaatatttgaactgagtttaacgagttttcatctaatttttttttaaaataaatctctattaattcaaaagtttcgaagaaaagattagatttgccaaaatttttcagggctaaataaaaaataattttttagacttttttttcattttctaccactttgctgtgaaattttttgataactatgtacattttcttatcatatgccattaaaatttccaataaatttttcctgttgttaccgctgcgaaccccattgaaaccattcttttttgaaaagttgatcccaaaacggcaaaaatttcagaaaatgcctgtttttaacaatttttaaaaaaaatttgttttcggcatgtttataactagagttgagcggtaatcggtaattgtaaaaaaaccggtaccggtactgaccggtaatgcaaaaaccggtaccggtaccggtaccaactttttccaccggtaccggtaccggtaaaaaccggtaattttccaacgtaaaaatttttggacaaaatttttcaaatacaaaatttttattcagttttcgcgcgagtgcctgttttttagcattagaattgttcagaagtaatgtatattgagggtgaccaagttttttttcaaattcaggataaagaacactaaaattcagatgtagacctcaaaattcagattattgcaaaacaaggggtcagcagccaattttccaattttgcgaaggggtctccggccatgtaaattaatgtaaatcaatgaccttttttgctttcaacaccgcttttttcgcggcacgtttttctcaagactttttgggaacaaggagggctggcggtgtcgataggcgccgccgggaaaaattttgtattttttaatgcgatttgttaacagaatttgcaaaaaaaagaccaattgattaatttttgggtttttaggatgcttaaaatgaaagaaaaaaagttggaatattttttttaattaaaatttcaattaaaataatggtaaagaaaatatgaagaatattctatccccagtggggaa

SEQ ID NO: 11288 - DNA, 1672 bp, Heterodera glycines
accaaaaaaaaaattaaacctctaaagtagttattaagaaaaaatcacaaaaatttagacttttttgcaattttcagttacaacttttttactaaccgactaatcgataagcaattccttagaaatagcttctaaacatgttcagctttcgaatgataccaagattgttagatttgatcgacaacaaaaaaagttatagtccaaaaacaagggctggcgccgaaacggcggcgccgaaacgatacagaccctcttaccagtgcaaatttttaccggcggtaccggtactagacaaaccggtaccgatactttgatttttgaaaaaaccggtaccggtaccaaaaaaccggtaattaccggtcggtaccggtaccggtaccgctcaaccctatttataacaaatttttggcttttttaacttttaaaaacatttttattatatatttatatataaatataatatatatatattgacattttcgggatttacattgttgtcgaagcaggcgatgaagaaaatgtcactgaatggactattttcatttcgcttcggtaaaaaaaaattttgagacgtaagggctcgggagccgacaggcttttaccggaccgcctgagcccgggcccggtaaatttttaaaaataccgacacaggtcaatcggatttttaccgggcggcccgaggcctggacaattgtctaagtccgaccctggctcggcaatcccaaaattaatgtcttggtcttgagaaatcactttcaaaaaatgaggaccaaataacggaggcgttcaatcatctgacatttgcttttgtccaacttccagctcaaggagttgtaagcaattaaacttaatttacaattttattttaaataattttaatgcttaattcaaataattattttagaaatatcattttcttatattaaatgttagtttaaataaaaggttataggacggacttcgcttggttacctttatgacaacataatgtcatcattttgtatatatgaattaagtggattagatgattgtttgtggatttccaatttatagttttgtttcaaaattgaagatcgagtccggcatcccgagtgcccttcccgattggcgctggaaatgtgccaaatgcccttcggttcgccaaattctggctttatttgatcagcatcgagcgaataaattttctaatgtctaaaaacacaaaatttggttgacttttgtttataaaaattaaaaaattgatcttgcaaataaatttcacaatttatttagaataaaactattttataattaaatgggggaaaaaattaagttgctcatcaatcactctttcatcccgatgtagtcttaaaatttttgaattttttaataaaaaattctgctgtatatgttggactatcttacattctacaaatttttcaagaatttttatggtgttaagacttaaactctttattgtattttttttgcataaaattttaaattagaaaaataatttttttttccataacggaatcccattttattaaggcaattgtacaaaagcatttttggaagggtcgtgggtgcgagtcccaccgcggatcaacgtttacacttcgccatccaccaaaatctccacaattattccctgatatctctaatctatgcatatatacaaattactatcact

SEQ ID NO: 11289 - DNA, 1467 bp, Heterodera glycines
tagagagagaaagggaatgagaaagagagatgctgcacgcattaaatgccacgtttgatttgtgccaaaaaatggcaatttaagcgcggcgaaaagaaaaaaatcagaatttaaaaatcataaaaattcaaactcatcaaattcactcaacatcatcaccaaccgtgaacattatgctgaggattgctctactgatctccattttggcactgtttggtgattgcatggacaagggaaaaagaaaattaggaggaataagtaaaaataaaaatacaaatttatttatttatttatttcgtaaaatttaggtattaatgagccaagtgaatatagaaccaaagaaaaagaagccatcgcaacaagtaaatatttgtaaatcaaaagtgaaattttaattaaattaacatgaatttaggcagaaaaggcaaagaaaaagtcggcgaaaaaataagtaaacatttaaataaataaattatttttattatttatcatgtataaatttaggcgttatgaacacagctgaacgcattgaaaaaatgggtaaaataaaaaagataaaaatttaaaattaagaaataccaagaaataaaaatgaaattaaatatattaacattatttacacatatttagacattgcccaaggcaaagctaaaatgggtaaaattatttttttaattttaaataaatttttgaaaattaaattattattttaatttacacagatatagacaccaatgtcaaacccaaacaaaatgaggaaaatggtaaaattattaacggattttttaataaattaagaatttttgtttaattaattgtataacaccttttatgaaaattcaaaaattagttagaattttcactaaaataagggtcgcgtttttgcaattttttgaattgacattggccgtcggcgccgaaaatgtttttgagtaatagattttgtcaaaaaggggctattttttatggatttcttgaaatttatatcaaaaactctccaaatttgtcaaaatttcaggattaataagtataataaagttgctacattccgcaaatcacaggttttaattatccccgctctccctgttccctggatttgacaagggaccccccccccccgccccggctacaatcctagctaaaatcttaaaaaaatcttttgtctcaattctgtcactattatttaaattagggttgctccccgacccctcggggggcaaaatgtcgggggccggggaccccggggggcgacatgtcgggtgtcagggcggggaggagctcaattgtcgggggtcggggaccccgatcgtggaatgaccaaattttattttaacccaaaaaaaacattttttctttttaaatgctcgtaaatcttctttttttcactttaatcatctaattttgttagcgccagtaagagtgagaccaagctgctggcctttaaacctggggcttcccaattgttct

SEQ ID NO: 11290 - DNA, 2650 bp, Heterodera glycines
atctaattttaaaattaatcttagtatttaaaaaaatacttttcaataatttcaaattctttatgatggttatttttcaaatatttttcagtaggaaataatctcggtttcgattaaaaaaataattttttttttataatttttgaattctacgaaattaattgagttttaaattctcattctgttggatagtgaataatttgaatttatggcgatctgacttattgactttatttgttatttctatgtccatccgccccctccctcgtccataaaagtggacacctcctcccactttttgttcttccctttcatcattcatttatttatatttccaatttgccctccgaccgaatcaataaaattatttatttatttctttttctttgtgtgttctaagtggaagaacacaacaaattggcgcagtcagcagccattcttcatcactgaggacaaggacagctgcaaattcaacaaaaaccaatagcacccaggtggtgtgaggtctgctaagaagcagtttaactcaacaaaaaaaccaatagacctaagaagggtgaggttccgcaagaagcggtttttcaacaaattcgtcagcttagcaccaagacggtgtaagcatccaccaggtgtggattttgtggaatttttcaacaatttcaattgacggacaatgaacgccgaacaaattcagcaacttttgaccgctttgctccaaggaaatgccgcttcaagcataagccaagcgaatttggccagctcaatcgacagtagaatttcaaagtttgtttatgaccccgagaatggtcaaacatttgaacagtggcacaaacgcttcggcatattgattgaagaggatggcaaagacttaaccgagcaagccaaagtccgactattgttgggaaagctcggagacgaagagtacacgaagtacagggacacaatcagcccggagttgcccgacaaaccttcgtgggctgaatcaatcaacagattaaaggagttgttcgctgaaacgcgctctcttttcgtccgccgatatgaatgctttcgaatcagacagcatccaaaccaagacatcagttctttggttgctcaaatcaacgcagcgtgtgagcatgccaatttgagccttaccaaggaacagctcaaatgcatgattttggtgatttcactgagggatgaacatcacgatttgaggcagaaatgtcttaaaatgatggaagaagccgagaaaagtggcaccacagtcacactcaaaaagttggaagaggagttaaaagcgatccaaattgtcaaagatagtgctttgtcactcctttccacgccagcttcgacaaatgccatccgaactcgccctcaacagtggagagaatcaaaaaccaaggccaaatcagcaaatgccgtgcaacaaaaccacccggcacagcaaaaaccggccacaggaggaaaagcaattcgtggacaaccgacccagccgtgcggctcatgtggtggtactgatcactggagatcagattgtcgcttccgagaagcgacatgccacaagtgccaaaaacaaggccacattgctaatgtttgccgaaagggagcattcacgacaaagaaccaacgccgttcatttcacacggtccaagtcaaagcaacatgcctacaaattggcacgactcaaggacggtggtggacaattttggtcgaaattaacggcacaaaaatcgaaatgaatgtcgacacaggagctcaggcgacagtccttaccattgaaacatggaccaaattaggacaacctaaattgttgccaaccgacattgagactcgcaactgcaacgacgtcacatttaaaacaattggcaaatttatatgtcttgtcagcattgtgggacaaccagccaaaaagctaacagcttatgtgactgaagagctcaattacgatttgtttggtttgccatggattgaggcaacggaactgattcccaaagaaatcatgtttccggagacgcacacatcggttggaatccgcgcatcatctgccgcacctttccaagaaatcgccgatgttaagtcactcacgacggctcttaaagaaaattttccggatgtttttggtaaagagctaggacagtgcaccaagattaaggcacacttgattcttaaatccgacgctcgaccggttttctgtaaagcccgacccgttcctcatggctcactggaagcagtcaacacggagctggaccgcctcttacagatcggtgccattaatccgatagaatttagccattgggcagcacccattttggccgtcaaaaagaaaaatggcaaaatcagagtgtgcattgatttctcaactggcttaaacaatgcacttgaactcaaccgccacccactccctcggcctgatgacatttatgcagccataagcggcgctgcatttttcacaaatttggacttaaaagacgcatacctacaaatggaattggatgacgaatccaaacagctctgcgttttgaacacgcatcgtggcctttttcagtgacaacgtcttccatttggcgtcaaatctgcaccgacgatttttcaacatttgatggatcaaatatgagctgcaatccccggagcatttgcttatttggatgatggactaatcgcgtcc

SEQ ID NO: 11291 - DNA, 1796 bp, Heterodera glycines
aaaattttgcctattttttaaatatttttcaaaattctttttagaacattttcttgagttagagcgaaattcccggctcttaataagtaccgaagtcccggttctccgtgccctactgtatgtacaaagcaaaaaagctttagaattaatgaaagaacgcatttgtcgtctgtggtggtgatgatttgttaaataaagtgaagatgagaatgaaaaggcggggaaaaggaggcgacaacaacgaccttcgccacacattcttggccatctgtgctgtttgctgttggctgtgtcctcctttaactctcttctctccgttgttgggaattaaaacggaaacgatggacgtcgtcagtcaatgagagagagagagagagagagagcagagaaaaaagagggcgaaaaagagcaagggagaagggaaagagagagaaagtgggtggaaagagagtgacaagaaagagagataaagcaagagagagtgaggggaggagagagtgagaaggggagagagagagagaaaggccggaaagagaaggatgatgaatgaaaagtgagtatgatctaatcaatggcttttcttcttggagcacaaagggccttgaaatccgatcgattaaccataaatcagccctcctccgcaaaatgaaatgatcgaatataacattttgcctagcgtgggggcagcgcggctgctaattatttttttaatcctggatttggaccatttccttatggcactttccgccgcgcggggcgtaacccaagtgatgaatcggtgtgaggaagccaaggccagcggatttctgggtaaatatggataaaaagcaaaaagcgctatataaatttccgacaaacaagagccctcccttttgggaggatacgcaaaactcacctatcccctgataaagcgatcaaaaaagttttatcccctgataaagcgataaaaaaatgccaaatgggggagggtgtcaaatatttgttcaacaaaatttcccatactgtagatctgtctgactgttcactgatgtacattgcggacgcaatttacatggttctgcgcggttgtcagatcaaccggtgcagcctcaaggacaacaaattgaagaagttcccagtcaaactggtcacaaaattcccggacatggatggcatgcaaaaactggacaattgggatccaatttaaacagggttttgttttagtgatcaatttggaaggcaatcagctggctgagttgccgccagagattggccaatggggccaactgcgcggcatcaatgtggcacacaatcggctggcacaattcccggtgccattgtttagctgcaacgcattgtcgttgctggacctaagcggcaatccgattgagggtgggtggtccaagtccaatttatttttcaggcaaggggacaaggtttagtggcagggctggacacgtaaataaatttcaattacggaaattcgtaacccgtaattacggggggagggggtctaaaaatgccataattaaccataagccgtaattgagttcagcgctggagaaaatcaaagaaatttgatttgaaaattcggatgcggtaaaattgcatttaaattcacgctttttccagacattgacgccgatgccatccaccgattgtttcccgccttgaaacaactgcatttacgcgagtgtccaattagtgaagcgaaaattgaggcgctccgcatcaaaatgggcacaaagtgccaaattatcgaccaataaatgaaaaatggcaattttagaaaatatcggaaaaattttttttaaaaa

SEQ ID NO: 11292 - DNA, 1822 bp, Heterodera glycines
atcattagtggtggtgaagacggtgttcatgttgattttctttgtccagtgagtgttcgggttgctggaatagcatcattaaaaacaatttccaaaattatataaaattttttaaatgccagccaacccattttgtttgaaaatttaagaaaattttcggtggaaaacgaaaggctcccaacccgctcacccatatttggcaaaatttgtgaagaagccgccgatgatgcgcatcatttgcttgtcatcccaattcggtcgaaatttggcgtacaaacccttgcccagcaaatagcgcgcgtcatgacaatgggtggcagctgaggggggggggggaaatgctaaatttaacacaaaatttttggatttttaccgaaaatcgattttaagaatttttttttatttaaacaatgtcgagtgaatcacttgtccggtctctaatactaattcatacccgaaatatgaaaaattcataattcaaaatttaaaaaaaaatcataacaaaattttaacaatttccaaggtttcgtatggacgtacattctttccgaaattccccccccccccaaaatgccaaagcatggactaaaaacggaccaaaaaatggcattcgaagtccgacaatgccaaagccgtcccggttgtagtgcatcatattgtacaggtaaatgcgatggttgagcgacgttttgccggcaaacattccgcgacaataccgctgcaccgcattgttcatcatcaggtcactgtgcatctgttaatgtatttttacaattaccgtatttgctaaaatacagtacccacacgcctaaattaagtgatacacccccttgaaataaaggaattcgagttaaataaattaattattccctattcgtcgcccaagaaaaaatatgaaaaatctgggcgctgatcggtgatcacaaatagaaatttttcaaataaatttttgtttcaaaactttgatgaaactactaaatttaaaaaaaaatcgctgaaaaattttcaaaaatttctttcttgaaatttcttataaaaaaattttctagatttttttttgaaaaatttctaggtttgaaaaaaaaatttttttttggggagggggggggggggggtgaagtgcacgctctcctctgctaccttcaaaaaggcacgggccatttgctgttgttgtggttggaggtggtggtggtcctccgcctcctcctcgcctggccccatgccattgctgttgtgtgtgtgcacatacagtgcgatgcactgctcgcgaagctgttccgcccccgcaattgttggcggaatgtaaatttgcaaatatttacgcatcgacacgacattggcctgacgacggccaagcgcagctgttgagacagagagagagagaggagattgcattgatggaattattgggcaaagtaattatgtaattaattggatcggaggctacctacctaccccagggacgggagggaaaattaggactttttcgagttcagcatgttatgggcctggattgacaggataccatcctgctggttggtacacggctgccatgttacagagtgcaagactacgatgcagagggttgtagatgcaaaaaataaacagaaaatgttttctacctgttagaaattttgtctattattgtgtttataattgcgcggccataaatgtttctagaaaagtcgtaaaaagaaaatgttaaagaagctctgcggtgtctgcagtgcggtcttttatttatttttgtttttggcattttgacattgacccagtttccagcaattgtcatcgtaaacattgtatccatccatgtctcaat

SEQ ID NO: 11293 - DNA, 1492 bp, Heterodera glycines
ttatttcgtttggtccgccattgactcggccattgccagcgtcgcccattcgctgaagcatttggaggacggacgccaactgctggaccgttttgagcactttgtgtgctcagtggtggaacccgtggcgaccaaattgggctgggagcccacggatggcgaaggtccgttcgggtcacgtcacttcatacttcatccccccttcccccgctaaaattttctaaaaaaaaaagattaaattttttagcaattttttggaaaaagtcagtatgtaagtcatcataaaattaattggaaaaattatgaatatttcttttttttcattgcaaaatattcagcgccggtagcaaaaagaaggaatttgtaaaaaaaattcttgaaattttcattgcattttttaatttttcaggggtatgggaaacgacggagggatataatggaggggaaacgacctgctccgggaatttgtagctattttttgtcaaatttgtccatgttttcttaaaaaatattggcattttcatccccccccccctgggccacgggcctgctgccccacattctgtcccccttttttagacattcatgtcggccgtcttcgtgccctgctgctcaaccgtttgtctcagtttcgccatccgccaaccgtccaaatggcactgtccaaattcaatgccctcgtcgaaaagggcgtcgaagttgtgccggacttgcgcggactaattttccgtgccgttggggcgacaaatgagccgaaaaacattgcggcactcaagcatttgttggagacatccaactactctcaagtggagctgtcctgcatcattggcaagaacaaaatttggggctgacacaagggtgcaccccaaaatctcgccgtcgaattttataaaaagcctaggcctaacctaattgtaagcctatgtgcgagttggccattacgccgatttttttttcttgaaattttcttataaagaaattttggaactttcttaatttacaatttagaaaaaaaatcggcggcgacattttgtcccgtccccctcacacaatgccatggatttgcatgggcacaattcatgagtatcatggtactataacgtattcccctcttttttcagcgcttggccaatgctcggacttgaaaatgctcgaggaaattttcgactacggcgccgtgcagggcaaaatccgggaccaagacctggacggactgttctcgggcgcgcaaatggcgccgatggtttgctgccagcactttgcctgggacttcttcaagaacaatgtcccgctgctgctcaaaaagtatggctccgtcaacaacaccatgttcctgcactgcatacaaagcacggcttccggcttctgttccagtgccatggccgacgaagtgacggtgggttggggcgagtttggcaggtgcgcttcattcccccccccccccccccgagaaataaaaaaaattctactaacttagaagtgtcaaggaaaa

SEQ ID NO: 11294 - DNA, 1683 bp, Heterodera glycines
actttcttaatttacaatttagaaaaaaaatcggcggcgacattttgtcccgtccccctcacacaatgccatggattggcatgggcacaattcatgagtatcatggtactataacgtattcccctcttttttcagcgcttggccaatgctcggacttgaaaatgctcgaggaaattttcgactacggcgccgtgcagggcaaaatccgggaccaagacctggacggactgttctcgggcacgcaaatggcgccgatggtttgctgccagcactttgcctgggacttcttcaagaacaatgtcccgctgctgctcaaaaagtacggctccgtcaacaacaccatgttcctgcactgcatgcaaagcacggcttccggcttctgttccagtgccatggccgacgaagtgacggtgggttggggcgagtttggcctgtgcgcttcattccccccccccgagaaataaaaaaaattctactaacttagaagttgtcaaggaaaagcctagagtttttttataaaaaaatctaagaaaaaatagaaaaatttttcagcgattttttagaattttttgaaaaatcttagtaattccccacaagtttttcgaaatttttttcttctacttttttataaaaaaaactttctaatattttttcttgaaaaatttttaagttagtaattataaagaaaatttctcgggcggggggaaacgacggaggggaaatgagttgctcccgacactgagataattagcaaaatttacgaaggtttcttgatggtcttctccaaaaaaaaaaaaaaattttaatatcaaattaaatttgaaatgcaatttaggcgtttttcgagaagaatttcgacgaacattcgctcaaaattttggatcggcccctccgtcagatcgtcgagtcaatcaagatcaaagagagtctgctgaagaacaatgcgccggatttggagaaatatttaaccgaaaataggacggcaattaattaattaattgttaatgaatggccagcggcggatattattttattattattatgtgtattgatcactcatcatttcattttgattgttttctttttttgttgatgaaaaaattaacatttatttcactgctttcggctgttcgacggttggcgatataaaatgcagatttcttaacctaaatttgaacaaaaatcataaaaaggcgctggtctccccctttttcgaaatttttttatattttcaaaagtaatgaaaagatgcttccaaggcttttcgggatcgctgataacggatccggcatctattttggccaattccgaatcccagacccgaattcggtacttgtacagtttggaccacattaaaattttttgttttaatgataaaatgagttttcaagggttttcggggttgctgatcacgaatatgacatccatctgaccaatttcgaatcctggacccgaattcgaacaaaagtcgaaaaaaatgttcaccaaaatccacctttgtccaaaatcgattcaaatgcatgaaatggccgtgaatgcctattttctattcaatttagtgtgcatttgaatcgattttggacaataaaggtgcattttggtgaaaatttttttccgacttttgttcgaattttggtccggggatcgaaaattgatcggaattaatgtcatattcgtgatcag

SEQ ID NO: 11295 - DNA, 1078 bp, Heterodera glycines
gagcagcgacacccgaatacgcctggaaaacacgttttttaccagtaaaagcaaaaaaaatctttctatgtggtccaaactgaactccgaatcccagacccgaattcgaacaaaaaatctaaaatacaaaatgttaaaaatgctcgcttttgttccttctatcgaatttataggtagtttagtttgaacatttgtaggaaaatgccggcgttcaacggcatcccaaaaacaatcgttttctctgcgattttcgatacgaatttaagatttttgcaacaagctgtaatggggtaaaaaaaactcaaaaaaaaaccatgttgatcattccaacaataaaacaatttttacgaaatttcatgattcaaattgatcgatcacttctcaacaaatttatcctaaagacataaatattgtataacacaaaacaaataaaagttgatcattacaataatatgggctcaaattcgttctccaactccgcaattcaattagatcgatcagttctcaacaattgattcattcattcacttctgctgttgatcacttgggccgggaatttcgtcgagaagcctaaaaaagtgaaacataaataaatttggatttattgaaaaaatattcgctgacccatcgccgatgtcatccacaaaaataggacaaatgctaattcgattccattgaccataactttgccataatgtgttaatttgtttgcgataatcttctttgataataaaaggagggttcgaactccggcgaagaatcaaattaattagtaattgtccgctgcggccatttccgtccccaaaagggtgcaggcggatctattggtataaatgagttagttacttgaaattctctcaccccctaggccccattttaactaacaaaacttaggaaggcttgtgcagcaaatttttgtgtaggcagattagtggcatcgcataaattcatccatttgaccaactcttccactccgtccttcactttctctcttttcactccactgaaattcattccctccggctcatatgccccatactcggcgacggaatcttccaacccaaacatcgttctcaaa

SEQ ID NO: 11296 - DNA, 4171 bp, Heterodera glycines
tgtctttttgctgtacgcttgtatcattatatcgaccataaatgtgataagatgtgtaaatgcgatgcatgtttcgactttgttgtccatttcaagtcgtgcaataattgctacaaaataaaatgttacagtaacagacaaaataatttcgtgattcatgtaaatacatattaatttgaaaaaaaaacattaaatatttggcgctaattaagaaaattgtggcttttgattagaagaacaaaatattttattggattattctgcaaattcactttttaagtcaaattttaaaaaggcgtaaattaaattttacaataattaatacttgcataaaattacatcaagttaaattttctaattcattttaaacccatattttatatttaaaattctcccacctaataattgttgttgaaaaaggtccataaaatgttgcttaagcccatactgggcataatttgcatgcatttcgccaagatgtacacatgcatcgtacattttatcctcatccattttgtattcattgatcagtttatcgaaaaacttgaaaattgcctgactaaaaattaaataaatagataatttataataaacttttatatttttaaattattatcatttaaaatattttagaatttttggcattttcaatttgattttcataataaataaatttaactcattaagaaaatatggtatgaactttgggtataacttattaaattttatatgtttagaacgcaacaattttgtataaggtcatatatatcgaaaaaggcaagaaaaactatataaaataaagtttactcgctccgatgggactcgaacccacggcgcccttccataccgtggaatgctctacccgactgagctaagggcaactcctctaaggggtcctcccatgccctttatccgactttctcccacactccaattccttctttcaccacatcaaaagaaacatttttttaaattgatttttattaaccaaattctgttaagttttggccattttgtcaggtctctatagcaatagtggccgcacgcgataatttcgttcatctttgggctcgcatgaatgcaataatgcattgccttgtggaacagatcgcttcgacttgtcacaatgttattgtgccaacacaaataaattctggtaaaaaaaaaaattaaaaaaacaatattatattgatgtaaatatttttttctaaaaattaatgagccaaaaattcttcaatgccatgattaattaataataaataatcaaatatatttttcttattatttgttaaactaataaattgacgtacaattctcggtcttttggcgacaaaaaattagtgtccatcctccgttcaggcaaaacaattgcagtttctgtccttggtttgctgagcatttttgtcagcgttcgtttgttaattaattgtcgtttgacgaggatcgttgtattaactaaaaaataattaattaattttaattaattctttattttatttttattactcggccgacgcaaaattgcgacaaaatcattggacggcggcgaaattgtttgttctcttgttgaatcagaaattaagcatgaattgcccattttattttaaagatttgtttaaagctaaattataagaaaaaaatttatgccgattaatcaattcaattagtaacaatgtgattaaaactcacaaaaattttaactgtttaaatcaaggttgtgcaaaattattgtcatcttttcgagactcgacctataagagtcgaaaccgagactacaaaaaatgccaacaaatttctgtagtttcgagtgtagttgggaacaaaaataagtttttaaaagtgtccaaaaaaaattttggttcgcattcaaagaaataaaaaattttgtcatcacggtagtgacgagtaatcccaataaattctgagcaaattgttaccaaaattaacactaacttttaacaaatacaaattttccaaaaaaacttctccccccacccgctcactgcttataatgggcctaggggttaagcctgaattatgagactattgcatttcaattaatgcttcaattctcatgtgttttaaataatctgaaattataaaatagagggttggcaattataatttattcccaaaaaatgaaaaaaaaatttgtcctttcattttaatggctaaactcagaagatgggaaaactgaattcaatattttgtacttaatgggaaaagcaattaacagtaaattatttcattcatttatgtatgggaaataattgttagcgaaaaattaaaattatgaaaagtcacatttgtttaaagaatagcgcctttaaatgtgggaaatcagtgtgaaatttgataaatggggaaagtgaccgaaattaaaaaataaaattaattttaataatgacaattcaatttgataaatgcaggttaacatcggaaccaaaggtagatgaccaaatcaaattattaattattcttgaaagattgtgtaaataacctaaatttgcatcaattatgtatagatgagtgaattattgtttaaaaaaaataaataaaattgttaaacggaatttttaactcaaatcgaaaattgttcggagaaaatgctatttttgggcttctctcgtcataactaagcgcaaaaaaaatatgtaaaacataaaaatccgttctcgacttataatggctgatatcataatttaaattatgtaagaaatttaatttttttcatttgaaataaaatgttttataaaaataatagtaaaaataaaataaaaaatttttaaattgatcaaaaagcccataaatgagagctttttctattttgtctttaatctattttaaatccaaaattacatggaataattgccaattcaattaatgcttccatttttgttgtgaatttacatataaatatatcaataatttaattacgcacatgaatcgagaatagaatcatttttaaacaattgaataaaatagctgaccatttattctttcaattcaattattgaaaaagtcccaaaagggggaaccctttggtttgaacatttgaaatttgaaaaatgaataacttggcttaaactagttcaaccggtataaactttttttcttaggctcgtaatgatataataaattatttaaaaataaattcaaccattggtgcacgttttgaaattgtggcatttatgcccccgaaataattttggcgcctagttttagcaaatctatgcgcccgctgttgattttttaaaaaattctaatattggccatataacggaaaagtaccaaaattttaaaatatcccggctcatagtactcaatgaatgtgtaaacgtttcgggtgagtcagaatggcataaatgatcatccataagcaaatcagcatttaattgaataagattgtttattattttaatttaaaatttataaatttaattcaaaacaataccgttttatttagcatttgtttacaaaatgaaaaagattcgtcattgtcaaaacttttttgtttgaaattcttttaaaacattttcgaattagacattgaaaatttggttgtaaaattgaaagttcgatttagtggcggtgaaatggtcggcggcgaattggactctaacccgctaaatgagcgccatttctttcagttctctttcaaccccttctcaaaagccagcacttggccacaaaatgaagtgccaatgattgacaacaatgctaaaaataaatgtttattttatacgaaaagcatcaaaaaaatcacaccgattccaagcacaacaataaatgacgagtgcacaatgtcggcacaatcacttccaatgtccgaaatattaataggcacaaatatctcttaaatgaagaattctgatttaaattggataaattttctattcccatatattaatcatgattgcgttggaatttataagtgagatacaaaaactataaataaaaaacttttttacatatttttcaacaaaaaaattactaaacttttagattatcgaattatatttttttgcacaattatgaacacgtttggcacctaaaaattttataccgaatttggcagcacttaaaaaatgaatcccaaatttggcacttttggaactaaaaaatcgcattctccattaatcaccaagcttctgctctacaccatttttgc

SEQ ID NO: 11297 - DNA, 2738 bp, Heterodera glycines
  unsure (1)..(2738): unsure at all n locations
ctctccttcgttgtggctttggttgttgtcgttggcaaatccacaaggganatccttgtttcccgcatatttttcccgaaatagtgcaaccattgcatttgtaaccgccattcccatcgttcaaataactttggatctttggtttgagaatctctacatccatcntgggtctcccagttttttcctgacaaaaatctattgacagccaaagtgccacagttcggcacacgatttagggttgtcataagaattgcatgaataataggtcaaataacgatcaccaccatcatctgaaccagagaagaatgatgtcacccgattttggaaattaaaaaatcaatcaattaaatggaaattaaataaataactttttctctgtaaatgtttccattgggacaaaatttctaaatggaacaccaagcagaagaaagaaatcttaaacctcaatttgttttgttttttgatgtacaggctttatttttgggttcatagaattgccatttaactacaactccgtcactaaatacgaaaaattttaaaacacgtatataagtaaatttttctattcaaacggccataaacattcacaaaaggacctttaaagcagtatgttgtaatgcaatgctgatggttattaatacagttcatcaatttgtcatgatatttgtgttccaacagtgtgccaactttatatacgcggcaacattgggcttcttaaagaaaacgtattttttcatttcttaaggtgttgagagcaaattcaaaaaatattaaattttgttaaatttttcaaaaaaatttttgtaatgaaaaaataataatttattttatacaaaattaatttgaaaacgctattttttaattcttctaagttgacattttttaaaatttatctaaaaaatagttgttagcatgagttctcaagaaaaatgaagcataacagctcaagagaaaaaaaaatcgtcttaaaccgggttttcttaaactcaaatcattatttttttttaaattataataatgaattttctaactctaattgtaattaataattctataggtttcacttttttcgcttttcgctttttatttttctctttgcaacatccctgtaatatacccacttccgtaacattcgttttcaatgctttcaataccaatggtgcagagcagcagaaacagaagaaaatagttcattaagaataaatttttattcttaataaaaagaaataaaataaataaaatatttaataaaaatttgtgtttaactaatgaaaatctgtctctgttttttgatgttagcacagttttgtgttaatgaattcataaaaatgaatggtatgaataatttacttacagtgaatttattttttttattttttcgcagaataattatctgtcataattaacaaattgctggaattttagcttacttaatgctaaaaaaagaatgtgaattataaaagtcaaatcttttatgaatattaattacaaaaaataaatgaacttattattttaattgatgtctaaataaattgagttcgaattaattatgttctaaattaatgatttatttcttattttttcacattctaaaaatattttttgaacatacattttttttattaattttcatttaaatattttaattattaatccttttaattcaataatattttgtgttttaaccagttaaagtttttttttttttgcattttttaaatttattgctctgtttttgttatggtatgatgttaaagttgattatggtatttgatcaaaatatttcttaatgttttttctttcgtcatttcgtcgccgtacttttcttttcacttcctccaattatttctgccatttgacggatttgcacacaaacaccaaaagggcaatgatgccttggacaaacagaacgccaagaacagaaaggacaacctgaaaaatatttgattgttatatcttgcacaaggaaaagcaatgaactgaatggtgtttaaagaaatttcataaaaaaacagaaggccctaaaatttgtttatctagaaatttgtctaaattcgggaattcgaaatagcattttgtttttgaaataatttgaaatagggttaagccccgagccctctggggcaaaaagtcggggcgtggacctcgggggacgacatgtcgggtgtcggggcggggaataggcccaaaaatgtcggggatcggggtcggggaccggggagctcggggtcggggcttaaccctaatttataccattatttatcgaaaggctgcaaaattatttctttttttttataaattatctgattgggtaaaaattataatatttaataggtgaattaaaaatgtaatattttaataataattttattctcctgtctattttctaaatcgttctgggtcgttcataaaatgcgccaatttatcaaaattttcgacaaaacatggcgcatatgctatctagaaaggaaaacacaacggtttgattgtgataaacctttttgtaattgtttgtatgaagcttttgaatgcctattgacaaaagtttttgtctttactgttattttaaagactttttcatgtttagaatctgttatgctggttagtttatatttttggaaaaaattttaaagaaaagtgaaagaaggatttttgttggatatttctatattgaaatgaaatcaatattttaaatttgataaataaaaataatgtttgtgttaatttattttctatta

SEQ ID NO: 11298 - DNA, 2304 bp, Heterodera glycines
  unsure (1)..(2304): unsure at all n locations
aaatgactggaagagtaaataatacaaatattagcaaatgctttaattataacaccgtcatggcccaacgaagaacccatcgtacacattgttttactaaaaatgaaagaaatgaaataaaataatcaatgatttttaatattgcattaaaaagttgaaaataaatttaatattgtcaattaattaagaaattaattaattagctaattactcgtttggttgcgccagtagatttgtgtacaacaaatagattgtgtataacggataaagcacagaaagaatgaagagaacggcagaataaaatttggcatttctttttctatacctaaaacaaattatgtaaataagataattaatatttctttattatgacaattaaaacaattattattatcagtttaaaaactgaccaaatgggaaagaaaacgcaaagcaaacgatcaaagccaatggcaaacatcaaagtgaagatgtttacgagaaaggcaaacagaacggattggaagcaaaaacatgtggaattggagaagaagcttcgctggtcggaggagggccacaaaagcacagagagagggaggaaaagctcaaaaaagccgaaaatgctggacaagcgttgcaaagcgatcagaatgtgacaagcgttgtgcaatgagctaaaaatggaaaataaataaatacattaataataaattaattaaaattgataaccgattttttatggtcgtaattattaaaaaagtttcaaaaacaatgccacaaatgttaacaaaggcgttaatggagaacatcaaaagaagcgggacagaatgttttgattcctttaggaattgctaaaaaaatatttatttttttaaaataaattaaatgcttaccaaatccaatccataagattcagcagttgttttttccattatttttttttaaagattcgatcgcttgcttgaaaattttttttaaaattaagcgttcatcataaagcaaggaaactcagcattatttatataaacgtttttcatgaaattgttaattgcatttctttttgcgtgcccacgcaatggttagcaaatctaaaaagtgtaaatgacgtaatatttatttaattctatttaaatttaagagtagaataaaaccataacttagctcaaagttaataaaattaaacaattttggtattgagccatagaaacgtcattaaatttttatatgaccataaaataaaacgcatttaataaaattaaataattataataaaaatttaaatgttactatcattgatattttgtaggttcgataaatttgtctgaagaatgtccatttttagtttgaacccaagcattacgaaacggcactttaaaaaaggcaacatactaataaattttaagaatgaaggcattttccgttttgtggtcaaaaatgaatatcgttagcattttaccctttttaactgagtgaaatttaaattccgcggttcaaataagcctatcttaaatagtcaagtaattatgttctcattaatactcttttaaaaatgctaagtcatttgaattaaaccttcatttggcaattccatttatataccacaaatatgatacctttttaacaaattctcattaaaagataagctcaacagtcattattttatacaattttacaagacaaatttaaacatggcaattaaaaattatttaatatttcctgtaattaaaaggaaattcttgacaaaaaaaaatcaggaacgttctatttaaaattggttcaagttgaggtgcaatattttagaattgcatatcagcaatttgcacttttcttttaatccatttttactttgttttgatcaaatttccctataatttcactttttcattgatcacccaaccaattttatcaaaataaattggaagtattttcaattgatcacatatttgggtgccaatttgtcctcgtcgctttttgatcaatttgttttttattaatgtttagcccaatgactccaattttgcgtgcatttccttttattgttttgctttccttcttttccttccttttttgatatttttttacatatttttgaaaattttggctattttctgtttttttttaattttctgtcagtgaattaacagaaaataataaatttagttttctttaaaaaacaataaaaatgacagggaccttttaatgtttttttaaaattgagcaataaaaataagccatgaattgtacaaatgcatttaaaatgagttttcatcaccgctttttctccggnagatttaatttttgccaatgaaagatgcctnntggcat

SEQ ID NO: 11299 - DNA, 2262 bp, Heterodera glycines
  unsure (1)..(2262): unsure at all n locations
cattaaaagataagctcaacagtcattattttatacaattttacaagacaaatttaaacatggcaattaaaaattatttaatatttctgtaaattaaaagaaaattcttgacaaaaaaaaatcaggaacgttctattaaaatggttcaaaagtgnaggtgcaatatttnagaattgcatatcagcaatttgcacttttctttttaatccatttttactttgttttgatcaaatttccctataatttcactttttcattgatcagcccaaaccaattttatcaaaataaattggaagtattttcaattgatcacatatttgggtgccaatttgtcctcgtcgctttttgatcaatttgttttttattaatgtttcgcccaatgactccaattttgcgtgcatttccttttattggtttgctttccttcttttccttccttttttgatattgttttacatatttttgaaaattttggctattttctgtttttttaaattttctgtcagtgaattaacagaaaataataaatttagttttctttaaaaacaataaaaatgacagggaccttttaatgtttttttaaaattgagcaataaaaaataagccatgaattgtacaaatgcatttaaaatgagttttcatcaccgctttttctcccgagatttaatttttgccaatgaaaatgccttggcattccgtctgctctgctttccttccgctcaaagaacacgcgaaaagtcggggccggccaggacggccgcggttggactttccgcctcctgcctcagcagtttcggcctgtccgactccatgcgacccattcgctccaaatgttgtgccaccacttgccacacgcggttggcacggaccaagccaatcactttttggatctcgggctgcaagaagcggtcctgctcaagggcactggcaaaagggcagagatttgagaaaattagcctcaattttaaagaaatatatccgtattttcaatatttcgggggattttaatgatcgcaaaaaatggaattcctccccaaaattattacggagaaacgctgcggacgaggtcgtacactttttgcaatgcgtcggtgcttttcaatggcttcagaaattccattccctaaatttcgcgtaaatactcaaatatcattcaaattcattgtggggttttcattattattagacacctgacaagctgccatcagttccatcgcaagcactaaaaatggggtgattaggttttatttctgattcttcaaaatgcaaatgcaaaaatttcggtcttttggattttcgaaaaccgatgtcagatcagatcaccatagttttgggttagcacctgcttcggtgtgttcaacaattttcagtgcctttcgtgccgaaaaaccgcccattgacacgtggtcctcctggttgcaacttgtcggaatactgtccgccttaattttagcagtttcacattataacaattgttttttaattgctatagggccaacttcatgaagcataagacggtgttaggtcatttattattatttatttaacttatgtataaaaagttttttttaatgaaattagacaaattccttaatagcatttttgtatttttggcagtttttaggaaaactattaagcattaattatgactattgttcctggccttcttttttttggattttttaaaaatttactgatgatggatggcataacactttgttctcggacaccaaacttgcggcacacaattggaccgtcatgaagcccgagttgagtccgccgttgcgggtcagaaaagttggaagcccactgagttggtggttcagcagacgctccagccgacgctcactcatctgggccaactcgtgcacggcaattgccaaataatccaacacctaaggcaaaaatggcattttaattaattagggacaattaaaattgtaatttcaatgctaatttaacccttacttttgccggatattcaccgtggaaattgccgcccgaaatcacttcttcaatctcagaaaacaccagtggattgtcggtggccgagttgatctccgtctccaaaatacccttcacaaatgcaattgtgtcgtgcacaactccgtggacctgaaacacaagtgactgctcaaaagcaatcattttaattagtaaaagctaattaattaaattaaatattgtagatgaggcaaaagaacatatcaatattatttcctaaaagcattggtttctgaatcaacaatattcaaaattaag

SEQ ID NO: 11300 - DNA, 5069 bp, Heterodera glycines
aattttgcctaaaaacaattttttacagtgaattgccaccctatgttgctgcacaatttggtgttgacattcaacctcttccaaatattggaggactacatgtttttgactcgtcccaattgttcgccattgtcaaaaagttggtcgacacgcttacgtcgttgacgccaccacaacaactgatggacccaccagcatttacacagcttcaatgcaattattggcgcgaacggcttaaacaagtggcggtctatgtgaacgcgctgcaaatgttcctccagttgacggtcagtttttgtgttacctattttttgaagccgcaaacttggcatccgaaatcactgtgaagttttcccccgtttcgttttcccccgcgtaatttttttgaaatttttaaatagaatttttcaaaaaaaaatttaaaaattttttcatatgaaaaatacggaaaaaaaatttttagcggttttttgggaaaattttcaaaggtttttcttatcaaattacagaatgccaagtcgtatgacactgatcaacttgtcgctgttatttgttgtgcatcctttccgttgtcgccatgttcatcaacatcaattctgcgccaaatctgtgccgttcaccgtgacatttccaattctttgcttcaattggagcccgaaaagactgcagcgagcaatgatgatgatgaacttcccaaatcgactgtgttccggtgttggctgcctaatcttgacgtaagagacctgccaaacctagtcggttccaggccaaacccctcatatccataaaaaaaaaatttcgtgtattgcaccaaccggcaaaaccaacttttttttttggcctcaaaatatttttccggtacaatttccaaaatttcagtgacgcgggagaatagaatacattttagcaggccttttttatttcgaaatttttaaattttgagaaatgcctgtcggtgtcgatagccactaaaatttgcaaaatgtttcaaaaagattatatattttttttgggggggggggaggagttatgccaccatgccccttccccacatggattaagctaatttagcatagaattttgagtaactttttgctttcctttttgctgcagcaatttcaacacaattttgttgaccggttgcgtgaagccagcgctcatttgtcccaagcaattggaaatgttgccgaggatgctttgtgtttgttgcggtggacgaacaccaccaccacatcacgcgcatatcgtttagatgttgtccaaggaaacattcacaacattttgaccaccatttcaaccctcaaaacattgcttattacaacaaatgagcgagaaaattcttgtaagaaaatgcaattgctcagcaatttttgagacaaaatttgccaaaatttttcataaaactaagagattttttcctcccttttcagcatttgattccacgctgtcagaagtgccatttctgtttgtttaccccgacctggtggccccatatttgcatgtgctcaatttgctttcaattgcactgtccgaacttggtcgacaaattgccagtgcacagaacattgagcgtgttggtctcaattatggcttttcacatgtaatgttttttaaattttctgtttatccccctaggggttggcacccttaaaaaaatttttgattactttttttttttaaaaattactatcaaattgagtacatttgccgccaagaggtgtccacccaaatttttcgggaagctttcctttttggattttgaaaaactgctatttttcgggatttttttgagtcttaattttttttatttcagtctgaattttacggcttgaatcaattgcttcattgctcatctcaatctgctggcgtcaatgccgccaacaatgactttgccattgacgtccaaccattcatccgttggctgatcactgatcaacaaactccgctgaccgcttccgatcgcctgccaatttgtctatggtcaattgctgcgccgttccgtcgtccattttcccagtgccgtgccgatgtgttgggatggattttgcatttgtgggagcgatggcatgagcaaaatgcaaaaatcaaagccaaggagaaattggtggtgaaacggaagaggaaaaggaggaagcaaaatgatgaagaggagccgggaatgatggacgagggaggagatgagtgtgttcacatggaatcagatgaccaaaaggtagattctaattgctttttttgagtgtgattaatggtgcagaactgtaatgggtgcgttaagttctttcctccataaattaagaaaagttttctaacttgaaaatttttactaaatttttttttgtgtcaaaattggatgtgagagaggtgtacgtacgttcccaagaaaattcctgcgatgtattctccccatcttggtttggttttgttgtaactcgaaaaaattcattcctaattaaatatggattcgtgatttttaagtctcatttgtcagcacacatttcgccgttattttgcctaaaaaaattctttaaccatttcagctgcgcgatgcgtaccttcccgatttctcaaattccgcctctgataataatcacccgacgtcgtcccatttggatgccgccgccgatgttgttgttgaccaattttcggtgtccaaagatgaagtccatgatgcgttgtgcaacctcttcaaaacgctgtcgtcaaatgaagatgatgaagcatttgccaattcttcttttcatcctccgccttttatgcctcttttgtgtgtcatcggcaaattggagctgttcagctcggcaacaaaccaaacggagcatgatgaggatttggcatgtaagttatcaaggaaaattgagaattttttgaaaatttgtatcaatttttaaaacaatcgttaataatttgcaaaaacaaaacataattccctggcgcctgtcattttcgtcggtttacaaaatttcctttttttaaatttccaaaaacgcacaaaattggccattttgcgtaaaataaagtttttggtgtgctaaaatatgtatcctggttattaaattttccagctttttagaaattccaatttttttttcggttgtcaaattcgcttttcagattcccagctgctttcacttgacaaactgcgtgaacagcttcaactctgtgcaccttctagcactaaatttccttctctctcctcctcaaaatcagcgccggaagtgccaaaagcggcgctaaatgtgtaccgtgacagtgagccgtccgcggtggtcaaatgtgtggaatgtttggcaccgcttcatcagcgtgtccaactgttgttgaacgagtttcccgaaaatggacaactggcctcactctcttcaaccattgacgcatttgtcaacaaagcgtcggccggtgttccgttgatgaaacatgcggcacagttggagagcattttaggtacagaaaaacaacaacattgcctaactttttcttttcatatttcgtaattcgtacggggatccgaggcaattttataaagttttttgcgaaaatcgaaaaatacttgtaaagttgggaaaattttacaaaatatgaaaaaatcaagggttttgtttcaaaaataagaaaattttattcttttgaattgcatttcgttaaaaatttttacaaaatgtgtttcgtttttcaatttcgtaattgtacgaagttgaatttcgtaaatttaaaaaaataataataatattgtagtaaagtgatggtgcttttgatattaaaagaactattccagtggcaccaaatagcatttaattaattgttaaattaaaaatatatacatttagtacgagctgaagaatgggagtcaattgcggaccgagcgcattcaattcgggaacaaatggtgccactgcaggcactgctcgtggaatggcgtcgtcgtgaggtgcactgttgggccgagttggtcaacatggtccgtgctgactgtacacaactcgctgtgttggcgggctggccgttgttcaaatgcgcactggacacactgcaaagtgaggcattgggcaacaacaactaaaaaattatattgggcaaattatttgggcgtttaaattcgtttaacaaattaattttcgttttttgtaaatttccctaacaaaaatttttgtctttaaatctgtattggtacagacaaaacaaacaaacattttctatttcaagttttttaaattgacaaaaatacttttttatattttttgttttctaaaaaaaagaaataatgccatggacgtgaggaggactcgaacccccaccatttttttctgttgtctatctcaccaaccacaaacaaaaaaatatttcgcaaattgagccgctatttctacatcattaccaggaatgtgtcggtaattccgattcccgacatttttgtggctcagaatttctgctaattccttttattataataataatagatgaagaacaacaacaaaatggtgctaccgtcgctgatgaaaatagcaacaaaaacacgttgattttggcctttgttgattggatgcacaatgcgaccgttggcgattttggcgcgcgtctttggactggccaattgctcaccaaatgccttcctgttttggcgccaccaaattgtgccattgttgttggaacattgtgccgtcatatgcgctcaacatgtgcccattttgcgcaattcaaccgaacgctacgggcccatttcgacgaccgttttgcatccgttcagcgctcgttgcacgacttttgccgtgcggtgcgctacaccgacctgaacgtgtggagtgtgcaggacagtgcaaggcgtgcgcacacgcaccttgtccgcattttgcgctcattcaaggtgagtattatgcgtcgattttcgactctctttcctctccattctctctctcgctcgctcgttcatttctctttctctaatgcttccgccaccaatgttgccattttcctcacccccgcccattaactcaactgctctgatcagatttaaggggagagatttgggatttgagtcagttgttgatcacttcacctttttgatcactcaccaa

SEQ ID NO: 11301 - DNA, 3866 bp, Heterodera glycines
  unsure (1)..(3866): unsure at all n locations
ctaaaatttactattgccngaatagataaaattattataattgccttttatatgagttggcattgaccaaaaataanttcaatgggatttggcgtcaaaatntaatcctaaaagttccaaattttgaaatgcctttgaattttaatgccaaacgaaaaaacaatttttagtcaaaacgacaaatttgccctccggtgatgatcaaatgccggcacaaaatgagcagaccaaacaaaatgccgtgccgacaatggcaaatttgggtgaaccggtcaatgtgaagcagggcgggacactgaagcagatcaaagacagcatccaaatggcacagcaacagtactgggcactcagtggccaacacgcgcacatgggcaccgtggaatggggtggcacaaaaaatcgtaaaattttaatttaattaaaattatttaaaataaaaatatgttctattttaactatttaaattgaataaaatgatttgattcagaagagaagcagcaaaacacgaaaaagaaacagcagcaaccgtacaacaacagtgaggacatttcgccaaaagcgttgagcagtaagtgaaaaaaagaagcaaaaataaaaattgacaattaattttcggtccgattagtgctaaaaaaactttatggcccctcggggcctgagtccagagacctggacctgcttttgataactttaaataaaacatggtcactcaaaagaacaaattcgaaaatattatacagaaatttcaggttttttaattgtctgagtttcaacgatcagcataattttcaaaaaaaaacagaaaataattttcataaaatttcttagaaaaatgtaatcgatttttaagggctattaaaattttaaattttattcatatgtgtatgtttcatttaaaatctatttcccttaattggccaaaattttttttagcaaaaattgaacgtctgacgccaatggaaagggacaatttggccaagcaattggtgaacattgaggaccgattgcagaagacggaacgcaaattgcaacaaaaagagcaaaaagtaagcaataacctcacagcgatcaatcagccttaatgatcaatctgtgcatttttcttgtcaatctgtttctgatcgttaataattgacccatccattggtccatccgtttccgatcactgtcacttttctacagatcattgcatttttctatgtatctctgcccatttttctttttttctttcttcccataaatcactttccctccccacatctctctttctctctctctatttgtcactctctctttctctctctcgctcccctctctctctttctatctctcccctcacaaataagtctcttccctttctctctctttctctctctctctttctatctctcccctcacaaataagtctcttccctccctctctcctctctttctctctctctctaatataacacatacacacgcactctttctctctcatataacaatgttgatattttattgtgctaacagcaattgtctgagcactttgtagttacctacaccgaccacccttgctaattccatcgccactgctaccgtatcaactgcaccaccaagcccctttactactgtagttacaaaagcgcaaaaaacagtggaagacatcacgagggaatggtggaaggaaaataaggagaaaaagcacggggcagaacagcaaaggaagccgggacgacaaccattgcattctgacggtggacaaaaagcggttgtcgaagagcttaccgagtcggcagaatttgtcgcatcatcggccgaggaaatgccatcgaatggggtatgtttagggaaaatttggcatgaacttatggcggaagaacaatgggtctcggcataaatcgggacatatgtacatgaattgggacgccctcgctcgcaaagggggactggcgggagggattttaaacggtgctgggacgttagtcaaaaaccatcaaatgaataattgttaaaagaaaattattcataatttcgtctaaaatggatcaaattttataatatagatatttttcgatagccctaagtgttttctattatcctgcaaaatttttaaaaaattctttaagtttaaaaaaagttatgacctgaaaagctcaaaaagccaagtttttttgaacatttttagtcataacttttttgatacttaacgaaactttttggaattttgtaggctaatagaaaacacttagtgctatttaatgatatcaagaattaaaaatttagatgcttttgaacaaagttatatcaaaaaatattttcatttgatggtttttgactaacgtcatagcaccttttaaactaacaaattctttttaacaaaatgtattaaaaattaataaaaaaaaattttctccagtgtccatcgccggcccaaatcttatttctcttaaaaaatagacgcaaaatctggtcacaaaaagatctgggttttattcgagttgcaggaaatgtcaagccgaacatcattgtcaaactcaaatggtggcttcaaaactattgcttcatccgaaattggtggcacacaatcgacggtggttggcacgccggcactaaacagtgccggagccgcctcgcccagcgatggaacaaacagcagcagtgccaaaactgccagcgctagcgcgttgatgatgatgacacaaaaccggaagcggccgtcaccgccgacaatggcaccgcaaatggacaaaattagcaacgcaacgccaacaaaagtgccaccggttgtgccaatgatgccacggtatcagcaggcggtgcgcaatttgaccggccgcccgctggggcggctggacgctcgccaacgcaccattgtggcggtgatggagcagaagcgcaagcagttccgcaaggagggcgacatggcgacggcaaccgctgcggcggaagtgccatccccgcagcagaaaatgccgaaaccgcagcaaaagccgccggaaacgatgccgcagggaaaaaaccgcagcggttcgggacgaccgagcgcggaccagctgagcgtggacacggcccaggcgctcgagtggatgttggccaacatgaccaaatcggtggaggttgtccggcaccaatcgaccaagggaggaagcagcaaaaagttgctggccatggcaaatggtgatgacaatggcgcggagacggaggaggacagagacagggaccagaaccaacacggggcaacggcagcggacgaagtgaattttaaaacaaataaatgatttgtataaaaataaaatccctttaaatagttttcaattataatttcaataatttaaaatttaatttcattattttaaatacattttagtcatttaaattaatatatatattcatatttgttttatgaattgtatatgaattaataattgtttgtttaaaatccaattttttttacctatttaaataaaattaatttgttttttattcaccaataaattaaaaaataattcctatttaatttttttttaataaaataattttcattaccaaattaatttatcaaataacttttcccaattaggtacaaaaacgtcgtccgtctgtcgtttttccgtccaaacaatttgccaaattgcgcaacccaagcggcggcacttccgctgcggttgttgtccgtccggcattggccggagcaaaaagtcgcggcgccgacgcggctggcgatcaatttgtgatggcgacggcacaacgccaaccgcaacaacaacaaaatgccaaaagtgacaatttgaatgtgaacagtcgcgcattcgcgcccggcaaaccgttgagaattgngcctggctgngatgaggaggaatccggcgaagaaacaacagacgagc

SEQ ID NO: 11302 - DNA, 1528 bp, Heterodera glycines
  unsure (1)..(1528): unsure at all n locations
aaagtagatcccaaagtcgggatcccgaattaatcccacgggatctctatcacgtccagtctctagtcgatagaaatttttattctttttaatgccgattgatctgatcaaattttttgttttatttattcttatggctctttcnccgctcgttcatatatttcagctcattttagcaagaattatacataatttttaaagttaatttaatttatttcattaatttttttgttgggtctaatgaaataaaataatttaattaagaaaattcgactaagtttttgaattaaattttatcaaaaattaacatctattaaataataataattacccacaaaacacaaaactcttctttaactgtattataaattttttgaattatataaaaaataataaatttttattaatttttaattgtaaatttcattttttaaaggaattggcacgtgcacaaagtgttgtcggaaagcagcagacgagcggcgagaagcagcaaaaggaaaagcacgcatcgccaatttcaatggaactcgaaattgggcggctccgtgccgaactgagcacgatggagcaacaaatgggacaaatgcgaggccgagaccgaggaggacaacggcaccaaaacgtaccaggcgaacaaccacagcgacaacagaacaaacagaaaaaggaggaggaggagcgtgaagaaatgggaagcaaaagcaccagtggaacgatggaaacttcaacaaaattgaggagtacagcagcaggaattgctcacaaccagcaacaggtgaaatgattaaatgataagagaaacatttagggggtgggccatcagtttggccgcccgaatccagtgtccgaaaccccgcatttttctcatcctaatctcgaaaaccaacccgcaaaactttttttttcatctacgagtcccaacccaaaaattttggcttccctcccgagtctcgacgtttttctcatcccgaaccttggacagcaacccgaaaaattttggccgcctctcgacccgaatcccggtattttttctcatcctaatctcgaatccgacccgaaaagtttggcctcccgacccggaactcgattatttttctcgtccttcggccacattagtggccatttgcctgagtgattagggggcgggagcgcaatgtctggaatatcaaccgtgcagcagaaaatgattgcgtctggtttcgggttgagaaagagaaaataacctctgtgaagcccctccattcataaccctgaaaagaaaagattctttcagggaaccctgaccgttttggtgtatttgtttccgttcccgaagccattccgagcgatcaaaatcagttgacaatttttgtttttcttccgatcactcggctaacaatttttgttttttccatttaatattccattcccatttaaaaaggcaataattcctgcttcatctcaattccattctggctctggtaccgctgcgcgttcaaattctgggaaaaagtcggaaaatttttccgccaaaatggatgggaat

SEQ ID NO: 11303 - DNA, 990 bp, Heterodera glycines
agtccccgtgtttggaatgccggagatttgagtcccacagattgaaatgctggtgggttgagtccccgtgtttggaatgccggagatttgagtcccacagattgaaatgctggtgggttgagtcccagtgatttgaaagcctgagaattgagtctcagagattgaaatgctggtggattgagtcccagagattggaatgtcattgaaagttggtgggttgagtcccagtgtttggaatgcgggagatttgagtcccattgtttggaatgccggagaattgagccccagagattgaattgctggtgggttgagtcccagagattggagaaaaagccaagaaaatgatgcgaggccgcgaagcggccgagccagtcgattttatcattcataattctataacacaatcgtactgcctagcgggggatgcgccgaaggcgctgaccccgctagttatttaaaagtcccgctatactctagtaaaaagcaagataatcttgaaattttatgtcagaatagcactattttacgaagaaaatataagatttgtggcaaaatttggtcatttttggacaaaaatctgttaacaaatcgcattaaaaattaaaaaaattttcccggcggcgcctaccggcaccgccggacgcccctgtccatctcacagttttttcgaaaaaacgctccgcaaaaaaaagcatttttaaaggcaaaatagtcatcgcttggcttttatttgcgaaaattggcctttttggtggaaatctttcaacaaatcagaacgaaattacaaaaaaaaatttccggcggcgccaatcgccaccgcccgatcctctcccctcgccctttaaaaattggaaaattttttaataaatgcgcgatccgtggttcgcggccgcggcaatttgaatgcgcaatccgcggtgctcggccgcggcaatttgaatgcgcgatgcgcgaccgcggtttttttctgtgcgcgccccacccctgatg

SEQ ID NO: 11304 - DNA, 2380 bp, Heterodera glycines
  unsure (1)..(2380): unsure at all n locations
attcttttcctcctcttcgttgcttcagttgggtggcgtttaggaaatttttttctaaaagacttgaatcggcttattagtaagaacattagattcggttaattcaatggaaaataattttctgaggtttttattttgttggagtcgaaaaagttgaaccgcaaatgtcatttttggctgtggccgcaaaatgtccgaggcgcaaatgtccgaccgcatatgtcgggccgcaaatatccgattttcagtaggccgcaaatgtccggacaaatgtcctacaaccgccttggatgagcaaaatgattggcatttgccattgtcaaattatttcatcaaattcaaaatgttccctttaattaggccattgtctccaccatcggaagaagtgggacaatgcgaggaaaaggtcgggaagccgaaccccctgcctgggtccgggttttaccgggatcattaattaagttcgggagtccgaatttcttacatccctggtcctggtcccgtttccgatttcctgaatttcgaattttccaaaatttccttaggtcttctgagccacgggctgttcattgatcagcggaaaagaagcgaattatttgagaatgattgatctttttgatattggtttaatgttcttttatctttgaaatgattacttttgtcgatttttgttttaaattatgctttaaaaaggagaatgaatgaaccaaaatttggatgccatgctcaactcggtcttaaatttggcatttccttttctatttgtttataaaacaatttgaggaggggggggggcacttatcttttgaattttggatgaatgtttggtcagtcaaatcggcaaaagttgatgaaccaagggaagggcacaaaacgttgacatttgctgccggaaaaaatagataggtaattttaaaatgtttatattttaaaagaaatttcagaatctcctcgtcaaaaaaacacaaaattcattaaactaatttttgccggatttctgtttctctttcggttcggtaaacgaccgtgcattaccgtagttgctagtgaaggagtgacatcaggcaactttataattgcatgccttgcatttggcataagaagaattgtgaattttgtcaaaataaaaccaaatagagtctttttcgcgagtcatttggttctaaattacaaaaaagaaaattgtcgagaaaaatgaatgaatattttcttatttttaaaggaatttgtgggaaaaagaatccaattttctaaatctcttgctttttacatcttttaaataatattaatcgtaaaaaacaatcccttcaaaaaataatttgttttaaatggtccaaaattgccgcggagtcccaaattccgcgcatcacgcaaaaaaaaaaatgccgcgaatcacgaatcgcggtcgcactccagccatgggtgggtgccgtgccatctaaactattacctctaaattcccgcagtttgttgctcgtttttcttgaatattgcaggcgaaaattaatttttgatggaatcagcagaattgtcctccgccgtcatttcttctgctcgaattgaaattcagcagcaactgccgcgttcatttgtgacaacatcctttggaaggcatggaatgctgcggtaacactgacaattagcataaaacaataaaattgccaatcgagagggggagggaggggcaaagagttcaaaagtggttgaattaaaaacatagaaaatataccatttaattggtaactgtgaaatgtttttggctctattccaatgtacgcgtccaatcattgaccatccttagtttctttaaccataactcaaataatatacatatacatataggcattgggatatagcattgactggatgtagagctcggaattttgaaagtaccgggaccgggcttagccatttgaccgggaccaggctttgccatttgaccgggaccaggcttagccatttgaccgggaccaggcttagccatttgatcgggaccaggctttgccatttgatcgggaccaggctttgccatttgaccgggaccaggcttagccatttgaccgggaccaggcttagccatttgatcgggaccaggcttagccatttgaccggtaccaggcttagccatttgatcgggaccaggctttgccatttgatcgggaccaggctttgccatttgaccgggaccaggctttgccatttgaccgggaccaggcttagccatttgaccgggaccaggcttagccatttgatcgggaccaggctttgccatttgaccgggaccaggcttagccatttgaccgggaccaggcttagtcccaacaacaatcatgagcgccgctttgggaaatacaaccgaccngaccgattgacgcccccc

SEQ ID NO: 11305 - DNA, 1943 bp, Heterodera glycines
cccccccccccccccccggcgccgtcccccgccgcttacgccccatgaaagcagctgaaacatcgaaaaagcattcatagcgtaacaaaaagatgtgcgtcaaaatcataaataaaataaattgaaaaccaaaatcttctcgtgtattgccttcgatttaaagactaagaaactttgaaaacagcaaaagtctccacgacttttattgctgagaaattggaaaaaggccagtgttcgaaaattgctaaatatatttataaaagatcattttttgaagaaaaatagcaaataaagcgattaattttggcgattgagtaaaagtaggaaattttccattattgaattccctaattaaaccccgaccccgccccgaccccgaaccccgacatttttggccattttcggggttaaccccgaccccgacgcttccaaccccgaccccgacccttaaccccgactcggggtcggggttaaatatatacccctaagaatggcatttttgttaaggaaaggcaaaaaatttaaacaaaatttgaattttttgttaactattttgccaaattatattaaataaagtaaatttgcttttgtttgtccgtttttgttatgtggtatagtcgttagtgcttcaacaataacggtacttttcttatgagtttgatacctgttgatgtattctttttaatttatttttatgtgattaataggattttttaaaccaaaaatacccatcaaaagcaatcattcttgacataatttattgacttatttaacccaattttcctttagttgaaattaaaaattcaatttttttgactaaatcatcaaaatttaatatattttggagagagatcggcggtcaaatgttaatggattattccataatatttttagagttttaattggcacatatccaatggatgcgtcgagacgagataaaataaaatatatttaaacgaaaatagtaaaaatgaacattaaaaatgatcatatcactcctattcatcattataatccaaaatgatcgaccatttctcaaatgcataaatcactttcacataatcggacaccattttcgacgtggagacaaacgcctaaaaattggcacaatttttaaacaaaataaaatgattttttttttgttgctcacccaatgcattcattggcagggaaaaacataaaggcgacagtgttcaaatcggccaaattaacaaattcccattgaaccgcagtcgccgtctccccattttggcaccgtttcattacccatcggttctcctgatgatgttcgcttgctttgatcagtgtcagcttctccatggtccgttcgttagctaattcaaatggcacaatttgcggtgacggtggatcaacaataaattgaattttgtagctaacggaagtggtggcattgagaaatttctaacaatggggaaaacggccattaaatgcaatcaacaaaatcagatgattaacgaagatatggccacacctttttcaaagtgttgatgttgtcccattcgatatttggtggtttcaaatagcaaaacaatcgcttcagttgtccatcttttcgcggagtgtgcaaccattttgacagcatttggccagcagttggaattgcatttggctcgtcaacatcatcagtcgcatcgggcaacaaatagccggaactgattgaattaatgttgagatcagtgagaattgtgggcgaaatgaaacgacgcaaattgtccaaaaggaggccattgccgaaaatgctcaagtggcgaatgctttgtgcaaaaattggccaaatttcacggacaaaaacacgccaaattggctgctggtcatcttttgcaaaaggaacacacaagctcaaattggtgcctttgttccaaatttgttgattggcacggagaaattcaatgacggaatggtcgatgtagctgaaaagggaa

SEQ ID NO: 11306 - DNA, 3786 bp, Heterodera glycines
gaattattaccgcactggcaaattgcactatccgacttcggtgtgcggtccgttgtttgaggaggagttggaatattgggggttggacgccaatcaggtggagccgtgctgttggatgacatacacacaggtggagaatggatgaaatggcacaaaaaatgaaaaacaaaaaggcaaaaaaaagcaatggcattttatggaaatgccaaaaataattttacgtgaattatttcgagatgaaagattaattaataaaagatcaaattttattggtttatttagcaccgcgacacacaggagacactggcggtgttggacaaattggacacggacgaactgaaggacgaggacccgcagacgcaggagcagcaccggatgaagaagttcggctgggaggacgccttttgggagggccggctcaactggtggatgcgcacaaagcgtaaggaccgatgggaagaaaaacagcgggggattttggacaaaaaataaaataaatttaattccaaattcaaaaagaaccatttaaaaactttaatttgggacaatcaaataaaatttgccgattctttgttcttcggttcagcacggatttgggccctcttcgacgagccctattcatccacagctgccaaagtaaaaaatagggggaaattggaaaataaattagaaaaaaagaattaaaaattgaaaattaaattcattatttatttttttgttttttttcctttttttcccctttaggtggtggcttccattagtgtctgtttcatctgcatttccatcttttccttctgcttcaaaacccatccgagctttcgcattccaatccttcaaatttcgtaaaacattttaaataaattattttttataatttatttaaaattttttttttcctttagcaatttgtccgatttctcttcctccccgtcggtgcctcaacattcgcatattcatcagcagcaacagttccattcccacttcaatcagcccattaatgtgcaacgggtcgccactgagccacacaaaatatttgcccaagtaaacctttgaatttaagccgtttaaacaatcattatttatttttattaataccttttaatccattttattttgtttttcagattgaatttgtctgcaacatttggttcaccttcgaaatcctcgtgcgctttgtctgctgtcccaataagctcaactttttcaaatatccgctcaatctgatcgatttggtggccactttaaggtccgtccgtccgtttatccctcaattttctctcttaattaaacactttcaaattgtgccaaattgcctcatttcagcttctacaccgatgccgtgctcgttcggctgttcagggaccaggccccgaaggatttggtggagtttctgtcgatgattcgcattcttcgcctgttcaaactcacccagcaccaccgcggccttcagattctcattcacacattccgcgcatctgccaaagagctgatgcttttggtgagtcattcattaaataggttaattaattgcgcgtaattagtggtaaagcaatgggttttataaggaacattgaaacatataaataaataaaaaatactgcagaaattttttgaaaaaatgataattatcattaatgaaataataatttatgataattttcattttaataattaaatatttttacaataacaatcaatttaattttccaggtgttttttctgattttgggcgtcgtcattttcgccactttggtttattacgcggaaaagacggagaacaatccgaacaatcaattcactgcaagcaatttttttaaacaattattctaagaattattcaatttatagtcaatccccgtgggtctgtggttctcactgatcacaatgactacggtaatgtttcgatgtccgcaaaataatttaaaattcactcatttaattcaggtgggatacggtgacatgacgccacaggtaattaaaaaggaaaagcatataattgagaaacagagacagagttgtattgttattaaaattcatcagtcattggggtgtggaaatttttgggtcacctatttaggctttatagcatttttctttatgtattcccccccccccccctcatctcactccgcgcacccaaatttttgaagctaaaaatattcaccattggtacccctccaagccaaaatcctatgaccgttggaccgtccctggggtatgttctccaattgtaccctttccctctcccctggggccttccttattcaaaccatcattgttccttgtgcccgtcccattcagacttacctcggccgcctcgtgggcagtctctgtgccgtgatgggtgtgctgaccatcgctctgccggtgcccgtcatcgtgtccaacttcgccatgttttactcccattcgcaggcgcgtgaaaaattgccgcggaaacggcgacgcgttttgcccgtggaacaggtgaaaagggaaggaaccgcacacaactgacaacgcataggcactaggaaaaacgcatatttaattaactgactaattagttgctaattggtgggttgcattgcattgcttttgcttaggttcgccttcaatttcggcgacacgcgcaatcgtccattttggagtcgaacactttgagccgtgttacatctacacgaagaagcgcaatgtcaaacgcagctgcgaattcgggtaacaaattaaccaaaactttgactcccgaaattgcccactaattgtttttctctcaattttttgactgatcgctgctttttgctcacatttaggattattaactaaccccaaaggcatggttttgtcccgtggcatttttgcgataaaattttcaacaattttttcagaaatggcaatggaccccaaaagtgcctcgttgatgaagaacaatgtcggaccgcagctatcctcagacagcgcagctgaacatccgccttcttatcgtcgtgccgcgccgccccgctcgccctcgaggaatttccaaaagcgtttgtcgtcgacgcgtccaacacctgcggcgtcaccgacgcgcaaaaagtcattgtccgccattagtgcctcaggcgaaacaaaaggtggggagagacaaaggcaattaaaaaaataataatttattcaaaaatattttctaaacaaaaatttaaaaaatgtgggaaaattgcgaatgtatgcaaagtgtgcgtttgattggtcaagtgatatagacggattggttctgctggtgctccttcctcaactgactgtcccgtttccaacgtgtccaaaagtcgaatgcgtagaggccaaaaccggcaaaagttacaaacttaaaataaaaatatcaaaaaataataattcaaaaagttaccaaatgaaaaaaccacagaggggcgaatattgccttgagcatgttcaaaacggcgaacactgagcctatcaaatacataacggaggccaaagcgcagtaaaattgttcctaagcccaattagatacagaaattaataaatgaataataaatagataaattgaacattcaataaaaaactaccaaaagttggaaattgtaatggtaaaatgcgtccggggcactgaacaaatgtgccaatgccaagaagaaagtgccgaccacgaagaagccgtggacacagacggcgttgaacaactgaaagaagtcgacgacacggcccaaacagaaggggaaaagcggatttggccagcattggactgtcagcagaagggcgaccagaccgcacagctgaagataaattgacattttgacaaaattc

SEQ ID NO: 11307 - DNA, 972 bp, Heterodera glycines
ggataatggccatagatgaaaagatcactttgtggtggaggggcggtgaattgttttgatttgatggtggggggggggagggatgagtcagcagatgatcggctgacagaaaggaaagagcggtcggagacacagcaaaaggaattggggaagtgcttgaaaaacagaaaaagtgggagagaaatagtgaagggaaagaaagaaacaaagaaagagagagagagaaatagagagaagagagactgtgcaaacaaagcaaaaataaataaacgaaaagagataatacaaacttatgataatatttgaggggggtggagggggggaggagcttcaggaaagttctaaattaaaaaaaatggagaaaaaagttgggagagaaaaattaaacagagaaaaaacaatacaaaaaatagaaacaatttgaaaaatatttaaaatataaagaaatgttaaataggtaattaacgcacctgaatgaatcatttgccgatgaatcttaaaagaatcaacacaccatttttaagctaaaaaagaaatttcttaataaaaggtttaaattttaaatttgtaaaaaagcttttcaaaatgttaaaaaatttaaaatatgaacaaataattttttctttaaaatttatttttggattcgtttctcatgtgctacaaaaggagaaaatcaattcgatctgtgcaattttacgtcggaaagtgtgagaagaatgaataaaagctgttaaattgggccataaaaccttttagaacaaaacaaatatattctaaaaataatatgaatttaataataataataccaaatcaataataataaattataaaagtaaatgaaaatttgaaataatatttctttttttaaattaaattctaaaggcaacaatattggtacttttctgttttgaggtcaacataaagctcttattaagctctacaacatctgtgaatgagtttttattgcccatt

SEQ ID NO: 11308 - DNA, 2746 bp, Heterodera glycines
caacctaatgggagaaggacggaatagcaaaagggacggacaaaagcatacaaggcccatgaccaacgcagaacagtcgaaaagcatgtgaaagccatcggagatgagacccaacgaatttgtgaggaaaccgtagagaaactccacgccacaaaatgccaaatttgcacacaaaaaccaaaaaatgcgctgggaatcgctgttggcaagtatttcacggagctaagaattaactaataatttgcacattttgctatctcattaaattttctgaattttcccaaaataaattaccgtttctcggaaaaaacgaataagggaactgaacaaatgataattttaaagaaaatactgttccccaccgcgatgtcttctcgagaaatgcttcgccatgagtgaacaaaggcatgccatcctcggaaatgccgataaaatgtccgccaacagaacgacgagaatcctgtgtcgaagtcaggacgaaagttgctgaaattaatcggaaaacaagaaatatattatttcctatcaaaatgccaaatactaaaaaaataccaatggaaaaacaaatggttgcgatgacaatgcccgcactgatcccatgcgtttttgttgaggacgaagcttcgatccaaagccaagacaatgtgacaccgatgccaaacattgtgatgggagaccaacgcgcaattgccataactaatggagagaacggaacaatgatcaaccacgcccaaaatgacggaaataacggagaggacaaacgaacctgggtctgcgacatgctgaaaatgcaaaataaatcatgaaatttagaggattatttgggggaaggaaaaacataattaattcactataaaatgccatggaaaatcacctgaaaagcgatattatccgcataaaagtcaatgacaacaacgaaagcggcagcgaacagaaggagcaaagggaattccaagaaggaatggataaacgactgaagggaggcgaattaataaaagtaataatttaaattggaaaaggaaagaccaaccggactgaagacgagcacaaggacagcgaacggagtgagcagcaaagaggcgaccaaagaagacaaagcgtaaagacgctttggaccaccaatttcaacggccaaatgctaaaaatgaattgtaaataaaaccgaaaataagaaatggaaatactcgataattggactcgtaaatcatgcgaagaaacacagcaaagagcagcagaagcacacccccctaaaagggcagactttgggcaaaagagttttgaagacaaacgctgtgatcggagagaccgaaccatccgacgaaatggtaaaacacgtggttcagcccactttggtgtcggtgggattcggctgaaacaaagagacaattcaatacaaattctagtaacacagacgcacaatgattagtcagtggagagtcggagtccataatgaaaagcacaacccatcccaccaacagacagaccaatcccctcgttttggccgcacttccgctgccattgacgattgacattagagcaatcaaaatcacgctaaaaagaaaatttttgaaaattcttaaaattacaaattttttaatacgttgggctctgctcgaacattaaaatgctgcgaagtgggccacaaaaagtctgaaaaaataaattggaaaatgaaagaaaaagaaaggcgcacaattccataaaaccagaggatttcgatgagacatttgaacagagacagttgagcgattcggatatgcttaacaatattcgtggctattcataaaattataacttaaaaacccaccagtgactttcggattggtttccccgaagaaaaaggcttttgagcaggcaaaagtactccgagtgatctgaaaagcaatcagagatttagcagtcaaacgcaaagccaaaaacatcgtattcaacagccaaagaaggccgatgacgtggatttgggtggacaaaatgtctattaaaaatatgccaatgcatcgcaaagttttggcaacgatcaacaccagaaaataccaagcggatctaaatgaaattcagaaatgccatctcaaatgcaccgtttgctccactcaccttgtggaagtgggcgcaaatgcattacgatcgtccttttttaaaaaatcatgcgctaacataatcaacgaaaagcataaaaaaaatattaattagttgtgtttaaaaatacctaggtaatactagtaattaggaattaaaggaaaaattgttccaaaaatgaattccttttcagtcggtttcttttcagttacacgtcgtcattgacaaaaaaaaatcaagaacaaaaaatcgaaacagtatttttaatgaaagtattatgattttcttctgcccacttttaataatatttgtacatggtagaaattaaagtggttaaattaactagacaaatcacttcttacttcttttcagtaattatgaatcgttgaatcgaaagtcaatcatttttctcgggaaataaaattttatagtaatacaacttaaagtcggcttaacccaagtaaaaatgatgtgcacaaatggtttgaattatcgaacaaattccagccgtctttccgatcgtttacagcaatggtcaaagcaattcattcaatcagtccaaatattgagacagccaacggaatccctccccatagccctgacgccggagcaccgaacacatgaacatttctaacggtcgcgtggtcaagtcggctcgagaaactttcct

SEQ ID NO: 11309 - DNA, 2560 bp, Heterodera glycines
  unsure (1)..(2560): unsure at all n locations
gacttaaattgccctattggaatgattttctaattggccaaccagtgcaatattgttggactcncaagtangtatttgagctgatcttctccgagtgcattcggtttgtcaattttgttacccaggatgagcagtggagcattggcaaccttaaaaaacccataaaatagcctaatgcattcgttcggacttgttcgtcttgtaaaaggctccacagttcttctcgtgcctcctgaatgcgttccaaatcggcagcgtccaccaaaaaaacgatggcgtccaatgcgggaaagtaactcttccatacacgacgcgcttgcacatgaccacccaaatcgaaagtggtgaagcgaataccaccgagtgaaagttcctcggacgttgggtgaagagtgggtacatgctgagcaatacggtcgtctttgagcatgtggagaagcgtcgtctttcccgcattgtcaaggccgagaaacacctataaattgtccattttaatgttttaatgatcctcattctattagaaatacaagtagaatttaaactttaatattgcataccaatttgccgctttttttggttagtcccaaatagttgagcacgccagaaaaccagtcgaggatccacgacattttaatgccttgaacttcatgtaagataaaattttcaattttgagagataattaggaatgaaccagacaatgatgttaaaaacaaaacgatttatcagtttatatgaagataaatgcttttcaaaaactataacatacaattcaaataaacgaaacttaaaaaaataaaaagaaaaatttgtaggcattaattaggggaatgatgaaagaataaaaacaatgagacaaactgctaaccagcggaattctctatattatttggataatcgagtctattgcgcttcttataaattgtgtctagaaaatgagctgctgtttcggctaaatccacggggattgattcaaaatgatcgttgataccctctaggagctgcaatcgtttataaaggcatttaggtcatgaaatattaattacctgtgctttcgagttggcacccgaccgattaggcaaattgaaaaatttcttatagcgacgaagtgttgtcgcagaaagctcatcaaatcttatctgaatggttcgtttcaatgaaaaaaaattgaattaaatttgtctcaccttaacggttttattgaaaccattccataagtttgaccaattttcctcacaatccgttgtgtgttcatatcggtcctaatttatggtaacggtagaaaattaaaaaataaagcacctgaaaggttcggtagcgctcatagagattttcatattgggtagagaaaagatgatcgaatgctttctcacgcaacgtttcattcgcctctgtttgctcatcttcgctggcccgtaaaaaagcatccacaaattcctgaatgtccttgcgctcatccacttgataattcgttatgtttagcttatatgtctgttcgttaaatttcggtgcgttcataataaatttctgatgcgtttgacaaatcattccatcactttttctcttaaaaggaattaaaatattatttagattatcttttgaaaaatgaaaaactgacttcttcgtaaatgtaaaaggggtaatttttgcgttttgcaacagtgacatgccatttgttcagagggatataggccagcctgcggcattcttcaaacgttccatcggcaagtttggtgacaattacacactttctaattctttcagacacagccattaatacactccatccatttaatgaccagatccaattcacatgcgaaatataaaaaaatgattaattgaaaatttaaaacaaaattaagaataaaaatgaatcaactctatcaaattaatttttttatctctttgtgttacctatttcagcttctttttccatatttctctaattaatttttcttctcgtctcacagttcacgtgtaaattttataatttaaagaaatttacaggcaaatcgtttcgtaaataaatcaattaggatctttgttatctgcagatttgcaattctaaaaaccaataaaacagactactaaaaaaaattcttagaaaagcttaaatacgcataaaattcctaaaaagtatgtttttcttgagttgacagacaatgatacaatacgatttactttcataattggcagttcaaaaataggcaaccgttttttaggtgttattgaaaaattattattacaaaggaaaaatggctgacgcagctgctcaagaacaaaaaaagaaacgcacttttcgtaaatttgtctatcgcggagttgacttagaacagcttctggaaatgaacgagtgagtctgagtcgtgcttccttttcaaggattaatgaccttttaggaagcaattcaaccaaatgattcccgcccgtcaacgtcggaagatgaaccgcggattgaaccgaaagcacaaatctttgctcgttcgtctgcgtaaggcaaaactcaattgtcccgagctgatgaaaccggagtgcgtgagactcatttgcgtgatatgatcg

SEQ ID NO: 11310 - DNA, 1071 bp, Heterodera glycines
  unsure (1)..(1071): unsure at all n locations
agaagaattcgcccatttttacttaaatganntaaatagttgaaaaagtttttcaataaaaaagaagactttaactgtaaaaattaagaaatttttgacgttcgatcaagaagtgatccctgctgaacgtgatttttggttcttttccaatattttttttttataacgaatccatttttaagtctgatgagtccgtttcagtcccagctgtctagtcccttgtctttgtccttttagtttgtcctcttgtctgtctcttaattcccaaaagtgcaagaaaagaagcgaaaaacgaaggccgccctatgtcccatgtcactttgccctttgttttgcctttgccttcctccgttcggttgctcagtgccaaccaatcacagctgtccgtccgtccgtctgtctgttcttacaaattagttctatttgctgagtttgctatattgcattttgtttccgcgttctaattttgtgctttaatttcgaaattcctcttctgaattactgacaaaaattgtactttagggcctaattctgactacctaattttgcgaaatggttgtgctctcaaaacttggctcgccgcttcgtccgttttccaatgactatctcctttgccgcttccaggcattccgtaattatgcaatcaaaaaagaaaggccgccaccagcgaagattcaagtgccgccacccgcaaacgaaactggccattggaaatgtaagtttagtggacgggccttatgcttcggcaatttttaatatttttgcgttttttctttcgcatcatttcgaattcagatgagcgtgactactcctatgacctgcgttattcaaacccgatcaacaaatactccagttttaccaggtaaaattttggctctagtgcacttaatgagtccaatcgagttttatgagtccaatcaattgacaatacctggtttttatacaataactttgttcatgtcacaaagtctaacgaagctactagtaaaacatataaaatctcaacgtttaggcaattacgaaaaaatatatgattaattaagtaattgctgattattttggtttgtaact

SEQ ID NO: 11311 - DNA, 1208 bp, Heterodera glycines
aaacaaattatttttgttattatttagttatgacaaaatagggtaaaatttaaattgtttaacaattgttaaataatttaatttatttcaagttaaattatgaaagagggtttaattttcttaatattaaatcatgctagttttaatttcagactcttcattctttaattagtttagctatttataatcacgcactgttacgtgacaaccgcgccaacttttttttttggctttttaagtctctttatgttgttgtttaaattggcgtttgtatgtgtatcaactactatttcaactactatccatattcatttgaactaaaagaagaatagaaatatatttttatgtatattcgtttatatttattttttctcttttttaagttattttattttattttaatcataatttatatgattattacctattttctttattattatatatattttctttcggcgtaatcaaaaaaatgtaaaagacccactaaatgtatcctaatttttattattttttttgacgaataatggatttaattttcaaaatggtgttaatatttttatattgttgatagatatgtatatttagttttttcataaatgattatgagttgctttctaatttaatattctttttgaaattagtatattggaaatttattgatatttattcttttataaaaaacataccttttcggcacctacccctgcatttacggtatttgatcattaaaaatgtcaatgtaatggatacataattttgtttattgtttgttttatttctgctgaatttaaaatattttaatttcaaatggtatttattaattgtttctttccttaaaaattcaaatttttatgaaatatttttttattgttaatttaatttttacattaaatttttatcagttattttggcactggctgaccctgctgattagttttgcattcagttatattagggttcgggtcccgcccccgtcacccccgccccctaagaatggcatattcgtgggataatagcataaacttaaaaattcgcccgccagcgattaccggcaccgccgccctccaaaaaacttatttttttcttaaaaaattagaccaaaatcactaaatttggtcatttttttagacaaaatctctgttatttatgtcaaaaaagaattgaatcgaggcgatacaccgactaaaggaatgtggagcaacaca

SEQ ID NO: 11312 - DNA, 1332 bp, Heterodera glycines
aataattgatttctcaagtaatatggatatctttttaaaatttttgaaaaagttgtgtatttctgtataaatctgtagtcatttaataaacggattcattaataatttagtatttcaaaacttaaatgttcatatcaatgttctcgacaaaaatgcgattttttagcattcattttcatgaattaatattagattctcatgtggtgtttttaaatatgggaacttttataaggtaaataaaaagtatattcaaaatatttgaattgataaagatagctttaatttttacttaaagcagtcagccgaaactttttactatttttacagtaaattgcatattagtttaaagtaaaaggtttaaaatagcacaaattaataaaacatttaaccaatattatatagaattcattgttttttaatttgaaatgttaaatgaaatcaataatatatatgaaaaataaaaagtgaaattattttaaaagtaaatttaattgttttttatttaacaatttcaaactctaaagaatataagcccgaaacaaataaaagaaaattcaaaatgtaaaaataaaatattaactgatcaattgcaatttgtcccttgaccattagtttaccgggttgattttccttggaatctcatctaataaattcagaataaaacaaaaatttagtttaaaattttatgctgatataaagtaatgaaatcaaatttaattccaaaattgtattatgcttaatttcatgtatttttgaaaattattcttttaaaaaatattaattttaaattttgataaaattaactaaatttataaacataaacactcaaaattgttattgaattaaacaataagaatattcaaataacatgcacaatattcaaaaataaaaatatttacacaaaataaaacaatatattattatttaaatgcaatgaattaattcttacaaaataaagatgaatggatgttaaataagaaagaatactaaataataattcccctcaaatttaaaatttacattgaagaaatgaagaaaatttaattttttgtatatataccataataaatcgagaatttaaatttaaataatcaaattaaaaataaatttacattgaaaatattaataattatcatataaatattttatttcaaccaaagctaacgatgtgacgattattataaatacaggtcgataaaaaaaattttatatatacaataatacaaaaaacgttgaaaattactgaaaaatgagcttataaaaaatccaaaatttaaattcaaaaatatatcaaaaatttaaatcctactaaacataattatgagataaaca

SEQ ID NO: 11313 - DNA, 1556 bp, Heterodera glycines
ggtccaagacccctgcccctgtaaccttgaggtacaattgcactttttaaaaaggcaggggtccgggacccctgcccccgtggcctaaaaaacatttttttttacattaactaagcaaaaaccaaagacccttgccccggtgaattatcgttcgtcagaattgattctccgccgcgatgattgatccaaggattcccccctcttccccgggcaagttgttatttgaagtgaggctaattacagttgaaaaagagagatggatgagaaataaggaattataaaaataaaatattttaacattaaaataacaaaattccatcaaaactaattaaatgtttatagtaaaaaggaattaaaaaacagttattatattaaaatcagacggggggggggaaatgagtgtcgggatgaagggaataaatgttacacccagagggtgaatgggaaagaatggaaaacaaaagaaaacggaaaacgtaaaatttcaaataataatttaaggaaaaaacttattaaatacgtttttggttttaggaggtttaacgagacccttttttaaaaatgaatttgtttgaagtgatggaggactggaaattactctcacttttattgacggccgggaagggatagggcggggataattatgacgttaaggggagctttggtgcttaattctggaaattttgattttggatggacgggcgtggagggaaattgatttgcactcaaatagaaatgaaaaaagagaaagtggaaaacggaaaggccacgcaaaataaagaaaattcaaaagagattttaattgaagtaatttatttaaaaaattgctacagtataccttaaaataaataaaacaaattaaaagacaaatatcacaaaatcgaaaattaaagcaaattaaaagataaatatcacaaaaaaatcgaaaattaaagaaaaataaaaaattaaatatcacaatggtaaagtaaaatatcacaaaaaattgtataaaaaaatcgaaaattaaagaaaaataaaaaattaaatatcacaatggtaaagtaaaatatcacaaaaaaattgtataaaaaaactattacaaaagcgggacatgctgaaaattttgcaaattggcgagatattgatacattcccgctaatgcgatagtttatattatcacaaagaatttcatcactactttaatactagggatgccattttatgaattaaaatacttaaaaaattgatttaagacaaaaaaactcaaaataaaagtaatcataaatgttgggtcaaaagagtaagtcaaggtgccaatttgtattaacaatttcaggcaaaatccaattatttctttgctaaaatgtggattaaatcatttaaaatttacttttcgtttttaaaattgaagagacccaaaataaaattgcataactattacatatgcattaccatcatcattcaaatttcactccccaccacgtcacccactattcctcgtccattggctcctctggcccgtgaacccgcgccttttttgcactcggcagcttttccgttgtcgcaagtcgacg

SEQ ID NO: 11314 - DNA, 1197 bp, Heterodera glycines
aaaatgccaaatgacgacgaaaatccaattttttcataagtttgggggtgtaatttgtaaaaattcccaaaaagtcgatctttaggggagtattttttgccttttttgcatttttattgtgaacatttgccaaaaatggccgaaatatggactaaaaaggctaaaatggcgaaatatggatttatttgcgaaacgtgccctagtcataactttctttaaatttaaataaactttttgaaattttgaattaaaaatttggttgcttttaagcaaaatcacatcaaatattattttgatggttttttgagtaacgtcatagcaccattaaaattagcatatgtgatcagtcgtaaaaaatgtaaatttttaacctaaggtaggagaaaatcattgatttaaaaaaaagaaaatgtggctggcttcagaaaatatgcgatcgcgacgacagggtcaggattttaaatcaacttaatcctgacacttgcctcctgcttggtcatccacgactcggcctgctccatgtccctgtagaacaactgcaggtccatgcactgttcgtacaatatgcgacgttcttcccacaaattgttcaagctcgtctgctccgtggccaaattctgtaaaaaaaaattgttttaagaaaaatgaaagacaaaatttcatatttgtgatatgagcatttaagattttaaaaaattgtaattttaacttatttttagagtatcgaatcattattgtatattagtattttttaattattggaataaaaaccctacaaaaacttatttctatgagatgttaacccataaattggactcatactttttccgaatcagtttacagaatgatttcagaaacctataattttgtcaaatgatttttctcaaatctttgaaataactttgttaaaaaattgaaaagctaaaaatacaattataaatattctcaaaacttttctttatattgtatcagggctgcaaaaaaatatgcatattttttcctggcttctctatgctctaaatattacgaaaaacatcttcttctttttggtatttgcgtataaaagtcggtacttttatttgcatttttttgcatatttcgagatttttgtgcatattttacgattttgtgcatatttggtgtatattttcacgactttatttgcatatttatgcgcatattttggtcagttttcgt

SEQ ID NO: 11315 - DNA, 1218 bp, Heterodera glycines
tgtagaaaatttcatttttttaattttagattcatttttaggaaacttgcgtgcgtttgatcattaagattggaataattctttttttcaattaattttcaaaaggccaaaaagtgggaaaatagggtaaaacaatcaaaaatttcaaagcgaaaaccccaattaaagcatagccttaataatacaaaagtctgattcaaaattgataaataaaatgaaaaacttttaattggccaaaaatattgcaaacttaaacaaatttttgtcttaaatggtaaaggtaataccccaattaccgatttataatgcgcccacgcggcaacaacgcgtgcctccatcagtcctgtcgaagcttgcccaatcgcactattcacgtcttggatgaattgctccaacagttgcggcacatgcgctgcaggtggcggagtgtagatgcaattgccgtgtccgtcaactactctcacgtcaactgttcttatgttgccgcccaaaactccatggcgagccataattgcgaggtgtatggtgtcaacaatcttcaaaagtatgcgctttgttaacaggtttacgctaaaatagatggctcccggacaatccatcagtggacaatccgtcagtggacaatccgtcagtaagtaattcataagctaattatttttaaaccacagagatttatttaaaaccatgtgataattaatttaagtcgctaaaaatgttgattaatattttgtgatattttataataattatgaaataatctttttaaagaatttagtcaattaattgaagtataaagtaactagaaatgataagaatctataaaaattatatttattacatttaacaatcattttcgcaagaatttttgaacattgctcaaaaaaattttctgacgaatttccactgacgaattgacttattttttgaacaaggtatgaaaaatttgacgtatcaaaaaattattttgtggatgcattatttttttcattttccgaaaataatatttatgtagaaaaatttcatttttttaattttagattcatttttaggaaacttgcgtgcgtttgatcattaagattggaataattctttttttcaattaattttcaaaaggccaaaaagtgggaaaatagggtaaaacaatcaaaaatttcaaagcgaaaaccccaattaaagcatagccttaataatacaaaagtctgattcaaaattgataaa

SEQ ID NO: 11316 - DNA, 6339 bp, Heterodera glycines
  unsure (1)..(6339): unsure at all n locations
cctttattaatttaaacaactttttgcagcttatcttttgaaaaaaactttttggggaccagggaggaggagggtggctggcggtgccgataggcgccgccgggaaaaaaaaattgaatatttgaacacaatacattgttcagattttgtccaaaaatgaccaatttttgcaaatttgagccagtttttttaagaaaattaaggcttttaagggtccggcgggaaaatttcttgaaattttggctatatattaacagattttcaatcaaaaataataattttaccaaaaaaactcaattcttaccagtgtatttttactcccgtatttgggtcaaaatttacgggagcgggagcgggagttcgagatcttccgggagcgggagttcagatctttccgggagcgggaatcccgtaaactcccgcgggactcccgctcccgccggactctagtattttttattaaatttgatcattgaaaaatgcaataaaatcgaaaaaaagtactatggtcgactttatggaaacttacaaaagttcccaaaatttggtaatttgccaatgcatttgcatttggtactttccatttttagggaatatttttagtaacggttaaaaattcgtcagataataaaaagatgatttttttttgacttttagacgccgcatgtcttaataagttttttacgcctgtatgaatcatgtgaagcacatataggaaggtgcttccaagtgttgccaatttcgattaagttgactgactaagaataattatatcattaatatttgggaaaaaaactaaaaaatgcttgttatcattagggatacgatttttaagcgctaaaaactgccaaaatagatgctaaaaatgggaaaaataggtgtcaaaaagttccaaatttaggggtataaaacgtcaaaatttattcaaaaaagtaaactaatcactattcagataaataatttttacaatcaaaattcttgtcaaagaaagtaaataaataaattgtgtagatgaatttttgagaaatttttaataggggtgtatttttctaatattttttgggtcgattcttagggtatgtttttcgtttttccagtcccaattttctgtaagtcccgaataaataaaacgtcaaaatatttccaaaatcctccgaaatgctaatgttcaatgtttgaagtgaagctaaaaactcgaatttaacccccgtttgagccgatgggcaaatttttcaaattggtaacaaaagtattaaaacattttttagtcgctggtggtcacatcggaggccatgcttcagatttggaatttctcgagccgggatcccaaccaaaaatcccgacctgcaaatttaattgcatattttatttaatattaattaattcatttttacaaaatctatctatttaccattttgcgtttttacacgtaatacattgattaatcttatataaaaaaatatttccataggaaaatttcattcatcccaatttatttaatatttatgtttaaaaaataattttctataaaattcacagagaataattgttgttcctgcttcttcaacatgatggcacgcgcttcgtttgctttgcctcttcttctgctactgcttccactcttttgtgtggcaatgaatgaaaacgatggcactgttgccggagagggaagtgccaacagcgaaacatggatagaaaaattagccaatttgctatccgaaatcggcaaaatttgtgatgtgtacactattttaccgcgcagtcactacaaaattttgtttatttttggaaagtttggtaggtttttttggtgtttatttggcgcccggaaaatgcgtcagttgtaaaagcgtcagtagaaaatgcgtcagtggaaattttgttgtcctaaaaacaagttcctttcgttttcgagatcactgaccactaatccagtatccatttcggtcaattccgatccccggacccgtagcgatcaagggttacatgacattgtgccccggacatttgtcgtcttttgacattttaaaatttttaggtgtaggcccaaagcggaaaagtatttttacttctatattacaatactaatgccacagagctttatttcaaaatatttatatcactgacgcattttccggtcatagtttatttatatttaaaaattattaaaaaaaagaatcgaaataaaattacttagaatggaaaaaaattaaatcagccaatgtattttttaaagataatatcaacgataaaaaagtgcagaaaatagaaattgagacggatgacaaaggcgactttcggtggaattttgatgaaatgatagtccaaaacaaaaccgtagcagctggagacggtccagaggttacggtacttctgtgccgtacaagcaaaaagcattgccacgtgttccgggtgtacgaaagttttgccgaaatgagagaggaaatgaccaaaaatgagggtcgattttatggagctttccaggtgatgtatgaacattatgggcattgtataagcatggaaagtggcgcttattttggcgaaacggagcaatgccaaaagagtgaaatgtcccaatcggatgaaaactcgggaatggcatactcaccagcatcatacagccacatctgtgatacgtacaccattttgccgcacacatattacaaaattctgttgctttttggcgaattgagtaagtttaaagaagaaaaatttgatttttgctaaggctaaattaatattaaaattccataaataaattaattttcaaagaaaatgcccacggagaaaaagtagaagtgcccaaaattgaaatttcaactgatgaaaatggcacctttcggtggaattttgatgaaatgatcgtaaaaaacaaatctgtagcatcaaaagatggtaaagttacagtgctattgtgcaacttggtaaaaaaggaatgccgcatatttcgcgtgtacgacaattttggcaaaatgaaaatggaaatggcacaaaatgagtgccgattttatgagcatttccaggttatgtatgaacattgcgaccactgtactagcatggaaaacattgggaagagaaacgaagaaggcaattaccttggcgaagtgtcacaatgccaagaacaaaaagagaaagatggcacgggggaacagaaacatcccaaattgccaatctcaacatttccgtcatttcacaccttagcatcaccggaaaatgaggcggaaaaagaggaggaggatgtagaggaggatgtgccacttctgctggaaagaggtgggcacgaaaagcatggacgaacccaccaccgatcattgagacancggcgggtgggccaaagccaagcggagaaagaggaggcaaattgaaaaaacggaagagagggaggggggaaatggagaaacagtgacgaaatgagagaaacgggaagcgaagcaaagaaaaaaggaaaaaacggagggaaggggaaacgatacaagcatttgttgataaggggattgtaataaaatgcttttaacatcaatgacgagattttctaaaaaattttgtacgtgattgaaacattttgagattttgcatgccaatcgatagactttatgctaaagcattttcctgcaacctttaagcacagattggttaatttagcacaaatgtggtccattttcagactaaatctgtaaataatttcatccaaaacactcaaagtttcggttcggttaacaaaccgggttccgacatttgcgcctttgcccaaaatcgggttcaagcttaagttctttcaatccctgatggcctaaacaacattaaataaacgatagaaagtgattgtgtctgataatttgatgattagtaaatttttgaaagaatcaaaattattcaaacagctcaattaacaaactagatgactatgatttcttaatttaaatgctgtttaggctatcagggcttgaaaaaattaaagtttgaatccgattttgaaaatatgcgcaaatgccggggctccaaccaaacgaccatgacttgcccaaatttgttaggtgttgtgccgtcaaatcccaaaccggcgaagtgaataaacaattattttattcaagttgggaagacacaaataaataaatgaagagaagagggacggaggacaaagggcgaatattgattgaaacaatataagcaaaataaatggttgacaactgaatgacggggaggtcagaggacgcggggtatttatggggggcagaagggaagagagagagagaggagagataaaggggagagaaataaaggaataaaaataatatgggcggataatagagtaccgatcccaacatcttcccccttaaaaaaatcttttccctcggttcttccgtgattcgtccgtctgacacgtccgttcaatgacagcagcgggtgccactacaggcaattgcgcttggccaccatgctgaaccagcggtggtgccaatggcaaatcaaacgcatcattgaacacgttcaatgcgtttgtgccgttttcgtcagtgcttctcacaagcaactgattggtatggaaccgtccgaattttccgtcaaaaaattcgacgtcgtaaatgacacctttacatttggtgacttttcctggacgccaaggctgagaaagacgatgccgagcgagaaccttatcgcccaaggcaaaagatctcggtttggctccatggcgcctattaaattgcttctccatggcctcgtctcgaattatcggtgcctttggctttgacctcaacaagtccaaagtcgtgcgcggtttccttcttagaaacatttcggccggacatttgcactccggcaaagcctcacaaggcgtggtccggtatgttgccaagaatgtggtcaacatttccgatgctccttctcccttgatcttccgacatgtcctcttgaacgtatcgacaaaacgctcggcttgaccgttcgacatgggattgtacggagcggagaacacataattgatgccgttttcggtcacaaattccttaaattccttttaagcgaattgtgtgccgttgtccgtgaacaaaatttcgggaaggccataactggcacaaagtgaccgcaatttgtcgattgtagccgcggaattcgatgaacgcatttcgaagacctcgggccacttcgagtacgcgtcaacaattatgagaaacatttttcccataaacggtccggcgtaatccaaatgaacgcgtttccatggtccgtcagctttcggccacgagtgaagctcagtattcaccggcatttttgcctccattgtgcattcgttgcacattttgacaaaattttcaatttgttcgtccatgccaggccagtaaacgtactgcctggcgagagctttcattcgcttcatccctggatggcctctgtgcagaagttgtaggacatccttttgaagcgatgccggaatcacaactctgtccgcataaagcagacattcatcctcgatggtcaaagggtctcgtcgtcgatggaacggaacaatgtctgcggccattttgttctttgttggtcaataagagcagacaaatttcttcactttctgcatcacctgatcgtttttcgcggcgttagccaaatcactgtgatccagcgggagagttttcgaaacaaaattcaacactcccgtttcattgctttcacgaatgtttgcaatgatcacttcgttgtccggcactggtgtcttcgcgattaggcgcgacaaaacatccgcttgaccgaaatcagcagtgttttggtattcgatttctaagtcgtagccaagcaatgtgattgcccatctctgcaatcgattcgctgtgcaagccttaattccctttttgttgccaaaaatggacaacaacagcttgtggtccgtctgcagaacgaagtgtctcccgaagagatacttgtggaatttttgaacggcaaagacaatcgttaagccttctttctcgatttgagaataattcttttctgctgctgacagggacgatgatgcatgtgcgatggcttttagacttccatccgaaaagcggtgagagatcacggctcctattccatgctcagaagcatcagccgatacaatgatctcttgtgctggatcgtagtgtgtcagcaattgatcagatttcaaaattttgattaccttctcaaaggcattttgacaatcttctgaccattgccacactttgtcctgtttcaacaattcgtccaacggctgtcggatgaacctcatggtcttcacgaanttgtggtaaatggtgatcattcccaaaaatgatcgaacctcggacacgtttgtcggaacaggcatctcagaaatcgcctgaatct

SEQ ID NO: 11317 - DNA, 1216 bp, Heterodera glycines
atttgcacgcctttcttcgtttttcttgtctcaacacacttccccacccttcgccaaatcattttgcaacgcttttcttccgtttttcttgtctaaacacacttcttactcattttgcaatgtttttttaaacagtgctctctctgtgcgtataatgaatgaataaaatgatatccaggcaaccaaatttattggcataattttgtttcaattttttagtgcatattttacgattttgtgcatatttgatacatctttggcaattttatttgcatatttatgtgcatattaatagcagaatggaatataatttaattgtaattgtttttggcaatttttacagacatggccgagtgttgttcatctgtttctgcttctgacaatggcactgctccttcttcctcctcctcttcttgggctgagttgggtctttctgatgcgactcttaacgctcttggcacaatgaagtcacttctcaacaatttcttaaattgttttattttcttcatttagtttcccttttccaactccaattcaaaatgctgtgattcctatcgctgttaaattgaaaaaagacataattggtgcagccgaaacggtttgatatccaattaatgctatttaattgggtctaatttttcaacatttagggcagtgggaagactctcgcatttgccattccgattctcgagcattggctgaccaatgcaattgccacaaatgtccaacattttccggtcaaaggctctctttttgcgcttataatttcgaccacgagggaattggatgttcagcagggatgtgcctaggtttcgcctttcgcattattcgcattttttggcgtttcgcatttcgctttttggcgcgaaaagcgacttttacacccctaagaattggattaaattcccataaaatttttcaaaattttacctataaattggctaattttcagtgaaaaccagtttataaatgatcaaaatttccaattttttccccggcggcgcctatcggcaccgccgcgcccccaaaactcctattttttcttagaaaatggcccaaaatcgcaaaatttggtaatttgatgaaaaactgttctcagcggcgcgccaaaactcttatttctcattagaaaaatgataaaaatcacaaaatttgatcattttttagtgaaaatctgtcaacaaattttaatcaaattttacaaaatttttcccgg

SEQ ID NO: 11318 - DNA, 2848 bp, Heterodera glycines
tggcccattttaaccctttcccccgttgaagagaaagacttggaattgctggccgtgaacgagcccaaactgatggagtcgtgtcgctctttggtcaaatggcagcggaagcattggaacattcgctaaaaaagtgaacaaatggaaagggccatgggttgtcgaatgatcacagcgaaacatttgtgcagagaaagtcgcgtgagcaatggttcgaacggatagcgcgggaagcggatttggtgtgggaagagggggaggaaaaagggcgaaagatggcacgacggactgacacggacgaaggaccgacaaaagagtgggtcaattgaacaacaatcggacaaacggtcgacttggcactgacaaaaacccatttcagggaattaatgagacagcggaaaagggccgttgagaaagaaagcattgaaaggaaagctgaagggaaatcaacaaaattgagaacagagagaacggaggattaaccaaagtgcagagggaaggaaggtgaaaattgggaagaggaaagtgagactggagaagggactgaagaaatgggtaaaacgggcgaagatggacagcggacgatgacgagggaacgcaggggaagagaggaagggaagtgaaagaggatgagagagtatgggaagtgaaagaggaggagaggaagggaagtgaaagagggagtgaagagcataaaatggaagaagagggaaaagctttgctagtgaaccattttctgtttgtttgtttgtcttgtttaatcttaagtttaaacggattgaacttttcttcgcattcatttgcttctccctttgcattatttgcataatggtggctcatttccttccgtcattggcaattgtcgaacttcattctctccccatttgtccctttcccaccccatccatccgtccgcactttgtgccatccaacgcttcgtcctccggcagcccttttctttcaattggccaagcctatctatcgacatctcttacgtatattgtcccgaacgagaatgaatgagggggacacaatttctctgaatgccttcccccgagggtattcttttgctttctcttcgtgctctgttccatttgccctttcctccgtttttccgccttttggttttggaagaaaaataacccttgaatttttcataggaaaaacggaggcaaaaaatgccatcggtcgatgagagagaaatgggggaaaaaactaaaattatatgacaaaatcattggtttcatgggtttttatcacaaatttttttttcaaaactaaaggatccccccttttgtttttgatagaattcaaaatcggtactttccatatagcgccaaatcatttttggaatttataattggctgtttctaaaaatgatgaagtctttccccccttaattttatctttttttttgctcatttcgccgcgtttagtccaaatttgccctttcattctttcgtccttttcatctttcaaattgttcaacaattcgtccaacaattgccattccgacatctcttcccgagcacagtaccttttccaataatcacaattcaacggaatgcctttgcgctgaaatggaaaagggccaaaatgcccccgggggaaaaaagacaaaagtttattttgcggtacggacaaattgtgcgaggccatgggagcgaatgttcatctgcggaggaagccgactgctgggaaattggaggcccgaaaaggcattggaaatggcacgagaagcggaggacggcgaagagaattccttcactgaataacgatttaagctcaaacaataagtcaaaaacaggttcatcactacaaagaagcggagaatataagtgagcttgggcagcagcagaaccgcggccaccgattgaccggagaagcggacgaaagagacgaattgcgatcatttcccactttggtcgaggcattgcaaagatatttttagactgtccgtcaaacagaacaagtacccggtgcttttcctttgtgtgggccaaaccgacaggcaattaacgattaattgactgaattactttaaaattccatgtttaattaaactctgttttaatacatatgtgccatttttggatgaacggagcaaagtgacccgagtgggctccaactttgccgcctgctccaaccttttggcaaggctaaaatgccattctttgaaattgctccgcctcccaccgcccattagggcatcaatttgcacagcgaagaattgctctccgatccgtcatccctgaaaagggccgttgcaatgaaactgatcactttcgtctgggtagaggacttggacaaattggaatacgttgcttatttcagacggcaaaatgtggacgcgattatctacgacaggtgaaatgcgcaactttatttttgagtaacagcccaatattttattttttgtcgtcgcaattaataacaattttaaaacaaattaaccccaagaaaatattctaagaatcggcgaattggaaacacgtcaaaatgtgttcgtcgtggaaagggaagtgaagagcgccctgttcaagtcgccccgcacttcaccttctctgtcgcgagcaaattcactgtttcgcaacagtcaaagcccgacgatgccggtggaagagccaaggcggtcaccctccgccagaagaatgttggccaacggatttgcccggcaaatgacaattgccgacactgactttttcccgaccaaatgagtgaaaaatcttatgtttccttttccgaagaatatccaactgaatctttctttattaatatgagcatcagaattgaacaaatgattatttcatggcgatttgtccgtccttttccttttcgcgcgtttctc

SEQ ID NO: 11319 - DNA, 2409 bp, Heterodera glycines
  unsure (1)..(2409): unsure at all n locations
ttcttatttttaaaccagaatattgaggatacgaaacccaccatggagataaaattcatatttactcatcattattatcctatgattataggagaggaaatganatttnattncgacaattatcgcccttccactcatatatcaaataaagaggtcatatttgaaaaaaaggaaattgtctttcagccaatcaaccttcaccaaatctgcagtggaaaggaaaagggttcgccagtatgagagggagggattaaccttttcagccaatcacagttgaccattttatgcaaacgtggaaggtttctctcggtaaatagtcggtgccgggtaccgagtggtagtcaatgtttaccttcccactattcaatcaatcccctttccatcccactaaaatttactgaataaaaacggaaataattattttattggaaaattgtgaataaaattttggacaaataattctggattatgtgatataataagtttacgaaggaattcattaaaacttaatccaaacgataaaaaatacacaaagcaaatacaaaaatgggcacatgaattagacataggagattgaaatttttgtttattataaattattcctggaaaatcacgaagaaaggactttaaaacaatttcgttgattggaagggttaagctatcaaaataaattgcttctttttctaatccataaacaaataaagcaatccaatgtgatccaggaaattgatgtgggtccaaattaactattagagatgctggaaatcgtagtgatttggaatcaggtagttgatcgcatgggaaacatccaaggaaagtgcgattcgttatttctgatgccttcaatattttggtaatttgatgactatccatttgtcttagtgcgtttttccgtcaatgtgaactttaaccaaagaatcgatcgtagctcataaattattaaactgaggactgatagggcaaatatgactatcatagcccaacaaaaaacatgcgcatacacattagcttcttttggtagctctttgcaaagaggaataaatggaaaatttatagtttcagctggttgtttttgttttaatgctctgattgactgggaagtgattgtagttatttttgtctttgttgttgtattgtgtatagttttttgggttgttgaaaattttttattttgagttgatatgtttatttttgttgttgtaatatttttagtttctgaagcatttttaaaacccaacaatcttttccactctttatattggggaattttctcagtatttattccttcttctacaacaagtgcaacaattgattggaaaaatagggaagccaataaaattttcaacattaaaaatgattcaaatggttgtatcagttgcaatcgttctgtttttatccaaaaagtaaatagagtccgtttcacccatcacaataagtgtaattccaccatcgggtactggttttttgaattttatgtttacagctgtacattcctttttgatcagatcgaataaaccgccatgatcgtctccgctgtttgtcatattaaacacataaatacagtgagtgtgcaaaaatgaaaagtaatcaattccatttccatatgtagagttggcaaaaccaagcgcctcctgcgtgtcattgtagggacgaacaaatttccaattttcatagtcaatgtcatacggggcctggggataagagcgaccattggccacaacactcaactcccgtacattaaagtgctgaaagttgaatgggctccttttggtgttccccacataatctgaatttgcgacaagtcccattgttacaaggcgtggaacttggtccatgaataaatttgcattaaattcatagcgtccagggcttatgaacagtgctttcatcattgtctttcgtacagcataccgtgctggtttcatttccaattttttcgccaagtcaagagccaagccgtccataagacttgaggtacattgaaaagatcggcatcaatttttgcaatgtattgtgctgttcgacctcccaaatagcgttgtcttctacttttgaacccttcggaatttgtgttttgtagattgctaacatcctcacggtcgtatccggcagcagttaaatgcgaaacttagcttcaagtgattgcgaaagttcatgagaaagataagttttgtatgccatcagtgaatttgaattgaaaatttcacgaccgtttattgcaattttcatgtctcgtatgaacgtgtgtccaatcagttgtatcggtacaacctgatcattagcatccaaatgtccccattcaccatttggtggtgtcaattttcgcattcgaaattcggtcaaaaggtaacactttgacaggtcaatgtagttttggctcgangtgtattttaaaatggtaaggtgtgt

SEQ ID NO: 11320 - DNA, 2362 bp, Heterodera glycines
  unsure (1)..(2362): unsure at all n locations
aaaatgcatcatagcccgaaaccgaagtgtcatagagaatgtgacccattttattcaatcgattatgtcaaattatacaataatgagtgaattcaaaaatttatcacnttcttaaatatcagtacgatcagcactgttcaataggaaaatggtactaatcttccgtcggtcattgttcttaattcaatttgaatttctgacacttcttttggtaaaacacgtgcgtataggggggagtcgtaaattttttcagtgtattctcccggcgttgctcctgacactgagacaacacggagaagagaactcagtgaatttccaacaatcatgttttcagtcaaccctttggcgtagacggcaaagcttgcaaaaaccacgtaaatcacttccatatttggcaatctcattgtttcttacgtgctgcgcgttttcaaaacctaatacataaccaagttgaggagaaaaagagataaattcaattctcgggtgtgtaaaaaccgctttaaaccgatcaagatttgggtgatattgtaactccactccttcaatgatttgtctaaccatccgtaagtttatttgtttccatttctcatctccaaacaagacggaaatcaactcctccacccggtttctttccgttggttcttcaatttgccctaccaaatcatcgattgtttctttcggcggttcggtaattgtcgtggtagtagttgttgttattgttgtctttttactattttcaggtgttatttcagtgactaactgagtttgaccctgattaatatttagacttttttcatttctctgtttgggtggtggtccaatggtatcaattgaaattgtctttggtggggacgtggtttttttctcagtaacatttgggcgtattggtgaagtgggtgtagatcgatgtggtggtgggactatttcaattgtactttttttgctcctctgagtaggggtagcagttatttttttctgagcttgtgacactatagcttggttcaacactggtaattgatgcttagtcttcccgacttgagatggtgattcgtcgttctttttgggttcttgattttgcttattcgcatgtatcgacggacttgtaacaggtggtggaggaatgatattttgtgaaacaccttcactattcacatttttcgtctgatttgtaggtagtgaaatattttgtgtgggcttctggtttattttttctgtttcgtgctttacaatttctgactctttttcaattttcggttgcttttcagatggttttgttacatttaaaatcgaatcagaaatgtcctcggatttagtttgtggctgctgtccaactcgtggtggagatgttggtactttaacatttagcgttacattgggactaacattaggttgtgactttggtacaattgcactaggaggtgattttggctgagaagcggcccgttttctttttattgacctctgtgaactatcttttataatcttttcaagagactcagcatggttctttagggttgaaataagaaaatttcttaaattttcaattgttgtgtttgaagctttcggggcgggtactcgaacaatcctaagcctttcattatctaaaccatccgtaaaatgtatgttgatccactgatcatctaaggttccaattgttgatggccaagaataggcataattaatgctgtgtaatccgcatacccaagagccattgaaatagataggttttggtaaacgaactctaaacttatttggtgtattctcagcgtagtctgggctattactggataaatgcacaaagaatgtgttagacatttatgcaaaaaaaataataatgatataatgctaagtttacaagtatttatacaagttgggtctcatgaatccattccctttcagggtatccaataaattttacgagtacttctgtcgttccgtcaggcattttccgtttccgaaaaactctctcaattctgtaagtcgtctcggcatccttacgtacgggtgccaattcttccgggtagaaaaatcctttaaatttctccccccttgaatcacgtagcttatatctcattggtttcatgtgacgtttgacggcatcaacttcgagaatttcgtcgccgtaattgggtatataacctttctcgaattgaccttttgctatgctcattcctaccagggttgttccgggtcgagaaaagtatccgccacgggtttcgggtcgggtcggccgaaaaatcatcgggttcgggtttcgcgtctagaaaaaggccgggtttcggatttcgggtcaattgacaaatttttaatttgtttaaaaatcaaatggtactgcaatatttgcagagaattgcgccattta

SEQ ID NO: 11321 - DNA, 2088 bp, Heterodera glycines
  unsure (1)..(2088): unsure at all n locations
cccattttgataattatattttcgctaaatgcccctcaatttcggccccatccgtccgttaatcgacataaatataaatacaaaatatatttaattgaaatatcgcagcacttcaatgacgctcaaaatgctccagtccatgccaaccacttttggataagcactgccaccggaggcaaatgtaccggtcgatttggccaatgccattttcaattgatcaaaattggactgaaagtggaaatttaaatttctttttttcgattaaaaattcattaatatttaatttaaatttggttttttccaagaaaaaaataggaattaacaaaaagtttcgcctttctgctgctgatgacctttttttatttacgataaatatgtaaattaattaattttttcaactgtttgtgatcaattaaaattaaaaattctctctctctcaaacaaattaatttcagttaaattaataatatttttctgtaaaataaattagttaaattttcagaaaattcgttaaagccctctctcgtgagagtatgggaaattttgccgggttaaattttttttttttttaccctataagcctccaaaaatgcattgcgcatttcattgcctttcccagtcgaggcggaatttaattgctgaatttccatggccaatccgtccgggccaatgccgtcccggagacagccaacggcaagcgaaccgatggcattggcaaaaggggacgagggaggacagatttctgccaaaaattttgattcccaaattgccaaaaaattggtttagtaaaattttgccaaaaaaattttgaggccttcaaatttcaactttttgcctcccccgcggccaattcgtcgcccgccagcgcggccaacagcaaacgacacaaatcgccaattggcacatttaaagaattgtcaaattgttcatccgccgttgttgaaagggtgtcaagctgtttaatgcgttcaacgagttgttgctggtgttgatcaaccgctgccatctctgatcaaaattttagagcaattttttgctcaaaaaatagcaattaaatggtaaaaaaaacttgggaatgaacccaaatatggtgatgaaaaatgatggcacatgccattgataacatttaaatgacagatttaaaatcgcatttcagggcaatgataaaaattaggcacaatttaggccaattttcccgggtcattattatctggcttttgtgagagtaccaacattcaattatttgaattagaaaaaccacaattttcgggggttttgatgttttgcctctcgaatttgggttgtccattcatttctcggatgatttggtaaattgaattgtgtggcggcaatgaataaaatcttcctaacaaaaaaaaatttttttttttttttgtaaaaagccaaacgaataagttggaactaaaattctataacaattattaaaggcacaataataacacgcacaaacaaacaaacaacaacaaatggtggaaaaatcattgttgtccccccaataattatttatgactgtttccgttgtgccgcctcctctttggcctgcgcttcccgctcaattctgtccaattcgacatccaaccgttccttggcacggaaaacctggaaaatgccatattcggaatgaattttgcacaacaatttcaaccataaaattggtggtggcaagcatttaaggagcaaaaatatatatatatatcagaggggaatacgaaaagaatttttttttttttagctctttggccctaaaaatttgttttctgaccaatttttcagactaattcggctttatgggcacctaaatagttcatgatttagcaatttttcgctcgaaatttgtcaaaatatagtataatttaaaaaatgcccccattttcctaaaatttaaaaaaaaaaaatttttcatttcgggttaaattcatacatatacaaggggtgtctcgagacacccccccccaaaaaaactatttttttcttaaaaaaatagcccaaaatctcaaaatttggtcattttttagacaaaatctgctaacaaataacattaaaattacaaanaaaaatttccggcgg

SEQ ID NO: 11322 - DNA, 2396 bp, Heterodera glycines
  unsure (1)..(2396): unsure at all n locations
ctctatgttttcatatgactaaaaacaatgggcgtatatctattgattgatgggaaaagcaaaaaaaaagaacagaanagccctttaaaggcgcagcagaaaaagccggaccgncgcaagaaaaaacgggcccgagacacccccccccccagacccactcggccgacggacggcccgaggacagagacacccccagcacagggaacgaacggacaaacgagcacaaaagggagggacccaacaaaacgccaagcacaacaccaacaacaaccaaaacaacaacaacagaaaccgccgcaggcaggaacagcgagccgccccagcgccgaacaagcgcagcgaacacgagcccacaaaaccgcccaaagcccgcacggcccagcggtgtttggacattcaaaatttgtgctgcttcctgcaataaatttatgcattcattaaaaaaaataaccacaaaaaatgcaaaaaatggttggtaaaaagacaaaagttaagggtaaaaacacattcaaaaaaatagaaacatttttgggaaaactcagacacgaaattcacaaaatttagactggccaaggcccgtaccccgccccccccccccgttcgcccgaaatgaaaaatgtttccaggaaaatttggcatttttttagaaaattttaatcaaatttgcttaacaaaatgcagtaatttttacaactttaaaaaaggttcaaaaccacaaaaaaaaataaacaaaaagattgcattttagccaaaaaattctaaaaaaaaaatcgaaccgattaattttacccaacatttattttgcatcgtaataaaaaagcaatactaaatggtcctactatttcacctgaactgtgatgcccagcctggtgttggtctgcaacgcctcccgttcagtggcacgccgtgccgacgccgtagaggacgtggcagaggaagttgaggccgtgttgttggcgccgccggcactatctgacgcggtcgcggcggacgcttgtcgccgggccgcttcacgtgaagctagaaaaaaaaatttaaaaaatttgccgtcaagaatctccatattcattccccaacccaaaagtagtttaccaatggggacaaaaattttgttttttaatttttattttcaaggcatggaccctttgttcccccaataaatcacccaccatctgaaagtgtataatatttttgacaatagagtgtatgaaacatatcataatttgtgagtactagtgtaaggtttaatccccatattttagacgaattttataaattttccaaaaaaatgtgcacgcaaaattttcaccggatttttggcagcttacaattaattccggcataaaatcgacaaaaatatttaaaaaataacaattaaactcctctcgaaccgctcgcgcaagtgcccggctgaccgccacggcgccggcagcagccaccttggccaattctttccagaccatttttaagtaaaaattttaaaatattttcctctaaaattcgaaatgtcgccaattttaaatttacaataggtggcataaaaaaaatgcgtttaaatattacatgaaataaccaacaaaaaacaaaatgcacacacttgatttatcatttttatttgaatcaagcatttgaaaattagaaaaaaacaacaaacaaaagtcaatctcggtaagacaaaatttgtggcgttgcaaattcggggtcaaccggtgcagggggaccgtacaatgtggtggctcgttgcagaaagtcggtgaccatgttccgcaccactgaactgaatggggaattccaatttaaattagcaataatctttttactaattataaaaaccaaagcttaatgatgtgaggttattttttcaaaataaaaaataaaattcgaatttatatgttcaaaaatttgggaatttggtctcctcaaccgaattcagacaactttgaatgtcgctaattgaaataggaaaacaaatttgttaaaatgtttctaattgtaaaattttttttagaatttatcactttttatcgtatttttttgtttgccatggaactttgatttagttcaaaaatggaccaaaattgcatttcttgacaaaactaaaatcagaaaacctcacccaaagaagagatggctgacaaaggcgtgcaattggttccgaaattggaaatccaacgaaaaatggactgtacaggtgcgcgtatcttgcgcatgttgtagggatgggccgaaacgccaagtggtgaccaaatggtggaacaaattgccatcccgcgtcccacgagccttagaaaaacagaggcaattatcattttaggtaacgaaaaaatatttgaataaaattgtaaaatttttgcaaagtgacgcctaactacaaaattccttttaaattttaaaaa

SEQ ID NO: 11323 - DNA, 4687 bp, Heterodera glycines
caaaaggggggggggataatctcctttattaccaaaataagtgcaaaactaactaaaaaacttaagatttaaaatttggaatgcgcaaatttggatttgtgagagatcccgcgtatctgcattagataccggcgcgcgacggggtcccggcgggattttacggggtcccagtccgcaatcccgcattttttgaaaattgtgggattaaaccgcgggatcccgtcccgcaacaaaattttgagttccaatcctgcagcgggagcgcaaatttgattttttgtccgggatccagcgggatccgagcattgcatttttttaaaaattaagacagaatgccaaatattttctgaaataattttcaaaataaattccattaaataaaaaaccatttttcaccaaatttaatccaaaatttatgaaaattttggaaatatacacggcgagtcaattttgggctccaagtacaattaagttggttttttcgtcttagtggtctgtgagttagtcatcaaaaagggggtctcaggttcaaatcctccttgtgtttgtgtataaatttcaattttttaaagcaaataaataaaatattaataaaaacagaacgccaaaagaacaaatacaaatagtggaaggtagacattatattttacccttgattttattaaatttttttagcttataactttgtcaataatagaccaaataaaaccattttatacttattttgaagggaaaattctgaagaatatttcttaattagtcaaaagtttaaaaaaattgtttattggcaaataaatgtttcatgtgttattttatatgttagagacatggaaatagtacactaaaatgagagaaaaagaaaaaactttgtcctgggtcaaaaaatttttccttgggtcagattttcttcaaattttgcataggcccatattttgaccccctctatcgaattctcttttgttttctgaaagtttcttttctaactcgagatcggctcttccatttttacaagggaaaatccccaataaagtttaagttttgcaaagttttggcgttctgattactaaataaataataaacttatttgtacttggagcccaaaattgaatcgccgtgtatacaaatctatggtcaggttatcatcagctccctcgaagacccccgggtagtgattgaggtactagttgggtttgtatccgccttttgggtcaaatttttcagaagcgtagccagacagtcagacagtgcactatttccttctttatttttctcacctcttcccttttcccacacacaatgctgccagccagcacaccacacggctgcttactgtctacccttccacccgccgcagccccacgttgacagacagtcagacagtgcactatttcttcctttctccagtgactaagcggaagaaaagaaggaaatagtgcactgtctgactgtctggctacgcttctgaaaaatttgaccaaaaatgtggatacaaacccaattagtacccagtgacgaaacatcagggagccttacgagttggcatagcacgagttatgtatgattttccattttaatcgtttagatagtttgacttttatcataactagggatggtaaaaatatggactaaaaatcgcgaaatatggacataaaatggtaaaaatctcaaaatatggacataaaatggcaaaaatatggacataaatttttctaaattgaggggtaaattttcaaaaaaacccgaccaaaaaaccgaaattttccattttttgcttatctttcacataaattaaccaatttttaagaaaatttaaatttaatcaattttttttgacaaaattttgctaaaaaatgtctttttcggagcattttctggtctttgaggttaaaacggccaatttagctgatgggggccgttctaataggggtttttttggaaaatgcctaaatatggacataaatcgcaaaatatggaaaaatatgaatatagaaatccatcttaaaagcttcaaaccaagctaaagtccccagcagctaaattagcctttttgagcccaaaacccgaaaaatttttcaaaaaatcattttttcgccaaaatttctcgagaatattgaataaatttaaattttcttaaaaattaataaattatgtcaaaaataagcaaaaaagcgaaaatttcgcttttgttgttgattttgcgctaaaaaaattaataaattttagcttttatgtttttttttcttttaaaatgattgcacgtaattgccgaaaaaattcgagaccaatttccgaatgttgactgactaattgcaaaacgaaagccgtctttgtcaaagcgccttaccgagtcaaaaaatttggaaatgtatctcatatgcaatttcaaccaataaatttgaagaaattttgcactcaattttgaaaaatttatgtccatattttgagatttttgccattttatgtccatatttgtggcatccctaataattaccatccctaatcataacgtttgccaattttcaaaatttgaaaagggcggatttaacctttacaaatgaaaaattatccgtcaaattgatttatttgattgatttgttggttgaggataaggtaaaacgcccggcaaatggtcatcattttgcaaaatattctcctctttggtggtcctcctctgttgcgttccctttttcttcctcttccaatcggtcattttatgccaaaatgtttccgccccttccgtttttgtcaatgatttttcgtttcccattggcacattgtccaaccccattgaaggcaaaaaacttcaaaaattgttttaataaaatgtgattttcgtgtttctttcatcaagtacaatccgtaaaaaataggaaaaatctaaaaaaatcagggctctctctattcatatacacggcgattcaattttgcgctccaagtacaattaagttggttttttcgtcttagtggtctgtgcgttagtcaccaaaaggggggtctcaggttcgagtcctccttatgttgtgtgttaatttcaatttcttcttttacagaagaaggcagaaatattttttattaataaaagttttcgtgtcaaaaaaaatcatattcaaaaagcgttggttacgtacaacatcgacaattttatgaaattttcttagcttataacttggtgaatactagagcaaataaaaccattttatgctcattttgaagggaaaattctagagaatattgtaaattttatttgggttggccttaaattgtggacttggctaaaaaagtattaaaattattgaaatttttactagggtcaaaaaaattttcctcgggtcagattttcttgaaattttgtataggcctatattttgacctcctctagcgattccaagtttattttatggaacttaagtttttaactcgagatcggctcttccatttttacaagggaaaatccccggaaaattttaagttttgcaaagttttggcgttctgattactaaataaataataaacttatttgtacttggagcccaaaattattaattcttctgctatttgtgtgacatcattcggaactcggccaaattgtgctaattgctgccaaaaatgaaccgacggtaaaaggattttaaaagtcacacaaattcgtcatttatttgactaaactgttttcccatttcagttggatttgcaacgacgtttggatggacattttcccatcctttgaccgtcctcaactcggcctcaaattggcacttctttcgccacgtttcgatgcgttggtggacaaacatttcaatggcaaaagcgaattgacaatttggagaacgatcgaaattcacaagggcaaaggaccagaaccgaaactatctgtgtggatggatgacaaatttgtgccatttccattgcccgaccgtccgttgcccagcaaaattcgctttaagaaccttcggattgagtaattaaaaatcaaaagctattgcaataaaagcattctttccatttttaggtacattgatcactccgtcatcgcttttcttcgttccaatcaccaaattttcgacaaaagaggcaccaatttacatttgtggcttccattatcaaacaccacggatggccagccaatttgggatgtttttgttcgtgaaatttggccaattttttcggcaaacattcgccacttacgctttccccatggtgatgatttggacaatttgcgtcgtcgcacttcgccgacaattttcactgatctcaaccaattgaattcaatctattctggtgatttgttgcccgctgcgattgatgctgattttgatgtgccaaatgcaacaatttctgctggccaagcattgtccaaatggttgcactctccgagaaacgatggccaacccaagcgatttcgttgtggcagaaatttgaacgcacaagaggacttcgattgggtcaacagtttcaaggaggtgtggtgcggagggaggggggagcaggaacaaatactgctgaaaatccccgaatgagaaatttctcgagcttttttgaactcatgagttgggttcaaggggtaaaccaaaaatacgtttaatggtcttaaatggcgttaattaaaaggtataatcattttttggcgtaaaaccaacgatttcagagtgaaatacaattttttgtttaccgaaaaaatggacaaaat

SEQ ID NO: 11324 - DNA, 4290 bp, Heterodera glycines
taggctgtgccacttccatccaactcatttgacgccgggcgagcccgattggtggtactaaacgactacaatgtgtaaagctgatagacttattaataagtgaagcggtcattaacaaaaatgatattaattatactaaccaagaacgattaggagaagccataaattctccgtccgaaaattggccaatttatttttgattgtattgtacatgcttctggtagtattgtacaacacaaaataaatgctaattgatttttatttgataaattagtaattaaagtttcaagtgagaaaaaatgtttaaatagacatttgagaattgaatttttattaagctcgtatttgcatggactaaaaagcgacaaaactggacataaaacataggctaaaataatctaaaattgggcaaatatggacaaaaaattacggtgatctaacagaagcagtcgcaattgctaactatttaatggagccggcgggaataaatttcatttaataattaattttaaataaattgtcaaaaaaattatgttcaataaatttaaaaaataatttaaaatttgttcaaactttggaacatgcaaataaagaacataatggtgacggactgagtctatgtgccttttacaaagatgaacagaaagatgtgggaaaaaagcaaaagctgagtcataaaagcaaaaaattggtcaaaagtttccttcaaattaaaaacattgaaaaaactctttcctgtcggtctttggattctttgggctttccatttttttttctggtttttctgtcgggacaagatattcaattggaatgtttgacacattcttactttttttctatttttttcatttcatataaatttattccttttttttaaaaaaagcgaaaaaccttattttactgaaaaatgtatcaatgtaagcgaagttataaaagttagaaatattaaaatttaattattattttaatttatttgctgataataaagcataatttagcttaaacttagtcaaattatcggaacttggtattcagcaatagctctacatatcccctctatcttatgcaattttaaaaaatcagcaaaatttacaaaagttgtaaccaaaaacttacgactaacaaattagtgattttgtcgctaacttttttaaaactcattaaaaatttttcaacaaaataataaatacatttttttgtttatctaatcatattaagttgaacaattttgattgacgaagttaattggccttagtaatttttgtttcagaaaaaccaattttcattttcttgatatgattggataacccaaagattttccattattctggtaaattaaaaatttttagtttcaaaaaatagcaacaaattattgagtctaaattttttgaaattttcgaaatacatcctttggtaaatttttgttcattttttaaaaaaactaatcaaaaaatgattgcaaattgctggctgaacaacttttcccagcactttaacaaattgaattaaaaggctataaatcttaaagcgtgcatattttctcccttttaatgtcgttttttggatcaaattttcgaaaaaaaattacagcagacaaaattgagtaaacccggatcaaattctgatcggtatcctcggagactcccaccaaattcacatctcattaagtgttcggttcaaaaaaatttgcttaataattgttcttattgcattttatatttcagtttcagttgccaaattttacttctgtttaaaaatggaaatcattaaaatgaaagcaaatcaaaagaaaaaccaataaaaatgacagaccatttaaagagacagccgtgggaaaagaaacacttaaaaagcagtcccaaatgcgggggatatgaaaattcgatgctcttttttgaaaaaaatacggattttgggcctgcttaaaaaagaaaatccgaaaattacaggaaaaaatatgcttcatccatttggcaacaattccttttcgctcgcctctcctgttcatcctatacctcttcgcccttcttctatactccttttcttcctccttctcttgctcttccttctctcatctcatttttctcttctccttctcttctctcatttccctttcttccttcttctcttctttctctctcattttcctccctgcttttcctttcctattattttttctgacggagcacgttcttcggcagcttttgttctgatcgacccttcttcggcaccgtttgccctggtaactgaccacctaaaattgaagaaatttaacactttttcgaccaccttcttggccacaataaaagtgcgtttaggcacccgtgtttgggcgccttaggtattcaaacaatttttatttgtttacttcaaacccaaaaaaacatggtgtcaatgaatttcccaggcaaacagttttcaaatgataccaagttttttgtttttgttaaattgggcaaaagttattgctcttgaatattcctgacatccaaaagtcttatgacccctaggggagtaatcgagctttaggactgtgattatttattattatgtatggcaatttaatttttttattagagttgttgtttgtttttgtatcaaagcaaaaattgatgaaattaaacaaattcagcttgctgatttgttgagcaaacgatttttataaaatcaataatttagcatagaaattgctaattttttgaatttttttcgttctttgaccttcaaaaagcaccgtaatttctataatcgtaattactcgtcaagtcacaaaataattaacttatgaaataaaaagtctcagtttggttgcttttttatgttttttaatacttccatctatcctcgagaagtgaatcaaaatgttttgagtagcttttcaaagttagagaaaaaatcgcatacaaaaactgcttcggattcatcaattttattttttatgattttttgagtgtaatttttttcgatttttaagcaaaatttacagaaaaatgccaaaattacaggataaaaagagataaacttttgaagctgttttcaacaaaatttcaaaatattattaaagttgtagagttaacaaattcggattaaatcttttgcattatgggtgaaataagctaaaaataaaataataagttagctgttaaatagcttcataaaattagtactttctggacaataaaccggtttaaaactgaaaaaccgttttgaccattttccaaaacaggttcatgaatttgatttttttgacaatttgaaaaggtaaccaaaaattttaacacaattttctaggtggtaggtttaagagtatgaaaaccacataaaaggaagatttttcttaaccaaattttttgagatttttagttttccccaaaaaatataacttttttataatatacatatgtacctcttacgtcttgttcttgaccagaaatccaaaaaaatttccggaattcctaccttctgctgagaatttttcctggaaccacccaccagtcccatgcctgcagattttgttcctattcgtctttttctaatccatttttccccgagtcaattacaacgtgtacaaatggtcaactcataataataattttgcaaattaagccgaagcctaggcccaagtaagcctaagcctagtaaacctagacctatatacgagtgcctttttaccagttgtcatgagacctttttctccaccttttttatcttttttcttaatgtactcatccaaagctttctctgctttggcaatattatttttttctgcttggcgttttgtcatttgctttttccgctgggaatttcgctgcatgtaaggtgctcaagagtgcctccaattccgagtcttcttcatcttcatagtttgaacatttttcatctggcttcaacttttctttgttttcaaatgtcaattcccaaaaaataccgccttttaattgtttctcatcttaaaaagtgaaaaaatttgatatttttgaaacaatgttcggtttttgccttttcgttcgtagttgagtcgcctgcattttcttaagtgttcttttgctttgtcatataatggaactttactttcaaaatctttaaaataagctttaattgtgactttgtgtcctgctgcttcaacactatccaacagcaaaattttgatgatgaagagactgaaggtggttagcattttcgtcgagaattggaccattctgcgagtgatgattgatgagctaaataaaaaggcttgtttgtgacttttttttaaagataacttcgtattatgaaaacagggcttcaatc

SEQ ID NO: 11325 - DNA, 1131 bp, Heterodera glycines
atttcaaaatatcacagctggaccaaccttagcgaaaagttttttaaaaaacacgctgtaaaagaaggtttgtttgatcagcgagtctttattttgaaaattttgtgatcgaagccctgttttaactcgatttatataataccgcgcttaaccattttgccaacaataaaatgcctatatttatgaatatagccatatgatgaatgcacttttgtgaaggcatctttttacgaatatgccatcacaaatgaatatatttatgaatatagccctatgatgaatgcacttttgtgaaggcatatttttacgaatatgccatcacaaatgaatatatttatgaatatagccctatgataaatgcactttggtgaaggcatatttttacaaatatgccatcacaaatgaatatatttatgaatatagccctatgatgaatgcacttttgtgaaggcatctttttacgaatatgccatcacaaatgaatatatttatgaatatagccctatgatgaatgcacttttgtgaaggcatctttttacgaatatgccatcacaaatgaatatatttatgaatatagccatatggtgaatgcacttttgtgaaggcatctttttacgaatatgccatcacaaatgaatatatttatgaatatagccctatgataaatgcactttggtgaaggcatatttttacaaatatgccatcacaaatgaatatatttatgaatatagccctatgatgaatgcacttttgtgagggcatctttttacaaatatgccatcacaaatgaatatatttatgaatatagccctatgatgaatgcacttttgtgaaggcatatttttacgaatatgccatcacaaatgaatatatttatgaatatagccatatggtgaatgcacttttgtgaaggcatctttttacgaatatgccatcacaaatgaatatatttatgaatatagccctatgataaatgcactttggtgaaggcatatttttacaaatatgccatcacaaatgaatatatttatgaatatagccctatgatgaatgcacttttgtgagggcgtctttttacaaatataacgtcacaagatgaatatatttatgaatatagcccgtatgatgact

SEQ ID NO: 11326 - DNA, 2686 bp, Heterodera glycines
cgctgacaaatgagcgattagtcaaaagtgttggggaggaggatctgaggaaaatcttggcatttcgggagcgatttgccattttatttattacatcgctctcgacccatgccaaaataaaagacacattaaatggtttataaattcaaaacctaccgaacttcctggtcgttaatttgacggggatatccgaccacccaattcttgacgcggtcactggtctcgaggaaacgcacgccgggattgatctgaaatgggaggaaggagtttttttgccagttgtgccaataattagtgcccgggaatcacccggtctttgaaggtcaactgtccaccgtctccaaatttgatctgtgaaattcaaaatttaatttcgaattgaaatgtccaaacacaaaacacctttggcatttcgtgaatgcctattttgatgtcgttctttcctccgacaagtttgacgccgaatttgaccataaattcgttcgaagcgccggtgccgatcttccgaacctccgcctcaatgtccgcgtagcgtttgctcgggtgcgtggtgttcgccttacaaaaatttgaaatggaagcaattatgtgcaaagaaaagcggactgtccctcataaacagcaaaatgatcagaataaaataatccatttctgacggatcaacgctctgatcaaaatttggactaacaattccctttaattcggcacggccgaccctcccctttttaacttttgttttgtatgaatctaatcagtgtagaaaaaaaacgaataaacaatgagaaagagcatagagtgagcgggcggaagtaatgcggcgggacataatttcgccgccgaaatttcgccggcctttcccaaaaacggttccgtataaaaaaaaatttcggcgaaattttggggtgcacccgaaataattgagctaacaaattaagcatagactaaaagtcagtaatcagaagatctatgactactgctggtgggttaaaattttttattttggatcgctttcgcttaatcggccaagtccccccccccaaaaaaagtatacgttaagcagctcccgggacacataatcggccattttgtccagtggaagccgttggctgggcagaatcacaatgcaggacagcgggaacagcgtctgaactcagttgggggaattccgatcacttttttcactctccgggaaggtaagaacctcgcggtctttctgctgacggacggcgggcaattggccattgattcgaatgtcctttttgacgcggaaaaagtccaccatactcattgcttgtccgtccacttcgaagcttaattaagaccgaagaatgaatgaataaagcgatgaattgggcaatttgaatatttccggacgatccaggccgttatttttttcttgaaaatttctaaagttaaaaaatttttcggagcagttccgggcactctctctcttccttttttggattgtgtgccatcaatttccaaatttacgacagccatttgtagccaatgcaatcaaatggcatatcaataacaattcagttggccacctaatgtcgttcatcttgcgctgactgatcgagtcgatcacaatcactcgcgacggcgcgtaggtcaaatagccgctgacgccgcggaagagtcggctgaattcgacccaaaaacggtccatttgtcccgggtcatttcggttggtgcgcttctgttgcagcatcccattgacaatgtcctccaaatttttgttggcaaaaaaggcacatgttttcactgaaacagtcaaaaaaatttttacttttcaaatttgtcccaaaacagaattttgggtcggcatttttcccaacggatcggcacggttaaagcacttacatataggcttttcatggtttccaaaacagtaatgaactgattataatagagtccaacagagtgccgtgggttaccggaaacccttccggcaaaaaccgatttggatccgtcctgaccgactgttttttcgatcaggacaacgtcatccgcctcccccccggcacccaccgtccgccaccaaagccgctttgggctgtccgccgttgtcaatgattcgcacgccttttgcgattccctcccgcgtgacaatgcccggcgcttgctccaactctttgcagatttgtcgcttgaagagacgacccgcgccgacaacgtcatgcgtttctctgtaagtgattcgaaaattggcacctctatttattgggtaaattaacagtttggccaagtgattaaacgtctaatttcttttttttgtttcaaatattttgtaactgtacgagggtactgtgcaaaatacagtaactgttgcccaggggcgtatctagaaacatttttcggggggggggggtcccgacctgaagacctttttttttttgctatttaaccaataactttttttccactgctgggtaacaactgcactttttcactaaaaatgacccaattttggccgttttaaggcaaaaaacttgtaaaaatagtggaaaatgtaggtccggcggtgccgataggcgccgccgggaaaaaattttggaaatttgagtgctatttgttacgaaaattgcctattaaatttttttattttcgtttggggggggggaattcgaaaaaattttccattatttgctggaaactttttaaaaattttcatttcgggggg

SEQ ID NO: 11327 - DNA, 1650 bp, Heterodera glycines
  unsure (1)..(1650): unsure at all n locations
ataaatttattattttttgtgtatttatttcaaaacggtggcaaatccaagggtttggcaaaacgacacgaccaataaaatttgccacttttcacctcattgccaaatccttgggtcgcctggtggacgtgccgaatcagcgcaaagcaaacgccgcgcagaagcccatttttgccgtcgtcgccgccgcccttcgtcagacttttgttggttttgccgagttgggtgagttcgacgtcgtaacggaaggcgaaggcgccggtggggcgaatgtcaaaacttaaaatttaatgagttcaaatattttaattaatttccatttcaaaaaattatattttttaaagatctgataacaaaatgccatttgtggtcattcattttgccttacacgtaaacactgccaactccatcgacgtgtttgttgagcgtggccggcgggggaacggactgaaattacggtacggtattagttacggtacgaatacaaaaatattttgctaactcacagcagcaattttaatctttttcacttcttcaataaggttttccattgcaatatatttttatgctaaagttacaatattccatagttatttttacaatattttctctaattccattaaatgtaaatgggggacattaaacggagaatatttctttcaatttttatgtctttattttgaaatttttcgttcaaaaataatttttgttaacaaagaattattttcaggaaaatttgaaattttacatttaaataaatttaaatttattgcaaattgtggcaacagcaaatattgcaataaaataatgtgcacccgttaagcaaaacgaatgaaggaaagggtcaaaaatcgacaaaagaaaaccggagaaagaaacaatgaaaaggggaaaaggaagaaatgggaaaaggggaaggattgccagtaggaaaatcgaaataaatacgcaccactcgcccctcccctcccctcccctcccctctctcccctcttctttcttccccgtccgccatcagtcagtcgcctgtcattttttttccttttttgagttgccattatttaaatagctgcactctctctctcccctctctctctctgtttctctctatctctctctcgctttcggtccctctgctgcctgtctctctttccttcccacccttcttttttctttcactctttctattttctctcgttttctatgcatcttatctctctctctctctgcctaccttttccgcggtcttttcccctttcctcgccctgtcgctccctcttcgtttcctgcaatcttttcttcttttgatttgtcacttctctccccctttcccctccgattcttttcaatcgttggctttacaacatttatttatttctttgggctttagaatggaaatggtcgagctgtttttcttccatatatgaaaaggagtctcactaataatttgtacaatgtttaaattgatcagcaaatgtttgtaatgcgatgggttattaatgtcagatcgtaaccagggaaaataattaattagttaattacntcggcaccgccagaccacagcggaaataagtactgttataaaattgtcattcaggcaatttttttactttgacccatttaaaaaaaacaattcgaccgaggggaaaa

SEQ ID NO: 11328 - DNA, 3653 bp, Heterodera glycines
tttattgataaatcaatacgattttcaagaatcgcccgtcttaatttcgaaaaattaatatttttaaaatctcttctataaacattagaattattacggctgaatttttcttttattttaaatccgaccattttgtgatcggaagttgaaaaatgttccaatacaattaattcattaattaattccgattcattagtcattactgtctaaaatcgtattttctctggtcggttctttaacatgttgtttcaattgtctttggttcataaactcaatcagcatatttgacataggatcatttatatgttttaccttatttccatcccataaaatgtttgggatgttaaaatccccacagtatatgatattttcggaatcgctttgatccgaaataaatttgagtagcttttttgtattgtgaacgttacaatttggtggacgatatatatttaaaatttgtattggctttttgaaaagtaatttaatgtgtataatttcgctttggaattttgtccctgagaaaagtgtctggtaagggatcattgtttttattaggattgccgatcctccgcccttttttcagttcggtttgcataaacaatttggtattgaccatttattgtaagttccgcgtctaccgtatttctggagtttaaccaggtctcattgattagaattattgaagggtcatatttttgggttatatgttctaagtcagctattttatttgatattgatcgggaatttattaaaaggcaggaaatccagggattattttttatagtttttacaatttgtttcgttggtttgctcgcgtgtccctagcgagttctgagcggatgggggtttttcagggacctgatctccaaatcgaccacataatacttatattcaccagcggcaatattggccttgtaggcttgttgccgaagggagtataaaattttgagttcgttttgggtcatgtccctgcggactttgataaattgtggcaaattggggaattttttcaaagcgttacggaaattaaaaataaatttgtcacgcgaatatttgtcagaaaatggaactttcaaaattcggtctttttttacccctccatctgttagctgcgtcctcgggtggcgatgaatgtccggtgtcagtttgtcttttacgccgcattcatcagcaatttgctccaccaatgcccgttcgtccattgcctccggcaatttttcgatgactgctcggttcgccttctccttcagctgctcagagttgatgatcgcctcggtgatcatccgcgatacgaggccggtgccagcaaaaggcggcggttgaccccattggactgtgccgttgttggagatgggaacggacgaagagtgggaggcgtgctgggggtcagcaaatcgatttccacaccgattctcgccctcaacaagttgctgcaccaaattttccaacttttcgagccgttggataattgagttaagggcaggattccctgacccctcaagcaatttttcgagtcgttcgagattctttgcttacaatcagaaatctttttttaattgatgtcataattttggactttgatatttttataaaaattgataataaaaaatacaatacacctacataatgaacataaacaagccaaattagagatcggatacgggccggacccgtatacgggtttttacgggccccgtaattgggcggtcaatttcgtaaaattttcggtgaaaatcgaaaaagcattggtaaatattggaaaattaatgtaatttgaaaagaaatcaattatttctgtaccaaaaaatttttaagttattgaatagcattttgtttaaatttttggtgctagtgcgtttcgtaaaactacgcaattttatttattaatttttatttgtaaattgctaaaaaatattgtggcacgtattgtggaacatcattttttgattcttgtataatagcacctgtaatatggttttgcaattttcaaaaaggtaaaaataaaaaattaattggcttaatattattcaataaagttgaccgttgttgctataactatgatgtgtgctacattaataaaaaacaaaaacgttatgattgtgacataaaattgcatttaaattttgtggcagtttttacgaaacgcaccagcacgtaaatttttttgaaatttttttttatttttcttaattctttttttttacgaattggatttgtaaattcttcaaaattataaatcattttagtgaaaaactgtcagcaaaattcatgaaatcagttaaaaatcgcaaatttggtcaatttttctattaaatctattaacaaattgcaatcaaattttaaaaaatttcccggaggcgcccaatggccaccgcagtgccaattgttgtgttttttgaattttgttgcttaaaatttataataaaaattattataatatcttttagctttaaatattcaaaattgtatttattaaacctatttttatcaaaaagaaaaaaacccttacccgtatacggacccgtattatttctgaatacgggtttttacgggttagaggttttagcccataagcccgtaacccgtatagatgtcaagcccgtaacccttacccttatccgtattttctcaaaattccgatctctaacccaaattcactttaaattttaatatttaatcaaattttatgcaaaaaatgattattttggcgtaatgtattagaaaaattcaaaaaatctcaattttactggagaaaaaaaaagcccgtgtagcccgtgtcactttttacacgggcacgggctacgggcttggcattgacacgggttacgggctaaaaacccggaaaacccgtgtgcccgtgaaacccgtgtcagcccaaaaaaacacgggttacgggctacgggcccgtgaaaacccgtgcacgggcccggcccgtgtccgatctctaattttgactaacaataagcccatttcggaaggggaaatcagaagacctaaaaaatttaagcgcggagagcaaaaaaaaatcatgccatttttaggccaaaatttgacaaaaaaaaatagggtaaaatgtgggcccggccgtgccaaaaggcgccgccgggattattattaattataatatttactttttctcccgctttttaagaattcgaataacaaatgaagcagaatcattggcacaaatgttgaaactaattgcactgccctttttgagtatttgggtctaaaataataattgataatcatattttttaagatttatcattcatttctttaatactccattgatctgttgtgccccattttggtcccaatcccaacggacaatttgtgccaatggcagtgccgcatttggcagctttgaagaagcattgccaatgtccttgattttcaatatgggataccagctcttcacaaattcactaaaattagtacatatgtgatttacatagaaaaaatcatgatggctaattgtgctattaaatatgattgcgttttaaatatttttttatatttattttaaaaaattgaaattacagtgcagcaaattgtgtcacatcagtaaatgaacagttggagctggaattaaattgggcaacagttaattggcagatcactttttcttcaacaacaataaattcgtcaaa

SEQ ID NO: 11329 - DNA, 3199 bp, Heterodera glycines
  unsure (1)..(3199): unsure at all n locations
tatctgattttcagttagtgcgaaaaatttcttcatacattacttctgtcaatggattagcataaaataaaaaataaaagaaaagaaaataaataatgaaaatttaaaatcgaatcaaattaaaaataattaatatatattcgaccaatttacaactcattataaagtaataaagtaaatatgatttatttctaagtttatttttagtttatatagaacaaagtctttaatgaattatgaaataaatacagaaataattacttagtgtataaccctcaataaaaaaatcaagacgatataaaaataaatttttatcaggttaaataattttaattggttaataatatcacattctaagattaatgtttttaaaagaaaataaaattaatattttaagaaattcactttaaaaatcctaaaatcactcgtcggcaatgacaagacaataatatattttttttagattttaaaagcttaaaaatttattcattaaataaaaaaattaatagctgcaaagtttgtatttaatttggatctgggttgacgagatcacagaagaatgcaactcatatggtggatgctaagcgatttgaaattcaaataatataattttacaatgaataatattattatctgttaaaaaaagcaaaagattatgtccaatttattaaaaattaaataaatattaaagcttaattaattaaatttgctcccgttgcaaactctgagcacgatacttttcgtacatatttttagaaatcaaaaaaaaaattatagattcaagaataaaagcattcagaaaatgtgagaataaaataaattaaggcatttaattatctaataaagttagataaaaactcaacaaaaaataatattttgggggattttcagaatttttgacatgtattaattattattcagacttcatacataatttgcggaaattattaattttaaataaaaaataatttatattttcaaaattttattatatgtaaaaaataaatatatataaagtaacagatttaaaaaatttataaaactatcaaatttaatcaaaaattaataaattttaaaatatttcctatttctaatatttaatattgctgaaaccgcaggtttagctgcgcatactagttgagaaaagaaaaagaattctaaaaaggtcaaaagagaacaaagaagtcgttgcaaagtattttgaaaatcatctttcagctgaaattgaaaaaacgccatttcgaatcaattgtcaaaagttataatgaaaaatagaattaatatctaaataatttaaaaaatataaattttaaaaacaaatagataactttattttatggattttttctttcctggaattaatttattaaccatagattgagtgaaaaaaaaaaacgaaataagtaaattagaaagagaaacatttaaaaatttggaaacatataaattaatttataggtaattcattattctaaataaataataaaagttacttgggttttgaaatagaaaaatgggcaaaaattatgatttaataaattgttaatataactcaaaaaaatcactggccataaaaaaggatatcgattcaaaaaccctataaggaaattaaatgaaaagaaaaaattaacaaaaatttaaaattactgtgtattttttgaatgttgccatcagcacccaaatcaaaaaaatttggactttgcttggaaatataattatcaaagttaaattgtcctttaaccttaaaataaattttatataattttaactaaatggcataaaaaatcttctttgtatgacatttaataaaacaaaaaatgttatcataaatgtgatttgttagccatcactaaacatcataccttccacgacagagtgctatacatgtgtcaagatacttctactcatattagaaaacaaaaattaaataaagtgaattaaaccgaaacccaaaatacaataaagatttctaatagtcagatacgtcaaaaacaaaaattaatactcaaaaagttgacaaaataaaataagaataatataaaaacctgatcatttctaaactagaacaagaccaagactacactaccatttttcgggcatttttcagtgatcaagaagcacgaaatgaaaaaaaggcaaaacgaagttaagcactacaaaaaattaatcaaagtgttgaatgaaaaataaaaaaatattacagaaaattgcattaacatcataattatgaaataatagcaaatattttctaagtaaaaaataatataaataggcttacatgctcgaccgaaatgtacctttgttaataaaatgataacatagtccattagtctgcaaatatttggccaaaaatcgcgtgaatatgaaattaaaattttcttaaaaatgtttggcttctttttcaagattgtttttttaaatgttttaagtactattaagacttatcattcattatacatgcatttttatgtaaatttctgatttatatttattattatttcttgttcgtatacagagtatgtattcactctgccatgcttgaagcaaaaatggtcaatatttttgaaaaaaattttgcacttttttcttaacataattgattaaaaagtccaaaaatttttcccggcggcgcctatcggcaccgccggactcaagtttaccaatatttttttagcatttgacacaaattctgttttttgtggctccggcgctgaaattttttgaaaaacaacactggtaaaaaaatatatagcccgaagagcaaaaaaaaaaagctcttcgggtgcccccccccccccgaaatttttttctggatacgggcctgctgtcacttaaagctgtcaaatgaaaattgaagctcaaaccctattcgtcacaataacgtgagaatatgcatttgcatattttttgcagccctgtttattagtgcttatcaacattcaaaaatatattttttaactcaatgtattttttaaaagtgaaataacacttttgcatagcagatttaaagagggatggattaattattgaaataaaaacattcttaaataaaaaaatgaataagcaattaatttataactataattatatttttcaaatttaaggttaaagaagaagtttcaaaaatattataatatttctctattcaaagaatcattgtaaatattttaccaaaaatgcantaatgaataattctaaa

SEQ ID NO: 11330 - DNA, 1409 bp, Heterodera glycines
tttaaataaatccatttaaaatcaaagggttcaattactgaataggtaaaagagagaacgccaacagcacataagaaaaaaataataataagtatattgcaagtacaatataatttattaattatttaatctctttcatttattatctaaattataaactgtaaaaaaattatatcaaaaaattttcattacagttcagaataatctctataatgtcatctcagaactcaaaattgaaaatgacactaaaaaggcaagtcatacgaattcgaagctaaaaattattcacgcataacataaatttactaaataatattatatcaaaatttaaaaaataacaaaaatttcggggagggggggggggcacccgaagagcttatatatatttttttaccagtgttgtttttcaaaaaatttcagcgccggagccacaaaaaaaaacaggaatttgtgtcaaatggtaacaaaaataatggtaaactggagtccgggggaaaagtttttggactttttaatcaattatgataagaaaaagtgcagaattctgaataaaaaaatttgctcaatttttggctgaaaatatatcactataacgtcactatttcgaacttttttcactattttctcactattttagtacttttatttcgagatttttcgtcactaaaagtcgcggccctagtaattttttacgcaagacctgtcaaattcctaccttttcgcctcaaggttttttatttttagagcctaaaaagctaaaaattgtttttgataaaatctatttttgcctaaatttaaaaagtaaaactcatttgggaattcggaccaaatatgggtgggtgtagatagttttcgagtggacaatttttttaccaaaatggttcggaatccgggtaaagtaaatgcttttttcgtattacaatatttttcatgttgattaagcatttaaacgagtttgaatatagaatttcctaattgctttttattaaaacttaaaaaaatattttgaaaaattccatttatcctcctgggggataaatggttttggctgaaaatgatgtcattttttcactatttctgactttttgtcactattttagttaactatttcgagatttttagtcactaaaaatcgcagtcctactgatatgtcctgggctggcagatgaaaattttcaaaaccctcatttggcatgcaaaaaaacctcattttgggtcaaaaagcctcatttttacaaatttattcaaaacacgtttaaaatgttaaaattatttttgacccatgaccaatttgagcaattttttgtttgaaataagcattttgtgaaaatcttagcatgaaaaattgaaattgatttttttttgcggcgctttttccaaaaacttttggggaacaagggggtccggcg

SEQ ID NO: 11331 - DNA, 1454 bp, Heterodera glycines
aaaaaaatttttttttttaatttattattgttttattttttagttttttgtaatttttaatgtgatttgttaacagatttctccacaaaaacatccaaattttgcaattttgagaaattaaaaaaaaagaaaaaaggatttttagggtacggcggtgccgatagccgccgtcgggaaaatttttataattttctggctaatggatttttatcgaattttttaatgtttttatttcttttatcattttacttgttaaaatattaactttgttgttatttcgaatttttatgtgtttttatttatcggaaattaaagcaactgtcgaagcgcagcttaacactcgaagtcgcagctctaaactaagtctaattttttcgaagcccgaagtacgaagccaaaaaaacacgtaattttcgaagctacaagctttaagaatgttttttttttgaataggtttttcctataaaattttacattttctttcttaatatacaaaaacagaaaagaatgaaaaaacaattgctttgtggggacctataacaacgcttaaaaagaatttttcaacaaacgaatttatttttagtttgccaaaatcatcaagtgtgtaagaaatttggtctcggttctccaaaatttagacaaggctgcgcgaaatttcgttttagtgtttccgtcgtttttggtacctgttgagtaaaaagatatgcatatatatatttatatatatatatatgtatatattcgttaatattcgtttattgtatttttaagatttgcaaaaaatgctttcatgcccccattacgaaaggctccccaggtcacttcattacgttaagctcgcctttggtgtgaaccaaccttataaatgtattttttctaattttgtatatttacttttatgaatttttatggccttccagatttctttgatttccaacttttttaatttttgaacaagcttcttatattttggttatttcatttaatttatgctaaataataattattattttcattcgattaaacttttgttgctccgatgctttacacttttttagggtactgttttgtgattttacatgataaattatcttttcattttatgactattaatataataataatatattcgaaatctttttatttagatttggcttaaattttatatcttggaggtttctgagcttgtaaacctgactctctaatacacttagcttttcatgcaagaaaatatttgaaacattaaaatcctggcctgaaaatttgtatttaaaattcaaaaaaaatcgtgctcttttttaccattgccttttttaattttttattagcattttttttgttttgtctaaaattattttcaattacatcgtattttatttggaccaaaacaaatatttttatcttttgggttacatgtaaagttataaataaattggtttccccacttccttttg

SEQ ID NO: 11332 - DNA, 1359 bp, Heterodera glycines
  unsure (1)..(1359): unsure at all n locations
cctttgaaaataaaaaattattaattaggtatacaaatactaactctaaccaatttgtacctgttttgtacgcccgttcagtgactgcataacggtaagtgccatcacaatattcggcaacaatttgatcaatgtcaaattcgggcagatcaatttcagggttgtacaggattggttgacgccgaaaccatgtgacattgacaattttagcaatgtaagcatctgacagaaatcatattaaaagcttttaaatatacatataatttaaaaagtcattattcgctttataggcgaatttggttacattttgacataatttttgaaatttcgtctctttgatagagaatttagttttattagtttgcaaattttgatttaatgaaaatattgttgctcgaacttttccatagattttttatttccaaaaaacttaaatttataaaacagctaaaattttaaattttcggaaattttaagatacggaagttttaaatattaatttctttttgttgtttttttaaattaataatttgttttaagcccttatttatttcttttgtaatctgttaattgttattcacatgacagcacgcgaatgtggcactgttgctcgtccatgggatagtcttgcagctttaaattgcacgccaccgtcagtgttactcggctcgaatatgataccgtaccatcggtggagataaataaattaaaattgggtacagtaacttcatggaaatttgcttggcgagcattggcaaaatacaggtcgggcaacctgtgggaaaattcaattttaaaaaagaacaataaatatattattgtcagagaaaattttttaattagagggcaataaagaataattttattaaaagtaacttaaaagttaattgaacaaaatttttggttaatttttttttggggggggtgaaatatttggttaaatgtaaaaaagcatgttcaaaatttaaaaaaataacgattttttccaaaaagtttatgactaggtggatttaaattcaaaaatatttaaataaatatttagaaacaacaccaaaatatttaagaaaatatcgacaaagttgcaacaaatttttccagggttttgaatggatttttaaatttcaaaaaacaaaacaaaaaatagtggaaaatttttgaatttttccattcttagaaggtgtatttaaaaaaaatattcgacaaatccttcggtggtnggatttttggttttgtagaattttgtgatgaattttcgaaaagtgcgaaaaaatgctaaaacttctgatatgtttatataaatattttaaaaagaggcccaaaatattttttattttttaaatcatgccaaaattcttttct

SEQ ID NO: 11333 - DNA, 4447 bp, Heterodera glycines
ttttaattccgtttgaatttacttccaactgactgtacatatataagtcaacatcaaaagtctaaatttttaattaggtattaaatggaatataaaaatttaaatgatttttaatttaaattgtttttaattgaatttttaatgccgttcataaaccatttgagtttctcgaaagttgccaagactctcgaggtagaagcccaattgtactgacaaaggttcaccatttgagttcgatggaggtcgacgaatttttcgatgcaattcactggccataaatgttgtagctgactttgttttcgttgcacgaaatcgttgaagttttttctgttgattatggggaaatgcaaactaactttaagagaaaaaatgttgaaatttatttattcaaaaataaaaataccaaaagaagggcatatgccacttacacttttggtgagtatatgtccatttggaatgaacgaaattaaattaggaattgtttttcaaaatttagagttataatatattgatttcttatttaaaaaaaatattaaaaaatatcttttacacaaaaaataatatttttgaagcttcaaaaataattcttttaaaaaatcgctaatttcgtcttaattaaattataaatttattccctcccttgaccaacgactttcgactaattaataaacattagtcaattaatttatttgttaatccaaacggaaattttttagtaataattatgtactattttaaaaggattattatttaggtattttttttttaaatttaattactcaccaatcgattaggtgcatgttcagtggcacggtgatatgcgacaaatggttcatcagaatgtgtgtatccaagaatgttttgaccactcaaatgtatgtatttttaatatatttttgtataataaatataaataatataataaaaagaatattactgattttgatgaaaagcatataattgtagccaaaagctgatattgattttaagaaaaattaaagcaataactgcgttcattgtgaagaaaattttctttttttctaaaaatgattttattttattttcaatttccatttgctatattagcaagaataaattttaattgcgaaatatttgataaataaaataaatattgtttattcaaattgaaaaaaaaaaattaagaaatatttgtaaattagcacaaaaattaaaaaattattaattgaaaaaaaatatttgataaattattcaaatttttttttaaatagaaaattaaataaaaaaaaattttttgccctaaaattatcgaaacaaattaaaggaaaagaaaaaattactttaaattgaaaaagtgtgttgaattggctggccaaattttgggtccaataatgaggcgtgtaaaaatattttgagtgaaaaattgttttaacggaatcaatttggccgaaacataagcttttcaaccaacagctgcttttcttctgacccaaattatttaattgtttggagccttgacactcatggacatctgctgctgtttgagttacgttttaataaatcacagagaattatttaattataaacgggaaaaggaaatttatgtatttgagtttaaactaatgagaattttaattagttttttttagaaaatataaggagaactaatatgcggtttaataaatttttgtttttattttcttctataattaatgtagaaaaatttgtcttttttctaagttattttgacaaaaaaaggtgccatggatcgcaaaattacttacatttaccaatgttttgaatttttataacctattatttgatttttatgcatatttcacgtgcctaaaatagaatacttactgataaattttgtaaaaattaataagttattaccaccaggaacgcattttcagttttttaataatttttttctgcagttttttgactcccctaaaaattctcaatgatatatcgaaaaaaaagaaatttgaattcctgggcggtcagacttccataaatccaagatatttctcgcttcagattctcgacaaatccatctgttcatttcatagttttattgcttaaattcaccaattcttagacattgattaaattttttaccaacaacttttatattttgtgtgtgtttttaacttctttcataaagcttaaaaattatttttggttttttatgaaataaacgcaattaaaatttatttcatatttatgagtttattttatttgggcattgaagcgcatttattatattttattgtttgaatttaatttgaaaaaaattattcacaacggataaaaagttcatgttgacgagatttgctcatatttaaacaaaaaaaatgcagcacaattaggcacggtttctatttatattaattttaaacatttgaaaataatttttattcaattccaaaagaaaaaaaaattcgaacaaaaattaattttactataaatttacctaaaaaaattcttaataattaaaaaaaaatattaaaatgattttgagtgcaaatgtagatgctatttaattttcgaccaattatgtttaacgaaggattttgaattaattttaaacatttaaaacaatttttattcaatttaaataaatcttcgaaaaaacaaataaaggttatcattccattcttaatcactttttaagcgatgccctcttcatctccaattgttggctttagcctgcttctcgtgctgattgcacaaaatgtttttgtccaagggtttggcttattaaattccaaaattgacgctgcaagcaaagcgtcgattaaatgttgtgtgaaggaagcacatctgagtatggaatgcgccaaatcaggtgagtaattattcaattttttgtgcttaaattttttaggtataaataaattttcttttatttacatttattatttactggaattgcgtacattttttgcgcatttctattaaaattccacaaaaacgggcatttcttaaatgtaatattagtgctctaacaaaaaaaaaaacggtactagtatttgggtacggcattttatagcaattttcaatttaaaaaaaaaattaattgttctattcgcttcggaacacacgcaggcgaaatcgaactttgaaccaaaaaaaatgaatttaaccgactggaccattgtttatgttgaaaaaaggacaaaaagggacccaaaatttcatataatagcctaatttgacatttttggcatcgttggatagtcctaaatgattctcaattaatgtgcaaaattaatttgttgcgccttttctttgacagtttgtcgttacttcggcgacaaaaattaccccgacaaatgcaccgtgccgatcatgcacaacttcaaccaaatggtcgcctgttttggcgcacacacggacaaccgaggtaaacaacaaaaaaaaatgcatcattattttgagtgaataaaatttgcttaaaattgggttggcccactccaaatccccggcacggttttacaaatattccaaatgattctctatgaaatttccttgtcatggcatttaaaattttctcttgttttttgcgagttatattaattttcaaatatatttttaaattttgcattcatccccaaaaaatttgtctgagattagcttttcgtccccgatcaatgacaatcctgctctaaaattaaaactgaacaatacctagtttttaacaattttgcaaaagattaattttatctagtaactttgtaatggaggttttggaattttttaaatgaaataattatttaaattagaaaatgccaaaatttcatcatttaagcgtgttgcaagcgtaagggcgtcaaggcaccgtgccttgacctgtgcaacgggaagaacccggactatttgccggacccggcttatgtgccgtgcacattccctggcaaagtggacaatgccatccaaaagtgcaaccacgacgcatggaaaagaggctaaatggaactcggagaataagttcaatcagcagaggaaatattgtattaacaatagaaaaagaattgttgaatcattaaaaatgtaaacgttaagagtttcaaattatttttttttaaagaaagatagaataaactttatgatgaaaatgaaataatgtgataattatatggaaacaaatcaaagaaaaattgccaaaaatataaaaatggacataaattttcttcgggtgagatttctttaattttattccaccattaaatttgtttttaaattggaaaattgcaaaaaaaataaataataaataaattggacacagaaaattgacattattggatttgaaaataaattaattaaaaacaaataaacaaaaattatggtttggcgaaaaaattttttgttttaatttgcacatctatttttataagcataagaaaatgtaaatataccagggctcgcaaatgtgcttatttctaagataaaagccgaagag

SEQ ID NO: 11334 - DNA, 4345 bp, Heterodera glycines
  unsure (1)..(4345): unsure at all n locations
tgattttgtacaaaatttaataaccggacccacccggtcgggtatggattttaaaaaccggggttcgggtgttgaaaaaaccgggtatatacccgggtcgggtacccgtacccgtctacccntagaacagagtgaactttaagaaatcccagagggtttctaattttattaaatggacaaaataatttttggtctttttgtgcgtgaacattgctgccaaaagtcgttcattgcataaagagatattggaaatgattaactcattcaattattaaagaaaacagagattcattaaaaaagcatttattgttaaaaatatggcgtatttggcttgagaaatgttaaagcacaacaaaaggtaaaaaatatacagaaataatggcaaataatttggtctggttttgaagatgacaatacaaaaatgtttaaaggttaagggtaaagtaacagccgaagggtttttccttaaataaaataaatctttttttaatctcatacataattaaaacataaggaaacccccaatagattgcattcgcattttgtttttgcttaatgatcagatcagaaatgctccaccaaaacttcgggaaaattctctgacaatcgaatacgtccttgtgccatattttccgttttctgcttaaaattgtgttggcctgccgttctctgcattccttcgtctccgatcggggtggtgggcggcggacccgcgggagggtggcgttgttgtgcgagtggaaaagtcggattgtggggcccgacggaagtgagcgaagggacaggcggaaggacggctctaaaccatgcgagtggtgatgaactacaaaagtgtcaaagttcgactttctccgctgttccgatccactcgaaccgtcgttggaattgttgcttgtttgactggtagtcgcaccgaactgttcctgctgcacccgcgccaatttgttatgactgttgctactcattggcattggacagtaatttggtgcctgttgtcgcggttgaaaagcaatgggcgcgttttgcaagttataaatgtttggggctgtaggataaggcgaaatggacggcatcgaggcatattcgctaatctgttcaatcaaataaaaatttatttatttctttgtgattaatttttattctgccaaaaataccatagaagttccggtccccaaattcgttggttggatgaaattgggttgttcctgggctctgtttgagtaaaggactgtcccctgttggtggggattggctatttccatgtgttggaattggttttgcatgttggacaatgtgccgtcttcgggaaacgatgcacgcaaattgagcaattctgaaaagaaaagtgcaattaatcagtacgattgtaataaataaataaataccacctgcgctttgttccccaaaaatgtaataacattgttccgtgaaggtgaccttgttgaccacatgtgcaatgaatttgtccttcagcagccccgaggcgtatttcctcgcctcctttcggtcgtccaatccatcgacatttccaataagccaatcgatgagagcactgcctaaacacacggaaattgctcttgtttttgtgccacaaagtttgtcaaacctaccgagaaaagacctgggaatggggattttcagccacgttcgatcgcgaatgtcgaggccggagttctaaagaataaaggtaaaatggagacaaagtgcggcgacagtgccaaaagtaccggcatagccaatgtttggatcactttgcgtttgtcactgtgtacgtccagccgatgttgctgttgcatggacagaatgactccgcccgggccgacgatcgtttgagccgcaccgccgccggaccccgtcgaagtgctgctgctggcgggcctttggctgggaacggaagtcggcggtgcgaaagtgtgcagaagggaggaagacgtaggcggaaaatggccagacggaatgggcgttggcgtaccctccgaaccttaacttaccaatgctttaatggttgaacaaaaaccccaaagttttgctgcacgagggaccatactcatgattagttcactttgacaaattttggctttcatttactacaatacataaatattattttagtttaacataatcaaccagttttgagccaccttttttattttgcccttaatggaaatcaacccaagcaacaaaattcgtctgttatagtcattggtacctaatttataagtattttccgacaaaaattggagtttcattatcaatggaaaacaaaaattcttaatgcctatccaaaattgttgtccgttgttcaataccaattcccacccaaattaccctcgggaatcgcgttcatcgcattcacaagagtgctggtcatgcccctgactgcgttggtgtgctgaacccacgcgtgggtgtcaatcggtctgaccggctcacgcgatggcaccgaaaaataattcgttcggttggcatcgaagcttttagcgactgttagctttatcggactaaaggtggtcagatttggcgttgtttcgtgctttcactttgattaccccctcgtgttcactgcccttttgagcacttcgactgcctggtcgttcttgaagttctcgaaggatatgtcattcacctgcaaaatcatatcccccggctcaatacgaccgtccaaagcaaccgcaccttataattgaaacaaaaataaaaacgaaaaacaattttccattaactcaccgccgggcataacattggcctaaaatgggattgcgaagggtagagcttatcttgacgggacttaccacataaatcccactgtcgccgcgaggacacgactgaccaacaatggaaatgcccaaaaaattcaccgtgttcatgttaagctgcaaatggcaaaatggggcaagtgtccccccccccaattccctctttaccgtcacagtaatcacttccaatgccatcgaagtttccgtcatagacgaaagtgaagaagttcgcgatggttggcgacgagttcgctggttctgtcttctcctcctgcggtgtatgctgtagtgctggcgtgacactgaagtgatgttgtccgttgaagttgacaaccttaaaacggtgccacaattcattgcttaaatcaggcattttatttttgggtgccatttgctgactctaattccgattttgcaattcgaatgtggctcagaaaccataaatttgatgagttgccaaatgcggcgccgccgccatttccgttgctgctgcttttgatacatttttttcttgaatgaccaacatcccgctcatcctcctcacattcatcattgccagaataataaccactcattaatgacgctaattattcaagaattcattagagtactaattaactccattatcacagcgaaaatcgggaattgagaataaagctagggtaagtctcattttatatttgggatttgttttcgggagcagttcgtttccaactccacggccgaaaaattttttttttcaaatctagaaatttgtaaagaaattttttaagcgattttcttaaaatcttatgatgaatttttagcttttgaaaaaattcccgggggaaataatacgggggggggagaaacggtgcttgtggaaatgtaatggaccctttattttctcccattccattccagatttgacaaaggatgaaatgcaaagcgattatttacccccggggggcagtgatggccaatggcaactcctaagggcgtaatccttcactgtcgcactcgaaagggaaagaagttcccgtccccgtctctctttggttggtcatttaatgcagcaaatggacaatccgtcacaacaaaataactctttttccggggggggggggcgagccgaaagaaaaccgcagcagtataaatgcgtgtccagacatttgctcattcaatgaatgtgccaattagaaatgtccatttgtcgttggaatttaatcctcccaattttgacattttacaattcattaattaataattttcaactcaccgtgactcatcgtccgaataaatccgtccttccgtctctgttgtgtaaatagtcgaatcttcgaaggctttatgacggttcccttaattttttttctacttccttgtaaatcaacttcaaaaaacataaacactccaagaccgaatatgatcagttccaccctgacatggaaatttatataaaaaattagcctaaaattaaaaagaaaaattcgcccaatgttttctataatgtcgtttttgactaaccaataatttcaaaaaaattaaaagcacctgagataatgtgattatcaagtcgataacgaggacgatacaaatgggagtttgga

SEQ ID NO: 11335 - DNA, 770 bp, Heterodera glycines
tgaatgaccaacatcccgctcatcctcctcacatttgtcatggtcagaataatacccactcattaatgacgctaattattcaagaattcattagagtctgaattaactccattatcacagcggaaaatggggatttagaataaagcgagggtaatcctcattttatatttgggatttgttttcgggagcagttcgtttccaactccacggccgaaaaaaatttaaaatttttttttcaaatctagaaatttgtaaagaattttttagcgattttcttaaaatcttatgatgaatttttagcttttgaaaaaattcccgggggaaataatacgggggggggggggggagaaacggtgcttgtggaaatgtaatggaccctttattttctcccattccattccagatttgacaaaggatgaaatgcaaagcgattatttacccccggggggcagtgatggccaatggcaactcctaagggcgtaatccttcactgtcgcactcgaaagggaaagaagttcccgtccccgtctctctttggttggtcatttaatgcagcaaatggacaatccgtcacaacaaaataactctttttcgggggggggggggggggagggcgagcccaaaggaaaccgcagcagtataaatgcgtgtccagacatttgctcattcaatgaatgtgccaattagaaatgtccatttgtcgttggaatttaatcctccccaattttgacattttacaattcattaattaataattttcaactcaccgt

SEQ ID NO: 11336 - DNA, 2337 bp, Heterodera glycines
tgtaataaaatttggtgcgctttagagcactttctcttcctaatatttatgaaacaaaaaaatcgattttttcaagtgtccgtttggggtactcaaacaattatggggagcaaaaatccaacgcagaattaaagtacaggctatagggaagctattccggaaggattcggtctccccataaatctgggcgcatcggttcggggggactgccccgaaaacaaaaaaatcgattttttcaagtgtccgtttggggtactcaaacaattatggggagcaaaaatccaacgcagaattaaagtacaggctatagggaagctactcccgaaggattcggtctccccataaatctgggcgcatcggttcggggggactgccccgaaaacaaaaaaatcgattttttcaagtgtccgtttggggtactcaaacaattatggggagcaaaaatccaacgcagaattaaagtacaggctatagggaagctattccggaaggattcggtctccccataaatctgggcgcatcggttcggggggactgccccgaaaacaaaaaaatcgattttttcaagtgtccgtttggggtactcaaacatttatggggagcaaaaatccaacgcagaattaaagtacaggctatagggaagctattcccgaaggattaggtctccccataaatctgggcgcatcggttcggggggactgccccgaaaacaaaaaaatcgattttttcaagtgtccgtttggggtactcaaacaattatggggagcaaaaatccaacgcagaattaaagtacaggctatagggaagctatttccgaaggattcggtctccccataaatctgggcgcatcgcttcggggggacggcccgagaagccaaaaaaaaaaaaaattattttgaaaaaaaattattaaaaggaaatgactagttactatttgaataggttatttcgcgtccgttcaatgtccctgcaaagtttggtgtgcgtgcttctgatcagtttctgaaaaaaaagttaagcctaaactttttggcctgtttaaaaaggaattaaaaatttttaaaaattttattcatctcccttttgatagaaaaagcatcagagagccttatttaacttttaattaacatttggtgcgtttcagagcacgttctaaaaaatatttatgaattaattttgcaaaataataaataattaatgaaaaagtcagaatttcgaaaaattttaaaaacaacaagcgttggcattttttcaggttaacttagtcctttacaatggagaaggcctgcaaaatttggagagattatatcgattttagcgcgctaggttcgatgaaactttttaaaatataagcctaaactttttggcctgtttaaaaaggaattaaaaatttttaaaaattttattcatctcccttttgatagaaaaagcatcagagagccttatttaacttttaattaacatttggtgcgtttcacagcacgttctaaaaaatatttatgaattaattttgcaaaataataaataattaatgaaaaagtcagaatttcgaaaaattttaaaaacaacaagcgttggcattttttcaggttaagttagtcctttacaatggagaaggcctgcaaaatttggagagattatatcgattttagcgcgctaggttcgatgaaactttttaaaatatgagcctaaactttttggcctgtttaaaaaggaattaaaaatttttaaaaattttattcatctccctttttgatagaaaaagcatcagagtgcctaaactagcatgtaaataaaatttggtgcactttagagcactttctgaaaaaaatatttatgaaacaaaaaaatcgattttttcaagtgtccaggtttggggtactcaaacatttatggggagcaaaaatccaacgcagaattaaagtacaggctatagggaagctactcccgaaggattcggtctccccataaatctgggcgcatcggttcggggggactgccccgaaaacaaaaaaatcgattttttcaagtgtccgtttggggtactcaaacatttatggggagcaaaaatccaacgcagaattaaagtacagactatagggaagctattcccgaaggattcggtctccccataaatctgggcgcatcggttcggggggactgccccgaaaacaaaaaaatcgattttttcaagtgtccgtttggggtactcaaacatttatggggagcaaaaatccaacgcagaattaaagtacagactatagggaagctattcccgaaggattcggtctccccataaatctgggcgcatcggttcagggggactgccccgaaaac

SEQ ID NO: 11337 - DNA, 4676 bp, Heterodera glycines
caaaaagtcctttatccacattagaagtttgccccttataccaattttttccaatttgtataaaggtaagttatggggcactgatcaaatgcttttttaaatcaatataaatacagtcaacattttttccaatttttatccggaagttttttcaaaagattttgggtctcgatgatgttaaaatttatatccgatataaagcattgatcaatttctataatattacccaagcatgaattgcttgggtctgtttcacaattattaaacgaattggcaaataacttggcaaatatttcacatttctcagcactattatgatagcatttatcttcataaatcagattaggtatttcaaagggattgacattaaatttttgtatatatttataaattgaatttcttccctttgaatagcctttttctcaatttggctatggtatttatttgtttgtatttttatatgtaaagaaatgctatcgtatagtgcttttttggatgggtcagttttagcttgcctgaataatttagacttctctttgatggatgctaataaatgttgtgggtatttgggagttaaatctttcttggtcaaacgctttattggaatacactcatttaaaatgtctaacaacactgttaaaggcggaatatttttgatttatgcaaaagcattcatatgacaaggcatttagccttgatgctatgactatattaaaatgtaacacattcgatggacaaaaccaacgaaagtttacgatctttgtttttggttttgttttaggagtaattaatgtgaaaaattgtgttaaatgatccgatgaaaatatgcctcctttaacagtacaatcagtaataattttttcattggccgaaaaaatcaaatctagccaggaattaattcgtgttggctcattcgtggccaaaacgtaagaaaatctgttgaaaaagtcacagaatatttcaccatatttactcattgaatagggatgcccatttttccataccaatccttattcggaaaattaaaatctcctaaagtcactgaattttcattaaaaaatttttgtaaaaatttaaacaaattttctgtttgtttgagtgttattttcggtggtttatacaccaaaacaaatctgatgcactgtaaattttgaagttgaataactaagatttcggaattaaattttgaatccgaaaattttgtaaaaaatccaatttcttttctgattagaataccacaaccgcccccacatgttttcgatttccttgatgagaaaatataattgtaattatcttttacccaagggcaaaaattgatttcttccccgtctttggtccaagtctcagtcattaaaaggatgtctattttttcggtttctaagataagtgcaatttcatcgattttattccttattgacctaatgtttattaggcagcatttaacattccctttattttttattaaaaagtttggatgagtaattttttggtagtaaagttataaaccaaaattgacttttgtgttgacgcttttaaagttgtgaccatttatccgaattaatttcctcttcctcgccggattccgacccaaaaacccgaaagatcgtactcatcggacgcacgcggcggtgaatttggagtaatgattagtgcgaaaggaaataatttggtggtttttctgctgtcgaaaatggtgcgccgaagacgaagacgacaccagcagaaaagaatagcagcaacaacaacaaaaacaacactccaccgaaggcggcagagcaaaaggaagaatgttttgtgccggaagcattgcccagcggcgtaatgtccgatttagcaaaagtgaacgcgaggttggccaagaggaagaagcagaaggctggctgctgagtgttgtgtgtgtgtgtttgtgtgtgtgtgatccatgaagaagtgtgatgattttacaatttgtttgtcatttaaaggcccttgtttgggtacagtatacaaaccatttttatacagtatcccttggcttcttctcgagcaaattgtattgtatgtatatttgtcatttttattacgctaattacatattaacttaaatagaaattaaaatcattctgattttacgtgtaattaccattttagcttaaaaaagagggaatttagtagaatttttgtgccttgataactctcgcaataggcaactcgtacaaaaataattctcctgggctctattatggtttgtcccccataaattttttgaaaaatctcgtatttttcgttattttcaattgtttatcacgtttatcttttttaaaccttttaataaaagacaaaatcaatgaatatgaatgaatttattttgatcagaatgatcaaagtaatcaaatgaattttctcaaattttttgtcttccgttttattgcgtagtgaactggggggggggggggtaattaagggagttaaaaagttataagaaaatcttaacttattaaagggccaccaactgcgtagtaatttttgcaaaaatcaattttggtgtaattaaatttttgcttagttagtttttggttatcaaaaacccccaaaataggtgctaaaaatgggaaaataggtgtcataaagtccaaatttagtggagtgtaaaatcgtaaaatcatccaaaaagtgtcgccaaaagcgacacaaatttcttggaaattttcatttattttttgatacttttcgtcgatcaattttcccattcgctcgctcctcttttttatgactcagctctttttctctcttcattttcgctatgagtcaccatttttaatggatttttgtccatctgtttgtgcacatttttcacgtgcctggctccgcccctattgatttgtgagggtataaaagccggcccattctccatttttttcactgatcaatttttgattaagtcagccggacagttttctgtccaagcaatttgcattaaattgtaattgtataaattgaataaagattaagaaaaggtcttaaatgggacactcaggagccctttaatacagaccattaagccattgacccccgttgggtcaaaaaaggcttaccaaaggaaggagaaaggatttctccttccaaattgtctcttcggtagaggagaggaatttcctcctttaatttgtccctttggactctgtgagtttctgtcttctggacagaaattcgctttgcttaaaagactccccccttctgccgggaagtgcaaatttttgtggctttttgcccacaaaaagcaacaaaattaaatcaaattaaataataatttaagcatgctagaattattctcagaaagcagcccataacaaacctccgtaaaatttaaaccttaattgaagagaaaaattaaatatcgacttagtgtttgcgttctgttagaataaggagttgtgtaaattaattatatagctcaaataatcactttcaagtttcaaattcctttttggattagaataagacgagaatttgcttatgcaaatggtgacgaattgaaagcgccaaatttttcttcaaattcatcttccatcatttttctttcacgattaattgctaatttggccattttttttaccaatttcgacttttcttctgctactttttcttttgtattttcatatatttcttccattttttggtcaaattctgtccgaagtttgccaatttccgtcgattgtttttcgctttttctctccaaattttgcccatttttttcttcctcttcaattgcatgatttgtttctttctcattttgcaattccatctcataatttccataggcgttctcacattctttttcgccctttttccaaaaacatttcgaaaaattattcagattttgaataatagaaattatttgcatgaattgccaatatttattaccccatttaaaaattggctttaccgctgacaattgatttgtcatatttgcgttttttgcttaattattttattaattaattaaatgatcattaaatggaaagcaaaaaccttcggcagatattctgaagaaatattcatacaaaatatgcaaatattttttgtatttttggcacttttcttttaaatcctctccaactttggcacattgccaattttttctcattaaatacacaagaccaaaataggccccatatttttgtaaataaaattcctttgatttctcaaagtttgaatattctttaagcatcctataaaatttctcaaaatttgtctcttgacctttcacaaattcagtgaaaattgcatcattagtcttaaattttggcattaattaaaacaatttgtttttaaaagactcacccataaacaataatcatcaaaaatcgatcggacaattatgtcattcgtatcaaaaattccatatttaacatataataaattattatcttccctttttgcccgttgttccgcttttttaaacatttcccctaaaatttcgttaaaattctgccggaatattccgtcgacactttcatttgtttggcacccataagctgtgtcaattgccaattgtaaaatcatttcgttaattggcacttttggtttttcgttgaccaattttacattataattcaatctatgctcatttaacaattttggttcaaatgataagtgaagagcttgtttaattttcttttataattccacgcact

SEQ ID NO: 11338 - DNA, 1363 bp, Heterodera glycines
cataggggagtttttattgcatttttgttaaatttttttgcaaaacgccaaaataggctttttcactttttcttcaggtttaaaatagagtgccacgggactgggaattttggcaaaaccgggaccgggacttgccgggacctgagaagccgggaccgggacctcgattttttttcgggaccgggaccgcaagaaaaaccgggaaccgggaccaaccgggaaatttcaaaaatccaaaaaaattttaaaaatttaaaaaaaaatcaaattttaatttatataaagtgaaaataatacaaaattatttggttttttatttaataaaacccaaaataaagctaattaaattaatgaaaattttcaaacaaattttcttcaattatttcaaacaattaatcatttttggactaaatcatcgaatattaatagaaattcagatttgattttcacatcactttttttcggagcgctttttcaaaaaacttttgggaaagaaggggtccggctgtgccgataggcgccgtcgggggaaattttaaaaatttgagtgagctttgttaacagattttcaacaaaaaaaggttggtttttgggattattaagctcaattggtaggattttcatttaaaaaacgataaaatatgtatcaataatctaatttctgtagagggattgaaccaggggaaagaagaagggaaagtcaaggagactagccactaggccatttgcacacttggaagtgttacttttaaagaatatatgtattaattatttttttaaattttttcctttgactctaattttcatcactaatttttcactcagacccccattcttaccagtgcacaaaatttactacaatatgcaaaaagaccgtaagtctctgtgcccaatacccgctgaagtatgggcactttctgaggtatgggcatatcaattttgatattgattcatctctactgtaaaatgcattatttctttaataaatactagtgatgttcgagaccgaaaatttcccgagactcgagaccgagactgaaaaccccgagaccgagacccaaaaaacccgagactcgagacttttttcaaaaaattttcctattcgcttaaaaatcgtttaaaaatttttttttgactctattcttaactaatttttggttttatttttattttgattcaatttggtacaatatttatcatttcaaacaagcacaaagcaaaaaaattagtttgttttcttcgcagtttttgtgtctatttaaaaaaataaagggtattttgaagctccggtggagccgataggcgccgccggggataatttttaaaatttgagtgaaattttgtgaacaaatttagtactaaa

SEQ ID NO: 11339 - DNA, 2013 bp, Heterodera glycines
tcaacattcaaaatgaaatcgatagtaaattttgtgctctttccaatgggcttactcaaaatttcaagaaaaattttcccaacccccttaggaatttttttcgaaaattttcccgatttcaagccatttttggcttttcagatcaccatgaaagagtgatctgatcatgttggcgtaaatgacttttttgacgagcataaaaagttatgttatcaagaattatttcagaacttttggccgataaaaaattaatttattttgtattttcaaatctatcataaacttatgaccacccaaaaatagggtgtggtacactcaggcgaaagttgctccgtcactaaatattccctagagaagataatgatgcctttggaaagcccacagaaaatgctataaaaacaccacaacattaagctaaagatttcattgaaaagttttatcaaagcaaattgcaattgggagcaccctaccataaacatatgaccatgacggctacccgacatttgaggacctgacatttgaggacccgacatttgaggacccgacttttgaggacccgacatttgaggatttgacatttgaggacccgacttttgcggatattcccgacatttgaggacccgatttttgaggacccgacatttgaggatattcacaatttcaaaaaaaatgaaattaaatcattataaaaaagagaaaaggcctttcccaagggccaacgggtgcaatgtatcaaaaagcattaaggacaaccgaataatttaaatatttgacagcacaaataatgatttcaaatttaattttggagattaacagcctttttctttcttaatgatttacaagtcatcctaatattcaatttgctcagactaacagcaattgaacacgatataaattataccagctgggaagctcctgtcaatctttgatcattttggatcgcatttaacacaaaaagtttgtaaattaaaatgtatttaaagatatatgaacttttttgcctttccccacaaaaaaatgccattcattagtgatgtgaaaatctttcactccaaaagggtgaaagcgaaatcaaaccctgctggaaactggaagtctttataaattgaaaatttttgaaaaaataaaaatgtaataaaattttaataattcattgattttcatgaaattattctaatgcgatttgttaacagattttgagcaaattttttcaagaaaatatatatttttagggtcgggcgatttttatttttttataagtagccctaaataaaaatgttctgagaaaatattttgggcttctctcgccataataacgcatagaaaaatatgatttaaaattccgggctctgttctaaaaacaaatcttgtctctttatgtttttttctttctcgaatactatcccctgagttggttcaactcattcaatccgctctcctttcttcagaacaatcattaatgactctgatattaaaaagtattataaattcattcttgttttgacttgtggtcctaacaatgattccacatgttaatagaaaaaaggggatcttcatgaattaccaaaacacaagtactatttaatgaagtagttaatcttaaattgtttttgaatatgaaactttagggattaccagcatttggtacaatttattttttgcttccccggccctcgggaatagctttttctctttttttataatgatataaataaaattttcattcattttttttgaaattgtgtatatcctcaaatgtcgggtcctcaaaagtcgggtcctcaaatgtcgggaatatccgcaaatgtcgggtcctcaaatgtcaaatcctcaaatgtcgggtcctcaaaagtcgggtcctcattaaaatttttaaaagtgcttaaaaacaggtacatgtgaatgaattcaaatgtgtaggtgagggataagagaagtaattgatttatttgctgatttttgtgtacaaaacacttaccaaagaccattctttcatacattcgcatcattttt

SEQ ID NO: 11340 - DNA, 2265 bp, Heterodera glycines
gacaatgatccgaacggagaaaacggattccattcttcgacgacgtatttattatttaactaaaaagaattccgtattttaataaaaaaaataaatattcaattttaaggtaaacgctgttatttttatcgccgcaataagtgaatataaccaaaaaactcgtgaagacaaaaataaagtaatataaaattatcccgctattaattctcgtttattacttatatgttattatgtttttaaacaataaaaattttctttttttagaatcgattaattgaagcgttaggtaagtttttacttttatttagagttgagcggtaatcggtaattgtaaaaaaaccggtaccggtactgaccggtaatgcaaaaaccggtaccggtaccaactttttccaccggtaccggtaccggtaccggtaaaaactggtaattttccaacgtaaaaatttttggataaaatttttcaaatacaaaatttttattcagttttcgcgcgagtgcctgttttttagcattagaattgttcagaagtatatgtacactgtgttgcattagaatgaaaggatgtcggaaaaaaattttacgaatttttttccaaaagctgtcagtttgattcggttgggcaaatgttagaggcgatttaagccttttggcccttaatttctcctgaaaacttagaaaattcaacataactctccccaaaagacatatttctgtacgcaaaataaacagaaatgtgaaaaaagatttgttctttcttatttagcatgtttatcagtttctttttagtagttgttgagatttttcttagttttccaaagtgtccttattctaatgcaacaccccaattttggaaaaaaattcgtaaaatttttttccgacatcctttcgtattcttattgttagaatcttaatattttcagaattgctacgtacagttaaaatttcagatcgattggttcatgggaagtggtcaaactcccaaaaaatagggtgtccttattctaatgcaacacagtgtatattgagggtgaccaagtatttttttcaaattcaggacatagaacactaaaattcagatgtagacctcaaaattcagattattgcaaaacaagggatcagcggccaattttccaattttgcgaaggggtctccggccatgtaaattaatgtaaatcaatgaccttttttgctttcaacaccgcttttttcgcggcacgttttttttagccagttgaccacttatgcatatgaacaaatgctttaaatgaaaataaataatttaatttttttttctcaaaaaatttctccttcttcaccaatttcctactcttttctcacgcagacccccattcttaccagtgcaaatttttaccggcggtaccggtactagacaaaccggtaccgatactttgatttttgaaaaaaccggtaccggtaccggtaccaaaaaaaccggtaattaccggtcggtaccggtaccggtaccggtaccgctcaaccctagatggacaaacagttcacttgtgaataatggtctgtaatactgtaagatattaatagggaatgtttctttcttttacagaaagtggcaccaggtagaaaacttatataatgtgtaagaagaagtgcgacatagatacattctatctttattataacgcgcgcaagtagatcgcacagaatataacttctgagttacaaactgttattatttcaagacagaaaatagatgaaaatttatattttaagatgatgttctcggtcgagttacagttcaaaagaaggatgacgtgccacagaagaacgggggacggaacacctatttcaagatggaaaagtgatctctaatcattcattctttgatttttcgttaaaatgagcaactctttctttgtaattttgcccagcaatacgccgggctttgtcggaaataaaacgaataaattcaaagtgcacttgccaaagaaattagtgtttgatgggcccgggtggatggtggacatgtctggcataatatatcccaacaggtgagttgtcttgcacagttttcgttgcaattgtacggtttagttgggcgactgtagggaccctggagaggcaatacgtagtggttcacctgcgcgatggtcgcaagttccggttcagagtgccaaggggtagcttcctttcgcctcagcagctcgaacgcggaatgcaccatggcatgatatcggaaaatggaaagacacctgacccgaaaaagtcaatacagtaccccgatga

SEQ ID NO: 11341 - DNA, 2639 bp, Heterodera glycines
ccggatgttctatttcatgaaaacaaaaattttttttgccataacatttttttgccaaatttgaatttatgtttgcaaattttttgctcaaaatctgtaaacaaatctccattaaaagccaaaatttactggcgtcgcctgcagtcagctatattttgttgaaaaaatggtgtgaaactcataaaaaggatcggctcgtctgtacttttaaaacagttttggctgctacgaaccctggtttttcgtattttgtcttcattttttaatacataaatatttaatttgttttttattttcatcaataagcatgcaatcacaagataaattagttatgccgttgaccacactttctggccacccggtgcgcatcatttacggcaccgcatggaagaaggagcgcaccgcggagttggtacgcagcgcaataaaagcaggcttccgtgccattgacacggcctgccaacccaagcattatgacgaggtgtgaacagaaacatattcattgcggcactaacttggtcaaaaataaaattttttttttgtggcataagaaattttgagggttgggcacttccatgtatggtccataaatagttagtattcattatatccatttaacgcaataatccccctgaaaaaaaattatgaagtgagtaatccgaagacctttttttgctcttcaggccaaaatttccaaaaaaaaaagtttctccggtgtaattttaaaaaaatttcagccgagcaaaaaaatcagaactttgtagccgtttttcaatgtaaattttgccatttttgggtcaaattttcaaaaaaaaaggtaaaatgtggttccgttagtgctattaggagccgctgggaaaattctggaaagttgaatttttttttgactaaaaaagcgtataacaaacagaaaaatgtctaattccaattaatgaccctatactagtagctttttttgcaaaagttgcgcaaattggaacatgaattagcgctttttaatggaaaaattttgaacacttccacccaattttttaaaaatctatcattacaattaaacggtgtttggctttaaaaatttacacaaaatttgcaataaaaattttttttttttcataggccctagttggcgtgacattggagcagttgctgcgcgaaaaattcatcagccgagaggatatttttgtgcaaacaaaattcacgtcgttggacggccaggacccggcacgggtgccctacgaccgaactgcgtctttgcctgatcaggtgctgcagcaaatggcgtattcagggggggagggaaggacagtggatagcccccgaaatcgaaaaatggaaaattttgaaaaattaaccggttttcttagccgtggtcccactaaaagtggccattcttagggccatcatttagaaaaaaaaggtttttttcccaaggtcgtggcacccatcatcaaccctttcaataaataataataataataataatgaaaaactgtggcgaaaaagaatataaagattttggaagagtaaaaaaaagggtacgggaggcccggaaaaatccactgcccttactcgtaaattttttcaaaaaaacgtcatatctcttttgtcaacttagtatcattttaaagcacttaatgttctctatatatatacatgcaaaataaagaaattttttaccaagttccgtaaaagttattataaaaatagtaattaaaaaaatatttcttttcgtccctaacctttttcattgctcaaatgttttgaaattttgcaaggaaatagaaaaccataagggctattgaatgatcccaagaatgtttaatttggtcgacaagccttgccttgagtaaaatcaaaaactttaaaattttgcacattttaatgcggaaatttttggtgtagataaaacagtcaatggaacgcagtttggcgaatttgcgcctcgattttgttgactctttggtgctgcatgggccaatgcggtaaattttttaaattgaaaaaatggaaaattgtgccaatttactcaaaataaagattttgtttaaattagaaaaatttccgacggtttctccgtatgagcaattttatttgaccctcaaaatggtcacattttaaggagttattggatgcccaaaatttaaaaaaaaacttgaggcctttttttgggcacactatgttcctctccccctcaaattttattcataggaatttttaaaaaatttaaagcgtttatcgaattggtaataaaagttttttacaaatctttttaaaatttcaatataaattttactgatttttttgggcagtacacttgacgaaaaccggttggtgtggcgcacctttgaacaactgcacggtgagggcaaaaccaagcgcattggcctgtccaactgttacgacttgcatttgctgcgcgcgctgtacgaggccgccaccgtgcggcccgccgtgttacagaaccgcttctacgcgcagtctgaccatgaccgggcggtgcgcgcgttctgcaagcagaacggcattgtgtaccagtccttttggacattggtgtgtttgtgtggggtttcacgttacgcaccacccctcccctcgtattgccctcccagaattttttaaaaatttacaaagtaaattta

SEQ ID NO: 11342 - DNA, 1006 bp, Heterodera glycines
ttcgcattattcgcattttttggcgtttcgcgtttcgcttttcgcatttcgctttttggcgcgaaatgcgacttttacacccctaagaattgattaaattcccataaaatttttcaaaattgtacctataaattggctaattttcagtgaaaaactgtttataaatgatcaaaatttccaatttttttccccggcggcgcctatgggcaccgccgggcccccaaaactcctattttttcttagaaaatggcccaaaatcgcaaaatttggtaatttgatgaaaaactgttctcagcggcgcgccaaaactcttatttctcattagaaaaatgatacaaaaatcacaaaatttgatgattttttggtgaaaatctgtcaacaaattttaatcaaattttcaaaaatttcccggcggcgcctgccccctcttcccaaaaagtttttttggaaaaagcgcgcctcaaaaaattgatttttaaatttggaataaaattttaaaaaatgacttttgctttatgattttaactattaaaaagttgcagaaaaaatttcgcttttcgcatttcgttttcgcatattttggcttttcgcatttcgcttttttttcatttcgcatttttcagtttcgcaaatttcgcttttcgcatttcgctttttatttttcaatttggcccatccctgctagccacatctcggaaatttaatgaagaatttttcaagaatattaaaaacatttttttttgttttttttctggcaattcagcaaatttagttttcaataagacaggttttcaagaataaaaactttaaaataaatttttttttttccattgggaccacaattcgacaccatggcctaaagatttagagagactggatccggaatctcaatctcaaaaccagtttagagaagttcaattgtgcataaatttccaagttttaagataagttaaagcaaaaaaaagtaaaaaccctgggtatactatagtcaaccccccggaaaaaa

SEQ ID NO: 11343 - DNA, 1168 bp, Heterodera glycines
  unsure (1)..(1168): unsure at all n locations
attttttagtactgaattgtcgattttcactgggactcagttgtcccagtgcttagatggcatcggttcgaatttataccttgttttttagacttggctcatcaataacttccgaacgataccaagtttgtccgaatttggccgttttaaagggtcaggagccccccttttcactcaaattttcgagttttaaaccggttcaaaaaccggttttttggcatttccgcacctggagacctactttttcatgcatagctcctcgagacgaatcgattggtatatcatttatgccatttttttccgggggttgactatagtacacccaaaaccctttttaagtgcttggcaattttttgaaaatattttttgaattatcttaaaaatcactaaaaacaataatttattgcagaataaataaataaatccaaatgtttttgtaacaacaaaaaatgtcaaaattgaacataaaatgctaaacaattaaacattgcccacaatatttacgaattgtccgtttttgcttctttcacagtgacgtcaatggccagtgtcactttgtcctcttctctgttgtaaaagcctttgctcgggtccatcaattcctaaatggtttcataatgggccaattaacaggatgtccaattgccattctcttaccgaaaaagcgatgaaataagtgaatccacgccatgagcatttactgtcaaactcgtggtcttcgaattctctgctgaaatcgaacactcccttcttttgcgtgacaattcgaagaattgccgaacatttgcatctccaattttctaaaaattcaattttttccatttcggacaaattccacaacgtgaaaccgaaaaaagtcaaaatttcgacttcttgtggaattcagtttcgaaattgtccgggatgaatatgatattcttgaccagtagcgaacctggcaacatgccctagacacctttttaggacatgaaaattttttttaaaaagagggcggaatcggtagtatttattagtgctgttcgagaccgaaaatttctcgagacctagacttgaccccgagaccaaaacctcgagaccgagaccaaaaaacccgagattttcctgaatcgagnccgagactctcgaaaagaattagtatttatcgcctnattattttggaaaatttcgg

SEQ ID NO: 11344 - DNA, 1419 bp, Heterodera glycines
ttgcttgatcaatttcacctttttctgaagcggcgtcgcaccaaaggaaaaagctcagtcttttctctgctctttccgttggctttcttatccccgccaaaatcctccatcgaagtccttttatgtgcacagttttgcttttgcgctcattccaattgattttgcgcgaaaattccgacattttttcaatttccatccaaatcgtcgcttttttcggatatgaaattcgcttttggctcggaaactgaagtgggaacaaaagcccaccgaaaatgccacgaaaattcggaaggaaatgagaaatactgtccatttcttgcattgttaaaacgccgtatggaactgtaaaaagattaattatttcatttacaaaaaaaaggattgtgagatgtaccaatatcctcgtaaaacttttcctttgagatgagcggaaaacgaattttaaaaagtgccgggccgaggacggcacgacgatttgcagaggagcactcaatgtcatgttgacggcatttctcgtcagcccaacgaagtgccgaaaattatttgaaaaacaatttaattaatttaaatcggccataaaatttactgctttccaaattgaaatttctccattgatttgcaattgatcacgctccaaaatttcacataatgttttttggttaatccgcaaaaatgcgtccgatttgatcaaaatttccgcattatcatcgatgtaaagcaaacaacagttagcaaagtcctaaaataaaaatatttttgtaccagaaatggaaaaaagtcctaaaatcctaaatttcaagaattcgcttttgcgatgttccacaaaatttcaaagaaaaagaccaacacattggaaagaatgagtttatagtcaaccaattaaatatcattttcaaaaagaattaataaattctcttcagtatttgttaaattatacaatatttaaaattgcctttttcacctcaaaattgaaaaggcgagcctgaacataagccaaaaaaacattgcgcagttttgaaattggaatttgcaaagacggaccgaccaggccagggacattgtacttaattgctgaaacaaaaaagattcaaaaaaaaaaaattattttcaaggattaaaaaaacaaataattttatgtgaattttaatttaccggcgtaaagcaatgccatggcattgtctccgttcaatgcgctcaaatcgccagtgtaaatgaagcgcaacatcactttgaatgcttctgcatcaacatcggggaccaccacagggcaattagcagaggctaaaaatgaaaaaatttattgccaatgattaaaaccattaatttaataactatttaatattaatgttttttttaccattttgcgcgtttgcattttgcgagtcaaaacggaacattgcctcaaatacgtcggaagcg

SEQ ID NO: 11345 - DNA, 3330 bp, Heterodera glycines
  unsure (1)..(3330): unsure at all n locations
aaaatgggcatccctatttcatgagtaatgtgtgaaatatntgtgacttttcaatagatttcttatgtttgcccacgaatgagccacaaagatttactcctggctagattgatttttacgnccaatgaaaaaattattactgattgtactgttaaaggaggcatattttcatcggatcatttaacacaatttttcacattaattactcctaaaacaaaaccgaaaacanaagatcgtaaactttcgttggttttgtccatcgaatgtgttacattttaatataatcatagcatcaaggctaaatgctttgtcatatgaatgctttagcataaatcaaaaatattccgcctttaacagtatgtttttaaaagttttatttgaattaaacaaccaataaagcgttagaccttgaattttttaactcccaaatacccacaacatttattagcatccatcaaagagaagtctaaattattcaggcaagctaaaactgacccatccaaaaaagcactatacgatagcatttctttacatataaaaatacaaacaaataaataccatagccaaattgagaaaaaggctatttcaaagggaagaaattcaatttataaatatatacaaaaattcaatgtcaatccctttgaaatacctaatctaatttatgaaaataaatgctatcataacagtgctgagaaatgtgaattatttgccaccttatttgccaattcatttaataatagtgaaaccgacccaaccaatccatgcttgggtaatattatagaaattgatcaatgctttatatcggatataaattttaacatcatcgagacccaaaatcttctgaaaaaacttccgaataaaaatggcacttctcccgataatattagttataaaattttaaaaatttgccattcttctctgtcaactgttattactgacttgtttaggatctcattagacactggttcacttccagacatctggaaggaatcaattgtttttccgctttttaaaaagggtgacaaaaataatcccgaaaactataggccaatttcattaacctgctcactttgcagggtaatggaaagaattttaagcaaaaatatttacaattttctattaaaaaacaaaaaaatttcggaatatcaatttggttttgttaaaaataggtctacaacgagtcaattaataacagttgtggaagattggtatgaggcaattataaatggaaaaaatgttgactatgctgatgatgttaaattatatatttgttataaagcaagaaccaaaacagaaattatgcataaagcattgcataatttatcagaatgggcaaataaatggcagatcagaatctcaattaaaaaaacttttgtacttcatttggggaataaaaaccccaaagaaatatataaaattgatggaaatataataaatgttgtggatacaattagggatttaggcataaatattgataataaattgcaattttccaatcatgtcgcacaaataataaagaatgcatatttacgtatgcgttctttatttcgggttattaaatcaaaatcttctaggatttggattactttgtacaaaacttatgttagaccgttattggaatatgctcctgaggtttggaatccatctcttctaaaaaatatttaaaaaattgaaaaatgtcaaaaatacttcaccaaaagagttcttttcaaatgcagccttccacccattccataccaacaaagattagattaccttcaactgccaacacttgaaagcaggcgaaagctttctgatctgttcatggctcataaaataatttatggccgaacagatcgaatccctttgaaatattcaaaccttctaaacgctttaacatgcccttttatagacttaactcgaaatataaattaggcaaaaaatttataccttttgcggggcgggtaacaaaaatttggaaccaactcgataaaaagcttattgaaataaactcattaaatcaatttaaaaataaaattaaaactatttcatttctgtaagattgaccggaaaaataaaagtcgaattattaattcattaaacaaaaagtgatttggtcattatattttattttttggcggcgatctcgtttttaattgtttatgcgctttcttgaggacattttaattaatgttttgtcctcaatgtaagcggatttttcccttttgtggactttttctttattgacaaataaaataaataaataaatcaaataaattttttttttcattttcgaaaagatttgttagttaatcttaataataagaaattttatcggattttaaaattattatttaaatataataaaaacatttggaaaaaactttttttttgttaaaaatatttttaattcgaatttttaattttcggtaatttctttcaaaaatttttttatcaatacacaattttttaaaattttccctacaaattaattttttttttattttccttcgaattttgaaaaacaaataaaataaaaaatacttgaatgcgtaattaatttaataataatatttatcgacaaaatctgcagatatcgctcctctgattcagtagatgttctttttatccgacttaattttgtgtcatataaagccaaattttgtcatgagtttcaaattgtccttttttgtacatttttcttcttcttctttcagctgtcccatcgacgcgcgacggtcgcgttgtgctcgtgccgttgcgaacaccgcgcgacaaattgcagcacgtattgcgctccatcgcgtggccaatgagccaggcggggctcagcacggtgatctgcgtgctgccgcttgtcttccttcaagtgattgcttgactgattggatgagctaacacttttacatattcgagatccaaatctcggccagttttggtggtctgtgcaagcgattgttatgcgattcaactgtccttgtttcgcaaatttatctcaagtcccgaaaaaagcatttctcgagcaaccctaggccatatgaatttctaacatccaattttctggcatctccaacaaatagggtacattacgtagtgatttaatttggctcaaaatcccacaaaaaattggatgatttttttaaatgttttattggttggggattagatttgattctcacaattcagagagagggtgcttgtttcgataaatctcgaaaagcggaaatttgcttcagaattacatcccgctcgtgttcgtcaaaaccatctcactggttgccatctggggactcttccacggcttggtaagggcctttatgccctcattttcagaattttcgggttttcttt

SEQ ID NO: 11346 - DNA, 2872 bp, Heterodera glycines
tagcagctgcggctttttaagactctttaattatctcctagtatgaattgtcctttattgtaatccccagttccactctgcactggttctcgtgcttttttgaatagggtcattgaaaactcatacattttttcaaagaatttttcaaaaaagaaaaattaaaatgtgaaaaattgagctttttcagtttttatagcaaaaaattctcttcaccgtttcgcctcagttttttttaaatttcataacttattttcttcaagaagtttttgaaatttttttttgagaaaatttcaagaaaaaattattaaataaaatttgaaagacggaactggcgagacggaactggtcagacggaaccggccccagacggaaccggccagacggaactggccccagacggaaccggtccttttagtactaagacggaactggcgagacggaactggtcagacggaaccggccccagacggaaccggccccagacggaaccggccagacggaactggccccagacggaaccggtcctcttagtactaagacggaactggcgagacggaactgtcagacggaaccggccccagacggaactggccccagacggaaccggtcctcttagtactaagacggaactggcgagacggaactgtcagacggaaccggccccagacggaaccggccccagacggaaccggtccttttagtactaagacggaactggcgagacggaaccggccccagacggaaccggccagacggaactacccgagacggaactgacccgctttgagctgtcttcccattattagatatattatttatagttaattaatgatcaactttttttacaattttgattcaacgaaagttttgtcaattctaatttgtaagtactttcgcggtttttgggtcaatttaagaaataatggaaaagcttagggtccagtggcgctgataggcgccgctggggaaaacattgaaatttttcgtgcacttgatttaatccaaatgtcaaaattttgctattttgagccctatttttttgaaaaattggggggtcttggcgtcgcttgtataaaaatgcaaattttgcagcgggtcaatggcaccgacgcgctctatatcccatttcgagttttctctgattttattggcttcaattagaatgaaaaatatattttcatgattaaattattaaaatttggccggacaaattaatttgaatattttgtctgttcctttcagaagcaattttaatttaattttttatgcgttctcattttcttcactaaagtaaattttttttacgctttttaaaatccgtttttttcttttctttgtgcttttcgattatctcaactaacaacaaatttttctttccattttgaatcggaataattccgttcgtaaattcgtaatttttgatcggggtccccgagccccttgaagcgtgcgtgcgctctccgaccccaatcccgctgacctgtccttcccgccggtgttccacgctccccgagaattattccttacacgagggatcggggagcaacctaataatcaaattacttcttattaattaaatccataaatttaagcaattaaattcaacccattttatcattgaaattttaatttttatcattgagcaaattcacatatattatataaaaatacctaaataaattattcatattttaactcatgaattcaacagatatgctataattatagaaagtaatgttacaaatcgagtattaaattatataaatttggtgaaatacatatttaaaaaaattaaacagtgtctagatcgaaaaaaacggacaaaaataccgagcacattatgcaagacaaacaaaaacaaaacagcgaaaaggatttatttatttaaaacaaaaaccaattttaaaagaataaaatcaggcatttaaaaatgattatttgaatatcaaatttatatttaaattgacaaatttgcaacttttatacggaataatgataatttaaaaatttatggccaaaggactgaaaaatcatattatcatactattgaaaagaaattgaaaagaattcactgacatgaagaggaatgggaggaaatgagcagaaaaagagctaattacttgaaaatattatattaataaactattgaacattaaacaaatgtttattttcaaattgaaatattaattaataccataagaaaattaattagaggcaaaaattaattattttttaaacaatttaaataatcatcagtgattggatttataaaatttcataatttacataaatctaattggaaaaatcattctaaaatacatcaatattataacatgaagaataaaatattgaaaatatttacgctacgatttagaaatttattatttttcctaaaaattaagcaatatttagcgaatgaccaacgaaaattgaggaaatcaaatagcgagagtaacaacttcatttttatcattgaaatttaacttcatttttatcattgagcgaattcatatattatataaaactacttaaataataatcattcatattttaactcactaattcaacagatatgctataattatagaaagtaatgttaaaatcgagtaataaatcacataaattcgattttagggggtgtatatttcgttttttgaaatcacgaattaggggatgtattttacttacattctcgtttttcgccaaaaatttttgtctccatttttcaaaaatatggtcaaatggaggtccggcagtgctaataggcgccgccgggaaaattgttttttagtatttttatgcaaattgttaagaaaatgcttataatttcaaaaaaatttactgaaatttttcttttttgggtacggggggg

SEQ ID NO: 11347 - DNA, 5347 bp, Heterodera glycines
  unsure (1)..(5347): unsure at all n locations
gaaaaaatactaggaccgagagtcactgtacccatttcaatgccccaatttcaaaaactcataanttctgccatttacgctccatgaaaagttntagtcctaaaaacctttaattatttaatttaaatgaccaaggacaaacaaaatctttttttgttttaaaccttttaaaatttgtaaagattctcaagacgccaaacggtggtgacataaattcgaattcggcatctgcggcaacaggtggtcgtcatcagagaaaacatttcggcccgggacagaagcgtcgtgtcagttttggctcacaatcagaggtttttttggtacaaattctcattttggtgcaaaaatttcctttttagagcaatgacagtgcgattagaaagcacaaaatgccgaaagtggaagtgtcgacagagcaaatgacgacgccgaaagtcgggcagcaaaaatttcagacaaaaatgaacggaagcgcgtcatccggcaaagtcataaatggaccgcaaaagtaatgaccaattttgacaagcattgggcatttctatcgtagcaaatcttgggaaaaaatgaaattcaagaccaattgaacccaaaaatttaaaaatttcggggatagggttggaaatcctttaaatctggtcttataacgagttgacgttcattaacaggaaacttgccgaagaacaaaacagtgtgtcgccagtgcgtccgaacatgccgaaaagtgggggcaatgccaatattggcggcggtgccgccccaacaccgattccatcgcccaaaaatcagaagcaaaaacagcaaaagttggtcaaagtttacgaaagatggaagttttttgagggtttgataccaatgacattcgttttttgggtcagatttttgaattcaaaaattcgaattttgtttaattttaagagctttgtggtcaatgtttcataattcttcgttaaattctttttttattaaatatagacaaccttcaaaagctggacaaaaaaatgcaccaaaagctgatcagaagaaagtggcaccgaaaaatcagcaaaatgggaagccgaaaagtgaccaaaacggtgggccgtcgccgatgtccaaaaaagaaaagaagaagcaacagaaacgtgagaaaaaggagaagatcaaacagaaacatcagcagcagaaacaaacggttgacaaaaggaattgtaaattcatcataataatattgtttatttagggtcaaccgaatgcggaaaatttgaagaaaaacggtatagaaaagttggaggagggggaatttgtaactttttgaattttagaaaagaaaaatcacatgaaatttgcgcgagagtcggcggagcgactggaagaagcggtcaaaatgatacaggcgagaaaggagggcagtgaaaaggcgacgggggaagaaaacgtcaaaaaggacaaagacgcggtgtacaacatggtaaaaaatggggttggacattgcatataccacctatctatttgtctaattgtacagtttatcaagtccaccataaaaggggggaagtccatacaatcggaaccgactttttccgctcacgccaaaactttttcgattacccctataataagtttaaaatatcatctatatagagtaaactttaatgttttggggccctgatttgaaattaaaaaaacagcataaaaacaacgaaaagacataaaaaatgttcgcacaaagttcaattgatttggaatggttaatttgttttaaacagcccaataaacgtaattttatgctataaatagtagtgaacagttccaaatttaacttctttgtcatcttcatttcctttttaacagtttaaatgctattttcccctttttaggtggcttcttccctggaaactttgctgcccgtccgcttcgtttttggccgacttcgctcctccgctcggctggttgccaagcagcacagcagcaacattgtgcaggcagccacactgttggagccaaagaagttcaagcagttcgtccagctgttggacagcagcaatgtcgccaaaaagggtggtgttgccgaagcgacggaggacgacgaagaaaaagcagagcgaaaggaggcgggggaggaggacgaacaacgcgttttggcactgtgagttgtgtaaattgttgcgaaatacaacgaatgatataaatgccaattgggagcaaaaaagaaaaatgttggaaaatagtcgagcgactgtttaagaaattgggcctatttgaattcgacttatcttattgttagacatgacgtgtcgtataacgatttatcagttcgaggtctcattctcgatatgcaaacaagccgagaaattttgattttgaactaaaaacggtttggtatcaaccgataaatctaccatgtatgacacatcatttttgagatataaactgccccggacgaccaattgcacccacatatatttgaatctaaaatttagtcatttttgggccataatcataaaaattctgctcaatgatcaattgataattagtgtaacattgccatttctaaaatttgcatgttcattgtcacagtgccctttgtgtgctctccgctgcgatgtgtttgctgggcaatgcgttgcccgacgacgaggacaccgcccaacgacgtgaggaatatctgaacgagtcgacggaactgcgcaaaatggccaaggcaaacattcattggtgaatattgcattataaaaatgtcattttaagaatttgatgggcgacgccgcacaaaagcagaagaagcaattggacgcgttggtcgccgacatggcgcccgtcattgtcgacatggtcatcgcttgggcctcccgcacggcgtgggtccatcgcgcgttgggcgcctttgtgttgtgtcgtttcgccaaatggcttaactacggacattttgaaccaattttgaaggtcggtgttcaaatacagtcatcagcctgcaatttcaaaaaaattattaaatttcttggtaaagattttgaattttgactattaattatgcattttcctccgcgtttaggcctttgttgataaagatgccgaactgttgaaagaagagggggaggaggaggaagaagacgaaagtgaggacgacaaagaggaagaggacgaaggagtggaagaggaggagacgcccgacgtggaccccaaattggtggccgatgtgcgccgagcgatgggcaaagcggcgactccgaagaacgccacggaggtgccatccgatgaggacaactgggtaatctgagggaaaggattcatggaaatatttcttatccccccccctttttttgtctccgttttaaatttcgtttcccattgtgccaggaactgaatgacgagcagatgttccgtcttgaccacgacttggcccgtgcattccgtcgacatgcctcccaacgcaatgagctgtcgcgacaggccaacgttttccgtctgcgactcattgagttggtgtgcgcctatctgtcaacggcaccgttcagcgaagcgatggcatgttttttaatttatttagttttcactcattaattggcatttgcaactgggtacttattgtcagtcgctcaatttcaaaatttttcgtaaaaatcaaaaatcttattcaacaaaattttaccctagttgggaatagtttaaacatattttagattttttgcttctttcagtctctctccgtgcacattttctcttccgtcgtttggcgcacaaattccaaccacaaaaagttgggcattaagttggtggacccgattttacagcgcaaaaaggtgggcgaaactcctttggtgtcacataccaatgaccaattcattttctctgccaggagaacaccatgacacccaagcgtcttgccaagctgttcaagcagctcattgacggggcggccaccgttgacggaggcgaacagaagcagcagcacattgtcggcagacgcgacgcggcctccgcggtggtgcgggcggcgctgatgctggtcagtgtttttggcgaaatgtgaattccaattaaaaaaacgtgcataactaaaatactataagttgacacttttccagcaatggattggtgcatttatagcaaaattggtggggtttcaaactgtttattagatgggctgtccctgcttaccaggaaaattaaatggttttggacaattccgagtccttttgaccaaattcgagtaaaaaagttcaaaaaaccatatttgggagtcaagaattgcgaatccaagtttgactgggttcggattcgtctgggtgggtttcaatcgtgatcagaacgtctcacaaataattattttgacttcttttttcagttttctttggccgctgaccacacaaataaacggagtgcacccgaactgcttcgtcttattgaacagcaggtgctcggcgactattttcccgaagagcggaacaccaacaaagcccagttgcagtcgttgctgctgtttcggctgtgcgcgatatatccggtaatggcgcaatgacaaaaatgagggaatgaatgccgacattcttcaattttcgttacctaattgttggcctatctaattttactttatttcttccccagcaatatcttggtcagaaattcttgcccactattctcgccttcaccgccgacgccaaaatgtctgacgataaaaaggtaaaacgaatctgggcgggtgcattcttatggcattgtgccataacattcattttcgtacatttgcttttcagcatcaagcattcaacatggcacgcactttggtgaccagcagaaaagacgtaaagtaaagggggagcaaaatttaaataattttacaatttttagtcacccaaattctatgcaacagttttgggcgacatcggctcgtatttggtccgcgcagtgcctttgtacatcaagaaaatcgcagacgaaccttctcctcctgcggacaatgagaatgacacaattacgaggaaaagaatatgtgtgccaattttggcagctttccccccccccccaaaaaaaacagctttttattttgattttattgaaaagtttttcgatccataattagggactttaattagtttttaatagaagtttcctttcgcattcatttacatccaaatgtttttccctcccctccaggcacatcaattgttagccaaatttgtgttcatcctcggctggttcttccgaattgacggtgctgaatcgtccacggtgggaaaatgttgccgttttcaaatcgtaatcaactcaatacaaacagaacgtcatgaaacaagccgtcgcaacgacagccgtcggttctttagagggcaaacgatggtggaactgttggccaacgaaggaatga

SEQ ID NO: 11348 - DNA, 3536 bp, Heterodera glycines
  unsure (1)..(3536): unsure at all n locations
tataggcaatgtttcgattgaccccaaaaatttttggacaaatataattganaatattattatcaaaaatcagctggcttttgtcccgttctctgcaaattcatcatttgctttatttggaactcttttctttaaattcaattttgtgtctttctaagtactgctttaacattggctccaatttcgctccaattttggcaattcaatgaaattttatgaaattaattaatttaaaattggatgaattttgattattttcgaattattttagccaataatcccttccaaataattcatataagacccagctccaattttggcatttcaatgaaatttacacaaataattcatttaaaattggatgaattttgattattttcgaattattttagccaataatcccttccaaataattcaaaattaatttttgtatctttttaatactactttaagacgcaactccaattttgtcatttcaatgaattttatgaataattaattcatttaaaattgggggaattttgcattattttcaaattattttatgtcataatccattctaaataataaccttattatttggtttatttgcacattttccaccaccattttgttccttctcatatattatttgcccgttgtgttgtgctgctgctcgggtcatgttttgtttgcccacacaaaacgtcgtcaagtcgctcaaccaccgcccgactaaagtccaacgattaatgaatgaatgagtgaccaataccaaaataataatcaatgcacaacattttaacactgattttgcgttaattaaaaaataaatatttatgttgtaattattttgattaattaattaaatttaattcgtttcattttttgtacttatttattttagtgtaaaaaaatgaaaaattggaaagtttttagcaaaaaaattttgtgaaactctcttttattaattactgtgaattcagtaatattttttcaaaaaatttctcggcagcatcgcctggtgcccatgaaaatacctgaaattatttcttggttcacattaagttaaaaaaaaaaattgcttaaaattcgtcacaaaataattaatgcttcctacttcaatttgggttaaaaattattttgacactaatttgattaattctaattagcattttatttgttagacaccaactgtttttttttaatatataaaacaatgaaaaattaatttttttgtgaaacaaaatgtgtgtaaatgggagggagtttttattcttttggtgtctaaaattctaaaaaaaaatctattatcattatttcttaaaaactcaacaatgaattatgtcttggtatgtaatattaaaattttaaataaaaattttttcattttacagacattttttgctgaaaaaattttgaattttccgatggaaaatccaagccaaatcgatctgtctccgtttttgcttttctttaattattcgccctttctccccgccggcgtcgtctcacaacagtggacaaataaatgcatttttcccattcacattttatctatcgtcatcctccgtccgacctctgcagtgactgtgctgggccaaacagcgctaaggctaacatacccaaaaataaaatgcccacaataaaatgactcatcgatgtaaaaaataattagattttaattttaaatgtatatttttttaatgttttttaatcgacccataactaattgtttattgaaaaagtaattagtagggctgcttaagagtcgaaatttccgagactcgagatcaagacccaacccccgccccaaaaaaaaggccgagaaatttcagtacaagttttttttttgagaatttttagaatgtatataaatattttcccaacaaaacattttttccaccttttcttttattatttttgtgggcaaataattaaataattatcatcattaaatatttcaaaattcataaaaatttaaaaggcctatgctcggcctaacagctaagaccaatccaaagcacccaaaaaaatataaaatattcacaacaaaatgattcatcgatttttaattttaaattaattatttttgaaaatacaagaaaaattttttttttattattattattattattattttcaacttaaatatttataatcaattaaaattagaatagaaaaaaataaacttatagaggcttaaagcaaaaaattgccaaataaatatatccagcctaaaggaaatttgtgcaaaattttaaggattttgtaaaaaaaccaggaatcacttattaattttcaaacatttgcatttaaaattcttttgtaaaaatattatttttatatttacatttactatttttaaatttttaacatcataattttctgtaaaacattttgctagcaaatgcttcaactcaaataaaaattccaaataatttggcactaaaatgctgcggaatattggcattttgtcattgttggcatttttcttcctctgtggcacaattaatggacaacaaccgccgctggccaatgggttggagccgactcgacaacgaattcgcaacactctcggcggtttctactcgggcaatgtgacactgtacttccgtaactcgccgtacaggtgccatgaaaaaaatgggaaatttattcaaaaaagggcggggcaggggaaataggtaaattggacacaaaatgtaaaattcgggtcgcaggcgagtcgtgatcccacccaaatcccgatcccgaacaatccctaagattttgaaaaaacgatcgggagcgatcccgagtcgtggtcccattcaaattccgataccgaacaatccctaagattttggaaaaacgatcgggagggatcccgagtcgtggtcccattcaaatcccgatcctgaccaatcccgaggcttttatttcggaatcccgccggatcatcgggatttgcttaaaattaaaatttaaattttgtcgcccaggcggtgccgatgggcgccgccggggaaagaaaattttgtaaaattttaactaaattattctgaaatttattgaaaattttttctttctagagttgagcgtgaattaattgtcgaatcgggcgcaacaatcacaattgagacgggcgtacaaatgtattttgacacgggcgttggcatgaaaggtgggtgtaatgtgacaattggcatttttgatcggcatttttaaaaatgccttaacctggattctatgttgtatgtggacctggaattcctggacaaaaatccagcaaattccaggtccaggcttgtcatggcctggataacaatgcctggacctggatttttttgaattttcttttaataagcaaacaaatgtttaaaaaaaagtcaatttattgtcttaggaaaatcaaaatgtttctctaattgacataataatattttaaaaatatttatcattttttgataatttnngaataagcatgatcactgaaaaaattctaaaaatattttggaaatcnaagttttcgtgcctaactggacatggatttcctgggcaaattctaggaaaac

SEQ ID NO: 11349 - DNA, 3266 bp, Heterodera glycines
  unsure (1)..(3266): unsure at all n locations
attttctgtaaacattttgctagcaaatgcttcactccaaataaaaattccaaataatttggcactaaaatgctgcggaatattggcattttgtcattgttggcatttttcttcctctgtggcacaattaatggacaacaaccgccgctggccaatgggttggagccgactcgacaacgaattcgcaacactctcggcggtttctactcgggcaatgtgacactgtacttccgtaactctccgtacaggtgccatgaaaaaaatgggaaatttattcaaaaaagggcggggcaggggaaataggtaaattggacacaaaatgtaaaattcgggtcgcaggcgagtcgtgatcccacccaaatcccgatcccgaacaatccctaagattttggaaaaacgatcgggagggatcccgagtcgtggtcccattcaaatcccgatcctgaccaatcccgtggcttttatttcggaatcccgctggatcatcgggatttgcttaaaattaaaatttaaatgttgtcgcccaggcggtgccgatgggcgccgccggggaaagaaaattttgtaaaattttaactaaaatattctgaaatttatagaaaattttttctttctagagttgagcgtgaattaattgtcgaatcgggcgcaacaatcacaattgagacgggcgtacaaatgtattttgacacgggcgttggcatgaaaggtgggtgtaatgtgacaatcggcatttttgatcggcatttttaaaaatgccttaacctggattctatgttgtatgtggacctggaattcctggacaaaaatccagcaaattccaggtccaggcttgtcatggcgtggataacaatgcctggacctggatttttttgaattttcttttaataagcaaacaaatgtttaaaaaaaagtcaatttattgtcttaggaaaatcaaaatgtttctctaattgatataataatattttaaaaatatttatcattttttgataatttgaaataaagcatgatcactgaaaaaattctaaaaatattttggaaatcaagtttttcgtgcctaacctggacatggatttcctgggcaaaattctaggaaaacccatgtccttgtttccaggtcccgggccaagtttctaattggcataatttgtgcacgatttgcgtgtccatcaatttcagtctttggcactctgcaagcagttggcaacgaatttgcgcacattcaaatgctaccgtaccaagagcagctggtgtacgatagcaaattgccagaattacggctaattgacggtcccaccgtcaggcaaggccgtctgcaggcaaatttctttaatattttttttcaaaaaataatttacgaaatttaataaaagttcgttttcaattaaaaatgtttttttttataaaaaaaaacattgaattaaaaataaaaaatacgaggtgtacattttaaagccatttaaaataattgtctaattgagctgaaattttacaaaaaaaagacttttgctcaaaaaataaaaaaagcgtatttttcagaattattttcattgtcatcaagatttgatcaatgttggaattttttgaaattaactatgaatgttacagtctaaaaaactaataaaaaaatttttgtttaccactaaggttgttaaatgattttttcatctttttgttccaaaaaattaaaaattgtaattaagtaacaaaaaaaaattaaatttttaatttcgtaacgcctttttatcatttaaaattaatttgaaaaatgcgtaatacattttttgaaatttttttttttgattagattcgctttcgggaccgttggcgttccgtctgtacccaaatgacaaattggaccagtattgacacgggcaccgcgtgccgtaccatgggctatgatgacggcgcattttggcgcttttttcagcgcaacaacgacacttacccatttgtaatgccggcgcccaaatgtacacaacgccaaagtgggaaaattaaaaaattttaatgccaaatttaattttatttattttttgaaatttaagactctctgtggaactgtccaggctttgaggacaaagaacagattccgttgtccgaaaatttgtgccaaggtgaggacgacattggcatttattgttggggaaggccaactttcactggatgggctcgccattggaaaggtaaaatagaaaaaatgggttagaatttaatttaaattaattaattttatattattagatgggtgcattaatttaagtttacttaaaactattaatttaattgagtgagtttaatttggtataaattttttttttactttttattgattgaattatcaattttttatttacatattttgccaatttttcaagattaaaataatatgaacatttaatataattttaaacttaatcacctaaaacattagaccattcgacgcttttaatgattaaaatatttttgtaaacagatgaaaaaaagagattaaacttttatcacaaactcaaatttaaacaaattctcaagaaaaaaattgaaattttcaaatttttttcattgtaatttttcatttaatcttcttgggataataataataataattgtcctcattatagcaatttgtttttggattcattgccatatttggttttgtatttgtctaatgagctcattggaattcccaattttgcggcaatttcgtattctttgaattttggattttgttttttgatttgataatattgtttaatcgtttctattttttcagcaattgataacatttttcgctctgtaaattgaaaaaaaaacaaaaattttttaaaacattatttaaaattcaccttttgaattattttgttcaattcctaaattctttgcccatttttcaattgcctgaaaaatcacaccaaacatttgtttaatttttgctctaaattctttccattccttctgcgaatgttttccatttttcataaatttaatttttattttaaaatatttttcaacaatttctcttttttcatcatcagttttttgctttttcaccatttttccaacttttatttctttcttccatttataaatgcttctaatatttatgtccaaatattttgctattattttttggcatttttctctttttcccttcaatttttcattgaatttcgtttttaattttgcatatatttgatncaattgctttaacatttttacgtttttcctcatccgtataataatgcttttttgtcattccaaat

SEQ ID NO: 11350 - DNA, 1212 bp, Heterodera glycines
ttgtgtttatttccgtatgggggcaagtgggttgaggaaacaattaaaatgagtcgaattgatgggtgcatcatcttcactgaaatgtcttaaagataattttattatcagccaaggcttttttgtcgtcgtggaaatattgattttaattcaattagagggctctttcgaaaatgagtatttcttcatcgcgatcgaaggcaatcagttgcgaatggaaaataatttcagaatttgaagagaacaaaattgtgtttaattccgttattggggcaagtgggttgaggaaaaaattaaaatgagtcgaattgatgggtgcataatcttcacttgaatgtcttaaagataattttattatcagccaaggcttttttgtcgtcgtggaaatattgattttaattcaattagagggctctcccgaaaatgagtatttctccatcgcgatcaaaggcaatcagttgcgaatggaaaataatttcagaatttgaagagaacaattgtgtttaattccgttattggggcaagtgggttgaggaaaaaattaaaatgagtcgaattgatgggtgcataatcttcacttgaatgtcttaaagataattttattatcagccaaggcttttttgtcgtcgtggaaatattgattttaattcaattagagggctctcccgaaaatgagtatttctccatcgcgatcaaaggcaatcagttgcgaatggaaaataatttcagaatttgaagagaacaattgtgtttaattccgttattggggcaagtgggttgaggaaaaaattaaaatgagtcgaattgatgggtgcataatcttcacttgaatgtcttaaagataattttattatcagccaaggcttttttgtcgtcgtggaaatattgattttaattcaattagagggctctcccgaaaatgagtatttctccatcgcgatcaaaggcaatcagttgcgaatggaaaataatttcagaatttgaagagaacaattgtgtttaattccgttattggggcaagtgggttgaggaaaaaattaaaatgagtcgaattgatgggtgcataatcttcacttgaatgtcttaaagataattttattatcagccaaggcttttttgtcgtcgtggaaatattgattttaattcaattagagggctcttccgaaaatgagtatttctccatcgcgatcaaaggcaatcagttgcgaatgg

SEQ ID NO: 11351 - DNA, 1135 bp, Heterodera glycines
  unsure (1)..(1135): unsure at all n locations
ggtgcatatctttcactgaaatgtcttaagataaattttattatcagccaaggcttnnttgtcgtcgtggaaatatgattnntatcaanttagagggctctcccgaaaatgagtatttctccatcgcgatcaaaggcaatcagttgcgaatggaaaataatttcagaatttgaagagaacaattgtgtttaattccgttattggggcaagtgggttgaggaaaaaattaaaatgagtcgaattgatgggtgcataatcttcacttgaatgtcttaaagataattttattatcagccaaggcttttttgtcgtcgtggaaatattgattttaattcaattagagggctctcccgaaaatgagtatttctccatcgcgatcaaaggcaatcagttgcgaatggaaaataatttcagaatttgaagagaacaattgtgtttaattccgttattggggcaagtgggttgaggaaaaaattaaaatgagtcgaattgatgggtgcataatcttcacttgaatgtcttaaagataattttattatcagccaaggcttttttgtcgtcgtggaaatattgattttaattcaattagagggctctttcgaaaatgagtatttcttcatcgcgattgaaggcaatcagttgcgaatggaaaataatttcagaatttgaagagaacaattgtgtttaattccgttattggggcaagtgggttgaggaaaaaattaaaatgagtcgaattgatgggtgcataatcttcacttgaatgtcttaaagataattttattatcagccaaggcttttttgtcgtcgtggaaatattgattttaattcaattagagggctctcccgaaaatgagtatttctccatcgcgatcaaaggcaatcagttgcgaatggaaaataatttcagaatttgaagagaacaattgtgtttaattccgttattggggcaagtgggttgaggaaaaaattaaaatgagtcgaattgatgggtgcataatcttcacttgtgtgtcttagagataattatattatcagccaaggcttttgtgtcgtcgtgaaatatagattataattcaattagaggtctctcacgaatatgagtatctctctatcgcgatcaaggggcatcagt

SEQ ID NO: 11352 - DNA, 2920 bp, Heterodera glycines
  unsure (1)..(2920): unsure at all n locations
tgaatctcggaatgctcagggggaagttcaggtgggtctgatcccgacagaagcgagaagggcaaaactcttctgatcagtgatcaatcagaaagaaaggggagggcgagaaaatggcagggaaaaaagcacagttaggggagagggaacggaaaggacaaatctcacaaatcactaaccaaaatgagtggggggggggagggattgtcaaattgtggcacattccattcgacattttccgagcagtctaaagggaaagtcccgcgtttattgaccagtggggacatccatggataaacattttcgctcagaatgacgcagaaaatgcgcaatttcgtcatgccaatgctccgaatgaatcaaattgccgtcgttgacccattcaccaaagagcaactgctgcttcctgtgaatgtactacaattttcacacaattttgcaattgtactgatttcgttggggacttttttgacaattatttccattggattggccgcgtttttcactgtgaaacgaaatggggtaaatttaaaaaacaaaggatgcttaaattaaaattaatatttcagaagtatgtaaagtgaaaaacacaccaaaagcgaaacgggacgaattattatattatgatttgtatacaattgatttgcccagtttttagcttgctcattttggctgtttatttgcatggcttatttataaatgaacccaaaactctgcctggcaaaaagccattatgataaaaatatatgaaatccccctctcctctcctttgctgttttaaaacggcaacattttaataaataaatgttcaaagaaaaatcgtttggttgtggacaagtcagtggatttgtgggtgataaaataataacaatttgcagaaaacccaaaaaggacacacaaataaaataggaaaacaagaaaagtgatcatcgccataagggcaaaaagggaagcaacaatgacaaacaaacaaacacagcaaagacaggtgggccggcggagaaatgagaaagaaaaacattttatggcgaggttcaagcgaacgacggacttcggaaaatgcgtccccaaaatcggatgtatcacagcccacaagtatcaacacccctccccatagtcccatttcacttcccacccctctcctctccctcctcttcttccgcaatcttccgtttcctcaaagttcggtgtgtccctcttcgtctcccccctcctcgccttctttggccgctttctcctcctccgatgggccggcaccgtcctttccacccgactcgaggaatttgctaaattttttggaaattttcattggctccagcttggttttcctccttacctgaagccttccaaagtgcgttcacctgtgtagtcgatggcctggacgaaacttgaaccgttttggcaatttttagtgataaatcaacctttttggagtttgctgggaagtatttaatggttgggaatgactgaattttcacgtcctcaacttcgttgcctgtggcgtccattttggcaatgacaatgctctcgtggtctttgtacttaaacgcctcgttcggttacacagatatgttagaattacactgaccttctcgcccaatttgtcccaaatgggtgccaattgtttgcagtgaccgcaccacggcgcgtagaattcgaccagcacatttttggtgtcatcccgcgcgacctgttcgaagttctttccgaccagcaccttcaccggctgtttgttccagtcttctggcacttcttcgctcatcaaatgcggcttcagttttccgtccacgtaagtggaagtgaacttgaccacgttctcggtggtgatgtcgctccattccggcttgtatttggtcatgtcctcctccaacgaaatcagtcgaaccgcaggaaggtcctcctttttgagcccgaagaattccataatccttgcgttgtcctccacgtcggtgttaatgtacacgaagagaacctgaaacagacacaatttggaaaataataataaattaaagatagttttaccttgcccttaaactctttggcagcggcgcgaaattcgctctccaacttctcaaagtcgcttgactccttggacacaaacaacctgcatattgagacaaataagaaaatccaaacgtccccttcccaagtccacttacaaattgtgcgattttatttctccaccgaaaatgactgacgccgtctcttggctgaactccgagaccaacggcagacggttggactgcacgaacttcttgatgtcgtccacctcagttgggttgccctcaaattcgtcacggccctcgtcgaactttttgaaaagagcgatggagtcctccttcttcaactccgcctccttggcaacatccgcctcgtacacaatgccaaagggaacgtcatcgatggcaccagcaacttccaagtaagctttggccgcgtcactttctttgttcttaaatgtcattttataagttagggaagtatagtaaagcagactggaacaaacccaaaattaatccattaattggaaattgtccgattttaggttcacatttggttatgaaaataccttttattttcctttggtttagcacccagtaagcttatttttattgaattgatggaaagaagaagaaagtccaaaccttgaagtaggcaacgacaacgacttccgccgagtctttgtagtccttcaattcgtccgcgctcttcagttccttggccgctgggccagccttcttctttagccatgccacaattgaagcggcgtcccttccgcctccgtattcggtgggctttcctanaagcaatcatttaattggaatcaactanattttctaataaattttgctagttaatgtaataataagaaccgtttttgaagagtttcagcgttgggtacccccgcacttcaaagttg

SEQ ID NO: 11353 - DNA, 1328 bp, Heterodera glycines
  unsure (1)..(1328): unsure at all n locations
gtaaatggtcgttagcaaatcctnttatccattccttctgctggaggtgatatgattgacgatcagaaattgntagaaggatatgatgatattttccaacaaatgnaagatggatgaataggttgggcgggagctaaaaatttggtaaagcgaaaaagggcggaatgtaaaaattgaccgaaagctccacaaaatttggtctaaatgggggtggagattggcggtggtgggcgctgtggtgagttggaatcggagaaatttggggcgagtgcgccaacagagagagagagaaaggggagggagtggaggtgaggggcaaaaagacagtcgccccgattttatccagcaattcgccctcgtcacttttgcgtggtgtgcgtctcaactctcgccgattggcggatgaattgtaaggaaaatcagcgatcgcttcgcttcgcgcccaacgaaaagaaactgaaaatgcgcgcgctgtttctcttctgcccatttccaatcactttttaagcgcacaaaacgctttgaaattggagagcggcgagggaaacgttttctaaactgaatgccaagcgaatgcattaacacatttgtacgaatgggtctgcttattgttagttgagttgggactatcgagagcgggttcgaatcccgaccggtggggattgggcctatgtttttcaggtctcaatccatgcccatcctttcctaacgaacgaaaaactcgcatttaaattttgattggaaaagatttattaagtaaaattgacaaacataaaaaatggcaacataaggcatatgttaaacgaacaaagagtatcagcagaaaaggcagaatgagtgaaccgtaatagtaaccctgaataatgataatataataaatgaaggatggaaccgattgtgaacagaaaagcgaactgacaatgagtaataatataaattaaaagggattctttccttctgggagaatgcaaaaatgaagacgataaataagcatttcttcaaaattaataaaattctcaaaattgcacgaacactttctcaatttggcccatccgtccgtccgccatttgtcacactctcaacgaatgcgaagtcgtcgccgcatcgccggttgctgcgcctccagcggttgcgcgcgtctcctcctgcagacgcaacgcctccagcatttgcttttctttcttgtcgcgctcgcgtttgcgctcacgcgccttcaacttgcgctcgcggatggaatactcttgcagatagtccacctaatcgaaggaaaagagaatagaaaaaaatagaaaaccacatttttgaattttcgaattctgttcaactcg

SEQ ID NO: 11354 - DNA, 1288 bp, Heterodera glycines
tccaacccgatgtcctcaaacatgtcgtcggtggcctccgcgtccgttgacactgtgtcgtcgttgtacggaatgtcggcattcctcggcttcctttcgaactgaattctccactcatcaaatgcaagttctaagtctgcccaccatcatttgttcgttgccagcaatgcgaaggaatttgaaatgagtgccgccgtcggcagtccgaccttcgtcgacgatcactttgtactttttggttcgcttcttcgtttggaactttccctccacatccgaaataaatccgtacatcgcgttgaacaactgatctttggcgaactcttccgagcacaattccacttcaattttgaactggaagaaaaggacaagtccataagcattttgcaatttcggcaaattcaatttccatttgtctgacgtaataatcatttacaagaaataaaaccgattttataaagaaccgctcacttcgtatcgctgaatggtcgtcccggatacattttgctcgtcaattcgactgtgtggcacaatttcgcgctgttcgtcaagttgacctccaattatttcatgagtcccactcttcgcattgaaatgggcatcaaatttgaaccaatagccaacaggaaaattgcggatgtgttcggccgggaaaatgaacaactgagtggggtacttgggcacgtaaacgaacttattgaaagctaaatgagtgaagaatatttggaaaatctattcaatattcaaaagaaaagaaacggactgttgtagatgaacccgtcggctgtgagtgtctccgttacggccaaattgtttgccttttccaccagtcgaagtgtttcagttggttgactctcgtgcaatttgaaacggcacaatttgtgcttgctagggcccgtgtccacaatgtaaatgcttaaggtgaattcatttgataatgtttctttcttccctacagaatctctccggtgtactcctccatctcttgcgccccctcttcaaaatcagtttccgcagcggcggcagcagcttcctcctcttctttacgaagctcttcattgaagaacatgtaaggcaaagtgccaagcaaacggtttggatcagccacaagctgaaggagaaacaatggaacagaaagagagagagaggaggaaaaggaagacagagagaacagaaaagagagaaaaaaggagaaagtgaagagaaaggaagagggtagacattgaaaggagagaaagaaaaggggaaacggtagaacagagagaaaggaagagataaaaaagagatagaa

SEQ ID NO: 11355 - DNA, 2890 bp, Heterodera glycines
atttccggcacaattgtgcaattcatctgaaaattgccataattctcacaatgcgaaatcgtcagtcacctgggtaaaaaacaaacaaaaatcaatgcgtgcggatttcccgccgcaaattgcgtttttattgtgccaaaaatgtctttgtgcaccggaagctcgtcgttgtaatttaaaacaaattggaccacgtgggaaagttagtttaaagaaccatatttaaattatttcatattaatgaattttataattattggcaattcgtgtgaagaaattttctaaataaatttgtgagaaaatatttaaatttgtctttgtgttgcgtaaccaattacgtacaagaaaatgacattgagaatttttttattataaattggcaacagcactcttttttaagtcacttggccaaataatacatatgaggcttataagaataatttaaaaattaggcgaaaattttaaattatttcagtcgatttgtaaaaaatattgaaaatgttcagattatacactaattgagaacattaattacccaatcaagtcaaataaatgtcttttttcgataatgttgttgtagcgaatggtggaaaagctttgattgcccttttaatggttttgtcacatgccactttggtgttcgtcacacttaaagcaaagttattcgtttataatattatttagaaaaattatggaaatttattcaaaagtttttaaaagaattttcaatttttatttaatttaattttttttcaggaatttgaatagcatttgctattggctgatcggtgccaactcggcatgcattgccatctattcgtttacttattttgtccaatttggcattgtgtttttctctccgtctggcattcctctctggctttgttgtctgctcgtctctgtcccacttttcttcttatgctgccaatacgtgctttttcctctgatcgctttggaccgattgatcggcgccgttttcccattaaagttgaaattaaaatttaaaagtaaattttaaaactattaatttaagacaaatgggctttctgtataagcgccgttacatgctttttgcattcttcgcttcaacttcgtttggcactgtcattgtggcattagcagtaaacgagtccattgtcaatttttcagagaagtaaattttaaaaactaaaatcaaatgtgtcccagcccattaattggatgcttgctttacatgattcgtcataaactatcgtattttctctaattatatgcccgtcattaatcttacccgtctccaattatctccccccccctttctgaggaggttaaaaaataatataccctagcatataatagagaaaataccgtaaatgaagttacggactaatagagaaaacataaagctgaaggtttaattttggctatttatgcggaaaatgaatgacgtatttttaattttttttaaataaaaatggaattaatccgactaatcatggctcatctgctggataatgaattcgctaattctcatattttttagattggttctttgcatgacttatgatccggtcccagcatattttgccaatttcagttggatgctcaacctgtgttccattgttctttatttggcactttggtttcgtgtgaaaatgatgtcctcatctgcttcaggaggcattattttaattggaaaattaataattaatttttgaatttttagcaatgcgctctaatgagacaattaatcggaaagttcttttttcactgatggccatttttttggttgaaacgttcggctgggtgttcaatttatctgttagacttttgctggttcaattcgggaccactgaaagcacaaaatggttggtattgagctatgccggttatctgacgcaattttcattggcactgaatgggccaattctttacgcgacgaggtaaatatttcaaaatagcctttttgtaattaatttaaattacttaaattatctctccattttagcactgaataccgtaccgcctttcgtaaagtgtttggatttggtcaagtcaatttgcctgcatttaccattcaagtggtcccaatgaatagaagcggaaaaactattggccaaagcggaaaaactattgcctaaaagtgatcagctttcaaatttgattttgataaagcttatgataacgaaaataccaaaattttatttcattttatttgtaataattttaaatattttttctttcacaaattcactcctaataatttgaaataaaagactgtttctttctgcaatcgtaaagatttcggcgagtgggatgtgaatattcttcagggtattggaatatctttggaagattattttatataaattttttagataacttttttttttagaaattttacccaaaacaattaagaaacgaattaaaaatggatattttgaacaaattagttgggtcggtccgggtctttcgttctggcccggaaatccgttccgtacagcggaggccgaacagaccagtgcagtgcctaatttggtgtcaattgatcgtccgttgaacgctccaatttttatgcgttcatataacttttgccatgccaaaattggtcccaataaatggaaaaggaaaataaaattaaataaaattcaaaatctggtcaaattctatcgcaaattttaattcatgcgcaatagaaaagacaaattgctctgcatatcaatggagtttgtgtcactttctttttcaactcctatttcgccattcatagtttcgttattttgtgccttctccatccacagcaaaatgtcaatttaaattatcgtagcaattaattaggcaattagttaattaattaattaattgcccatttaatgcctcgccatttatttatacaaaagcagcatttcat

SEQ ID NO: 11356 - DNA, 3195 bp, Heterodera glycines
tttgataaagcttatgataacgaaaatcccaaaattttatttcatttattgtaataattttaatattttttctttcacaaattcccttctaataatttgaaataaaagactgtttctttctgcaatcgtaaagatttcggcgagtgggatgtgaatattcttcagggtattggaatatctttggaagattattttatataaattttttagataacttttttttttagaaattttacccaaaacaattaagaaacgaattaaaaatggatattttgaacaaattagttgggtcggtccgggtctttcgttctggcccggaaatccgttccgtacagcggaggccgaacagaccagtgcagtgcctaatttggtgtcaattgttgaacgctccaatttttatgcgttcagataacttttgccatgccaaaattggtcccaataaatggaaaaggaaaataaaattaaataaaattcaaaatctggtcaaattctatcgcaaattttaattcatgcgcaatagaaaagacaaattgctctgcatatcaatggagtttgtgtcactttctttttcaactcctatttcgccattcatagtttcgttattttgtgccttctccatccacagcaaaatgtcaatttaaattatcgtagcaattaattaggcaattagttaattaattaattaattgcccatttcatccctcgccatttatttatacaaacgcagcatttcattcggcgaattttctttcgcctactctttttaggcgatcacaaatcacaaaatagttcagacttaaaacacacaactaactgtaccatttttggatcactcacgcggttaattagtggcataaattgtgacaatattttcgtatttaagcgattgtttctgtcatcattttgtcaccaatttctcaacaaaaaaaatgtccatccaaaataattttcttctttttgttgtctctgcgctgctgtttttcatcggcatggtttgtgttgttgatgcgcatcatcaccaccattggggtaacaaattgctattattaattaaaataataataatattatttttaaacgttaccctttctttggaaaaaaataataattcccaaaaacacaaaaaatcgcaaaaactttgtacaggaaaattgatgtttagaaatattcgggactcagttcgggtatctatctgtcccgtgatttagcattttatttgaaaaaagattaattaaatctgataaatttaggctatggagggactcaattcgaatatctatctatctcttgatttagcattttattttaaaaaagattaattaaatccgataaaatttaggctatggaggctatggctacggcggatggggcggaggatggggcggcggatggggcgggggatgttgcggctggggctggggcaaaaaataaattcattcatcttcattaaaagcgctgtgaaaattttcaattctctgaaaattttatcaatttaaattgttttgatgttattttaatcacatttaaatccgataaataaatcgataaaaatttattaataatttaattttttatattttttaaaatatttctgcgcattttcagctcggtcctcggtcttaataatataataattaataattccataatcaataaaatgccaattcattcttatatgtatagaattgcattttttgtaataataaattttatatattcgccataatttgcatataaaaaaaattaacaacgaaattatttcattttattaaaaaaaaatttaaaattcgtccatttcaattaatccgatgccttcccatccaaacttaactttatttttcctatgcgcattattacatttgatttctccatttttcattgaggaatattcgccagaaaaagagattttaatcaaaaagcgactgtttcacatggcacaggtcgaattttgtaaagcataaaaattgtaaaaaaaaaacagataaaattgtgttccgatatcccgcctaaaagtcagccaaaacgggggagggcctgtgacacttaaaaattcaattcggttttaattagagtttatgatgagaccgggactggtactgaaaaaacgtaccgtacaattgagtacctgagtcccgattttgaccgggaactagtcccagttttttcccgatttttctagccaaaaagtcccggtttttcgaacccgaaaagtcccggtcccttgtttttctcaaaattcccggtcccgtacaattctagttttaatgatgccaatgttcggtaaattttggtttactaagaaaactcttatgggagaaaatattttttttgttttacgaacccacacaccgtaaaattgttgaaaatttttcatttttatttaatttaaaatcacataaaattgtgttccgatgtttcgcttaaaaagtacccaaaagcgagggggccttgcactgcaaaatttcattcggtttttaatgatgccaaagtttggtaaattttggtttattaagaaaacatttatcggagaaaatatttttattttgcgaacccacacaccgtaaaattgttgaaaatttttcattttttatttaaatttatcttggctttgtgcccttttctctcagattgatccgcccgcgtcttatcggctcattttgtgggaccatttgatgccctttttcacttctcaaagggacaaagaattttgcgagaagcatttgcttgagaaagtgtcactcaccaaaacatcggagccattggattattttcggggttcggtgatcgaaaattggcaacaaaattaccaacactgttttgagcattgtcatgtgatcaaaaccaatgaattgggacaatttttgttgcgacgaatccccgcgatccccgtggacagatcaaatgggtaataagcaattggtttttacctatttcagggctctcattcgtccttgggatgccaaggacgtccttggccttggaaatcagcatttggaaatttaaaaaaaaattcaaagaaatttgataaatttttataattttcaacaatattttgattaaattatggcattatgtcaataaaaatgtaaattttttcttatggttgagaatttttgaaattttatgcataaagttactaatttttcttaaaaattaacccaaaacgccaattttggtcattttgaacaaaaatct

SEQ ID NO: 11357 - DNA, 1009 bp, Heterodera glycines
agttcatctataatttatttttaaaccttttctttccacagaatttcctcgtatacgactacattttgcgctataataattattgtcaattcttaacaaaatcaaatgataaatattttcgttattaaggcgagtggttttgggctatttcagaattttttcaaaattgcagattactgccgcgacggttacagtgtttcttctctagtaattatttttggcgttcaacaagcattatttatgaatatttttaatatgttggacatgaagattcgagttcatctataatttatttttaaaccttttctttccacagaatttcctcgtatacgactacattttgcgctataataattattgtcaattcttaacaaaatcaaatgataaatattttcgttattaaggcgagtggttttgggctatttcagaattttttcaaaattgcagattactgccgcgacggttacagtgtttcttctctagtaattatttttggcgttcaacaagcattatttatgaatatttttaatatgttggacatgaagattcgagttcatctataatttatttttaaaccttttctttccacagaatttcctcgtatacgactacattttgcgctataataattattgtcaattcttaacaaaatcaaatgataaatattttcgttattaaggcgagtggttttgggctatttcagaattttttcaaaattgcagattactgccgcgacggttacagtgtttcttctctagtaattatttttggcgttcaacaagcattatttatgaatatttttaatatgttggacatgaagattcgagttcatctataatttatttttaaaccttttctttccacagaatttcctcgtatacgactacattttgcgctataataattattgtcaattcttaacaaaatcaaatgataaatattttcgttattaaggcgagtggttttgggctatttcagaattttttcaaaattgcagattactgccgcg

SEQ ID NO: 11358 - DNA, 3560 bp, Heterodera glycines
  unsure (1)..(3560): unsure at all n locations
ttcacggagtcattgtcgattntatgaaatgtcatcctgctggtcgctgctaatcagtagagtccaaaggcgtccgaccgaccacgctttcttgttgtctgctttacggcgattgggggtccaccaatttattgttgnatgacttgacgcacgtattcgtcttctttttatacccttctgtccagtacaaaactgcttaggcagtcctcctttgtccagcacggtgtctattcctcgctttccctcggtgaccagcgcctccttaataggcattccctcgttcccaacgcgctccagcactcgttgtccagtgctcaacgcctctgaccatactgtggtgcccacacgacgtaaaatgggcagaaagaagcgccaaagtcctcgaaacacgtcaccaacgcccgctccccgctgtgcgccatagcccctttgaaagggggtggagccccgaaagtagtcgaaatcgtctttttccgatccgccaccgtattgcatcatcatgtaatcgtcatactgcgcaatgcttgggtcaaacacgatatgaaccattttttattcaaatgaaatacaaaatgaacgatgagtgaaaaaatcagaaatttatcactttcttaaatatcaacacgaccatcgtcgtcccatacgcgaatggcaccagacggcctttgtccattgtgcgcagctcaatatcaatctcattgatctcccgtggcagtactcgcgcaaatattggcgagtcataaatcttctcattataatccccaggaatggcaccactgatagacacaaccctgagcaacgagctcagcgtattgccgattatcatattttcggtcaatccttttgagtagaccgcaaagcttgagatgccgccccgtaaatcaaccggatactttgacagttcatttgacataacatgcttagggttttcgaagccaagaacatagcccaactgaggcgagaaggacaagtggctgataatatcattcttgaacaccactttgaaccgttccacatcatcgcgatattggattgacaccgagttgggcacaaattggagcgagtctatttcaactatgaagctgttttctggtaaatctaactcttctagagttaacgcagccgagacaggttcgtcgacggtcggaatttgtttttcttttgaaggtaatccaataacagcccccgtcgtaggagaggaagtgaaagttttggtaggagcagttgttgttgttgttggctctggctgaggcggatgtgttgtagaagtgggaggaggaagtttaacagcaggcggcttaggcgatggtatttttggcgttggagagacctgggttgtggtttttgttgttgtttgagggatcggtgttgttgttgttgttgttgtttttgtatttttcggtgtatggacggttgttattggttgtgtgggagtcggtgttgctgttggtgttggtgtttgaggggttgttgttgttggctttcgctgtagaggaactgttggaggagatggcggtggcggtagcgttgtaggttttgttattgctgtttttggagggccaggtgtcgttgtcgtcgctatttttggttctgacgtctgaggggcagatggttttggcgggacaggtgttggcttttgctgttgtgctgatggctttgcggacgactggggggccggtgttgttgttgttgttaccggttttacggctggaggagtcggtgttgttgttgttagcggtttaaccgccggaactgggggtgtcgctataggagacgggctttttggatcaataattagtgtccctttttgtgttcgcatgtcatcatcatcatcgctcatgtgttgctcttcgccagcattcggatcgtacaacgggggagacccgagtcgctttccgtgctcatcaaacagcacgggggattggggaggagtggtgttgttcacatctcttctgtctctcttccgtggcggtggagagcccagcggctttgtccgattccgatcggcctcctcttcatgagggagtggcaacatttttgcaccgatatggttcctcagtgtagcggtaatgaagtctttcagctgctcaaccctgttatgtgatatcttgggcaccggcacccggatcactctcggtctgtcctcatccattgtgctacgctgtgtgaagtgaatgtcaatccattgtgcatccaatgtgccaatggttgaccatgagtatgggtaggttatgctatgcagcccacaaacccaagagccgttaaaatgcaacggctttgggagccggacccgaaatttattaggctgattgtccgggtaatccgtcacattgctaggcaaaaacacaaagaagctgttcgatgacatttttatttcacataaaaatatgaatggaatacaatacgggcgatgggtgcttttatcaacacattcgcgctcggggtatcctatgaacttgacaagcatctcagtggacccatccgccctctttctctttctgtacaccttttcaatacgatagcttgtctctgcatcctttcttacacgcgccaggtcctgctcatagaagctgcccttaaatttctctccgtgctcatcccgtagcttataccgaatggggcgtaccgctttcagcacctcgtcaacctccaatatttcgtcgccataatttggcaaatagcccttctcaaactgtcccttctctctgctcatgcgcacaaaatcgtctttgcggaagcgtggcggtcgtcgtttttgtggcggaccgtgtccatcatataatagcttccacaccctctgagcattgaaaaagcccacatcaatcggacgcattccgtgggcacgtgacggggagcggttaatcctgtccacaattttctctacagaattttcgcatatacgactacattatttgcattcatattattgtcaactttaaacaaaagcaattgataaatattttcgttattaaggcgagtggttttgggttatttcaaaaatttttcaaaattgcagattaatgccgtgtcggctaccgcgtttcttctctagtaattatttttggcgttcaacaagcattatttatgaatatttttaatatgttggacatgaggatttgagttcatctataaattatttttaaaccttttctttcaacagaattttcacatatacgattacattatttgcattcatattattgtcaatattaaacaaaagcaattgataaatattttcgttattaagacgagtggttttgggctatttcaaaattttttaataattgcagattaatgccgcgtcggctaccgcgtttcttctctagtaattatttttggcgttcaacaagcattatttatgaatatttttaatatgttggacatgaggatttgagttcatctataaattatttttaaaccttttctttctacagaattttcgcatatacgactacattatttgcattcatattattgtcaatattaaacaaaagcaattgataaatattttcgttattaagacgagtggttttgggctatttcaaaatttttaataattg

SEQ ID NO: 11359 - DNA, 1726 bp, Heterodera glycines
cgaagtgatgaaatatattcgtagaatggaagaatactatttattataataattctattaaaactaattatcaaccatcctccaaattggaatttcaaaatgacaatattgacaattaattttatttatttattacaaaaagtcaaaccatctctatttggtacaattagttcaaaattgtgtattgtgcagggtgattttttataatgtatatatattatacgaaaataatagtcgtatttgggtttttttttttaaagtttcggacccaaaaattggaaatcattttatcggggcggagtcattatttaaaaaatcatcaatatgattatatgaacaattatttataatttagctcaaccaaatttttaattcttgatatcattcgatagctctaagtgttctctatcagtctacaaaatttcaaaaaatttgttaagttcaaaaaattatagatagaggaacacaaaaaaaaaccttgtttttcgagcatctttggccctaccatttagggctatcgaataatatcaagaattaaaaatttggttgcttttaagcaaaattataaaataattatatcaaatcatattgatggtttttgcaaataacaacatagcacatttaacagctccatatggcgcaactgtcaagtatttaagcaaatctggacaattagattattattccaacaaatacataaacattgctatttatttaactttaaaattttgaaaaaatgaatagcttattgaattcgtattttattagaactatacttttcatgttcacgaactgagtgaggttttgggttgaacttaaaaaagtgttaataataataataataatatttacatttattgtaattattaattttagtttttttccagaataataaatcatacacatttacatttttttgggttcggcttagcttatccaattgttatttagcgacttaagaaattctctgaatttatcttttaaaatatttgtagcatcatatgtaaaaatatttaaattgtataggaaactaattttgaatttaccataaacaaataaatttaaaaaagtgttacagtatttgcccatttccgaacccggacccgaattcgaacagagtcggtttttttcaaaaaatgcataaaacgacttttatcgtgtagagagcaaagtcgatttgctattgtaaattttctgcttttttggtgcagtcaccaaaaatgatcagaaaaaagtgatcaaatgaaaaacccagcaaaaaattgatattttgattcattttttcctcttacacattaatggccatttgcaagggttcggacccgctcgacagatgatggattattttgaatttttttaaaactatttattattcgacctagcatatttttgttcagttatgttaatttcttttaagatgctatttgatagagaattgtttgctgatcattttaaaaaaaaagtttttgactagcaccattctaaaatttttatgaatttttaaaaaattgctaacttttatcgatttttcgggactttgatcgactttttctgatcatttttggggtcagggccaaaaaagccgaaaattggcaatagcaaatcgactatgctctacacgataaaagtggttttaaagcgatctgagcagtgacatttcggaatgttcccttgttaccaattttgaaaaaaactagggcactgctacagggtccacctcgtttcg

SEQ ID NO: 11360 - DNA, 2393 bp, Heterodera glycines
tataaaaacccggggattgtcaattgattggactcataaaagtgcactagagccaagattcatatgttcaattttttaaattttttggtattacttttctgaaaccaaatgaaacttgctttcgaatgagctcaataaagggtttaatttggatgacttaatagagcctaaaaataggcccgatccggtctctaacataggtaaattaaattaaaaacaaaaatattgtaaaaaaaacggtcgaactttgtagatgtttaagatgatgtcttgccggtgtatccggtgccaacttcgactgctcatcagggcccccccaaacaagcattgtcacaaaaaaatgctcaaggtttaattttatgacttaatcgccattcaataggtttggtatttcaaaaaaaaattttttttttttgcactgaattttatttgaatttaattgattccatgatttaaaatgtttcattaaggacggccaattccctaccaaacaaacaaaatgattcagcgccctcccgtgcccaatcaaatgcaatatttaaaaaaaacaagtgctgttccaactgcaacttcttgcgcttcatcatcccaaatatttgtgcgtttgttggcacttttgcagattaacccccccccccctgaaaaatttaaaaaaaaatgggccattttgtagggatttggaattggtgaaatggatgtcaaatttgtcattcccaaaaaccctcgtggacaagttttcccgacttatgaaaaaaaaatgcaaaacaaagttaccctcttgaatttttcgatggcactaaaccgcaaaaatgccattctttattgggttggttggcacctgatgtcactgactacccattagtaaacaattcaatgttgaaaaactcaacatatccattaaattcgtttttgtttctaggattctcatgttggtatttcaagtaccgctccgacttctttgcacaatgctcatattgttggtggtggtggaggtggttgtgtgagtggcggtgccaaaattggaaaaatcactgccgaccgacggttggggttcaccaagttaccaacggaccaactgcgtgcacatgttcaagaaattttgcacacgctcaacacggtccatcttctttattctcgttcattttaattggtcctcaaactaaaattttaatagatcgacaattttaggcctaaaatttcaattatttatcggtcggtactagcaaaaaaccgcatccgaatccatcaactctccaattttttataattttttaaaatgaagagttgatggattcggatgcggttttgcattcagtttctcataagcttgtgcattagatgggggtataaaaccaagaagttcaaaatgttaaccttgttgatcttttttttaattttgaggtgtaggcccaaaaccgaaaatatccaaaattttatttttatataaagcaaatctaaagcatttaaaatgtttcttttttttctcagttcacgcttagccaatgccatgacaaagtgtattggttttccactgttgtgttgcagcaactgcttgaccttgagctgtacaccgcgtgcagcaccgcagttgaacaatgcgtccacgggcaacagaagcgaatgcaacagcgtctgctgctgttcagcaccgaaaaacggaagttggagcaggaaaagaagcaattgaccaaccaaagggcacagttgacaaaggcaattaaaaaaaaaatttttgaagattttttatttttttaaatttttttttacataaaaatttaggaaaaaacagaattgaccaagtgcaaagcgcagctggaacagtcagtgaaaacgttggcacctttcgaggccaaatgtcaggtattaccaaccaactcaacgacaattctactttttttatgcaagaaatgattgtgctttaaaaattcagtgacaattctctccctgaaatggaaaaaaaaattaaataaaaattggttattatttttaagttgtttatcaattttacaactttcataactaatctggtcaaaaatagaaaagcatttcccttaattgtttcaaaagttgacttaaaaaatgtacaattgttttatttcgaaaaaattgttaaagagttatttggaaaaagaaaatttaggaccgaagaataataaaaaaaacttcggattttcacccacaaacaaaaaaataaatttgttttctggttacatgccttgttgttaatggaccatgacaatgaaactcggatttcagcagatataaattcccagttttcaatactcctgagaaaattcagaccatgaagcaggaggaggagaaactaatggcggacaaacaaaacatggccaaagaaagtggaggaaatgaagcggctcaatgaacagtgaaca

SEQ ID NO: 11361 - DNA, 1967 bp, Heterodera glycines
gcggtgatgacagacaacagaacggacacattaattaatgccgaattatttttgtttgccttttcttgctgtttatttatttctcttgtgatttttaatcaaatttttgaattaaaaccaaaaataaaattattgaattcgctgaaagtttaaattttggtgtttaattgaacatctaactgaaataaataccaactttataatagtattgtgttttttgatcgaattttctcgatgaattgtgccgtctcatttttattatccgacgaatggcccttctccaaacaatggacttggatttggtcgttggaaagcagaaaagcctaaaaggggaaaaggggaactccatgagagtgatcagtactgatcagcacagagtgtggtgaaggagggtcccagggcaaaggggagggggagaagtgaatgaatgtgaatggcccgacaattatcccacatccccaataatctccaattatccgttgatctcccccccccgttccgatcatttaatcatttaagcccccccccctcttttgatttgatcatctttccctttcctttgatcaatcccaaattcccaataattcccactcattgatccttcgcttcttccccccccccttcggcacttgccacaaatgcgctgcccttccgatcgttccatgccatcgtctcacgcactttcgctttgagttcgcctctcaaatcgcattcgctgctctgaaggcgttccgtgtcccttttctgcttccacaaattgaccacttcaccgccgtggacagtgaaaaagacggcggacgaacagcgaaagagaaagaaaataaatttaaatttacaaatataaataaaaaatatttaataatgtttaactgatcagccgccgatggaaaccattcaaaaagggaaggcgaaaaaagggcccccgggggaagcgaaaggacaaacaaaggcacgcgaacggactgctcaaagaacagaaggcgtttggaggtggtcacctgaactgttgtgccatggttaagcctttccatttccaatcgacaaattttggcaattaccgcaaaaatgccattctccgaagagcacgggcgaatgttgacaatctcttcgcactcggctccttctggaacaacgagaacaaatgttagtacacaaattccttcatgataagtgataattttgatgtcctgagggcatctaattttcttgcttcaaatcccgatcacttggaatttgaaatatttcacatattgggaattataaaccgtgtttcctaaaatacagccctcgggggctttgtttttcaatccccctcaaaagggagctttatttcaggggagtgtcctaatttagggggggggaggctgtgttttaggaaatacggtataagcaaaaaattttttgttcgaatgctaaattcaaggtatttctgaaaatacaatttaaactaaatttgtccgggggtttatttacagtaatcatcctaccggtggtgccactactgtaattcatgcactcattttctgcccctcctccccggccggtgctgataatctgtccggcagaagtgccaaccaacactttgccttttgtcccaagtgccatgcaggtggcaaatgcaccggcaattttgctgaaaatgttttcaatttcgacaaatttacaatgtaatacagtaatgtgcccattacagtcggccaccgaaacatttggtggcgaaaaggggcaccattttgatctgttgtctgtcctcatatggcgattggtcagcagaatcaaaggcagaagaagactcctaaaaggctttatgataagttcaaattactgagcattggcactgatcagtcgtgattgattactcaaacgagtcatggaataaatcccaggggttgatcagcccgaattcatagaaatgatcggtcatgattatacaaaattatcaccctaaggagactgaatttgcttgc

SEQ ID NO: 11362 - DNA, 3106 bp, Heterodera glycines
ttcagacagagtgacgagttgcgctaatacgcttaaagggatagagaattaagcatttaatcgatgcattgctcatttgtcagttggcacttaccccggtgctttcacctcattgtccaacatttccatcgcgacaattgccgatggcatttcagtgctgtcagtgccatcgattgctaccgaacggaaatgccgatggcgctgctgcttggtgccaatggttgcacggctcacggcatcgccctgactttttgcgcttagcgagcaaaaagcggtgtcaaagcagggcaaaagaacggacaaatggccttttgagaaggcagctgaaggcgagagaagagaatgaatggatcaacgggtttggaagaaatgaccgaatggttcaagcattgtgccaccatctcacggtaaatattctccgttgtttaatctcgactgatttcggcatttttgtccctttaattttttcgtctcgagagtgtgcttgcctgattccgatggtggcgttgccgttgcccccttgccgaggatcattcgctgcggacttcgctcgtcggcaagcaaatcccatgccaaaatgctaccgtctttctgtgtgttggcaaattgtccaaaataataaatttattttcaaaatttggcaaattaattaaataattcgatgggagaagccgagaacaaaagtcaggcgaagtttttgcttaccaatccagcaaaagcagcagagaaattgtcgggggcataacgaaaaacgattacttcctgctcacagcgtaaaagcctttaattaattaattaatttattttttgtaaaatgccattaaaattttctttgggtttttggcatgtgtttcggttccgactgtttggcttgatttttgacttgaacatcacgttttctgaccgttgtggctgaagttcaggactttccagtgcaaattctgcaacaaaactctttcggtgcaaccgcaaatctaaaaaaacagcaaacattttcaatctcccgcagatcggcacgacactcaccgtccgattttggcacaaataaaacagcggcaattgtgtgggggtcctaaaatgggaagcaaaacggtgccggcatttgttattgtatgtcaatgccgtactttggcattcaataattttcttccttgcttccctcaccttaacagccatagcgcacaaacggctttctgaaaatgaatttgaattggcatggcaaatggaaaatggccaaatgcctttgaaaaaagcgttgctaagcgaaaaggtggagaagcgcgagctgaacgccaagttggagttgtgctgaagcaatgggcggtgatctgtggcggaagtgtgcgcaagtgaaagaacgccgtccaccaactgaacaaacaaagcaattatttggtcactaattaatactgagactgataaaaacaccaaataaatgcaacattttctctgaattcggccaagatagagagagagtcaataccgaactcacaaaaatcaaccccttatttaactggatttgaaatttgaacccaaaagcctcgagtaataattggcaaacagcccaaaaaagcactgacatgctcaaccgccttcaggaaaatgttcagtcgtcgtgtgccgctgcttttcctcccctccgcccattgtttggcgttctgttgccctcccttttcggcacttttttcctccgtcccatctccgctccgttgtgtctctttcgtctcgctctctgttcgctccgtttgtgtgccaattgtcagtcgatgctccggcatttgagtgaaagccttgccaagaaagtgccaaattccactttttacattttattttgttttttctttacctgtgcctttccttcttttttgccgatcaattccatgtaaaagtccattaaatttgccgctctttctccatttttggcttcactttgtccactgcgcgagtgcacttgcaaattctctgccatccttcaaaactgtgatcagacatggcattgatcagttttccttgtccaatccccgactatttccatgaaagtgatcgggtcggatttcatccaaaaaaggggaacagcatgaaacagtattcccggctttttcctgcagaatcccgttccggtcctttccgattctccgaaatgcttttccgaaggaaagtgatcaatccaagcccagccaactgagtcctggatcattctttctgtaatgagaatgtagttcacctttcatcgtcgaagttgacctctcttcgcacttccgtcctcacatccttccccaattctttggtcctcaatttgccgccctcggcgatccttcgcagcaaaagtgaacttttgaccgggtaatcgtccgcttcctcttcgtcgttcctgctctcttgtccgtctttttccgcttcatttatgccaattttctgttccttctcttcctcgtcgtttccgtccgcttcgtccgcttcttcatccttttaaatgtcaaaatattctcttaagctttcaaatctttgagcttcatcccataaaaatccttctcctcccttcccaagacactactactcacaaagtcgctctcgtactgctcgaagtcgtcctcgtactgctcgtagttctgctgctcctgcatgtgctgttcctcctcattcttcgcctccttttgctcctcctttttgctccttttcctcccattttgctgctccttctcctcccttctcttcttcttttcctcttctcctcctccttcttcttttgacttttctttctttttgtccgtttttttcgttcttttgtccactttttctttttctgtcgtcgttttttctttttttgaccgtttgtcctccttttcactgatttttctcgattctttgtctttgctgctgtttttttgatttgttttcgatggtttttctgccaattttcggcgacgatcgctggatgacattttgtcagctgcgcgaaggataaaattttctcgaaatgtgccgcttttttgggttttttaattgatcatttttgttgccagggcaaccaaattttaagggaatttattgaaaataaatggggaaagggacaaatgaacattttttcactgcgcattgatcgacc

SEQ ID NO: 11363 - DNA, 1790 bp, Heterodera glycines
cgcaatcctgcattttttggaaaatgcaggattttcgtgttaatccggccggatccggtccggcaaaaaattttgaattccaatcctgcaacaggatccgcaaatttgaaatttccgggctctagtcaaaattgttgagtctaaattttttggaagtttttggtcacaacttttttactaattctttaaaaattacatagatagtagagaatatgagagctacattctaataccaagatgaataaatttgattaagtcttaagctaagttatgctttattatttagcaaataaaatttaaataataattaaatttaattattatgaacactgatatttttgtcacttcggctcagcacgtctcaacacatcccttatcctcctctgtctctcctcttctgatcaccctctctctctctccatccactcactctcttccctccccttgtcttctctctctctctctcacttttcccacctcttttcctcggctcgccgtagcgtgaacaatggtaaaccacgtagcgatatttgaacttcgcgtcatggtgcttctctgaactggccactctgaatggatgcttgtacagactcttccattcttcgaaggcgcagtcgaattcggcaaagctttcgaaatttgcgtttaggaaaatcttttcgccggaggaagaaagcgcggaaaagggacgaccaatcggactgaaaagggaggacaaacggaggagggaaaatggcacgaaaaagtgggggaaaatgggatcattttgaatttgtgccggtgattcgctgttgtcattaccgacagatgccgtcgtcgccttcgccttctcccaatttgaccacttccatcccttcgcttttggtcattttgctctcctcctctttgacatttggctgataaattgcaaaatgtttatttcatgccctgatctgatcatcccccccccctcagattgttccttaattggtccgttgactcgactaattgccctcccttttgctaattgtctccccgcttttcccacctctgccccttccgttccgttgtccgtccgttcgtcgcgcccattcgtcggaagggtgcaaagcgttttggccatttcaatttccgtttttgtaaatgcatttggcgacacatttcgctggggcggagaaggcgaaggcgtcgcccttttgttctgttggtgatcggaaagcttatcaagcaaactttgaagtgcgctcattttgaaaagggaaaaggaaaagctgaaaaaacggacgaaaagcaaaaatattggcaaaaagcggacaatgtgagggaaacacaacaaatgaatgggttaattgatcagaccaaccgaatgaggacggaacgaaaggactggtgggacagaaagtcgggatggaccaaaaagtcggtggctcaatggcattctctttttggcctttcattggtcaaattggggggggggggaatgtctgtcatttcaaataattgtgccttttgacagacgacagttcgttttgcctttttcatgagcaattagtgattaatggtgcttcgatttgcctctccatttgctcagttcgttaagtgtccctttcgtccgcccattttgggaaaatgccccggcagaaattgcctgtggcaatgtgaacaacaactgttggctttctgttgccttcgatggttgttgttggcagtgcccggcccacccgctgcagcgatggcattcccagcgaagtgacccatcaaagcccggcggaggactgaccatggcaagggatttttggcggggggggggg

SEQ ID NO: 11364 - DNA, 2260 bp, Heterodera glycines
  unsure (1)..(2260): unsure at all n locations
gattgagagggaagacgcgaccagcgaatgaatgcagcggcggcggtgaccctcccgtcccnccggggtttcccctctctccctcccccgtgcgccctttctccgctgacccgtggagttcgtcgccacttccccaacccaaaaaactgtctgttccttcgcttcttcacaacgaaagtggcgggctgtcccccacggggaaatgacccatcgtttagttgggacggaattcgccgttgggttggccgacggaaaggtacaaagcggcggagaaaaagaaagaaaaaagataaggcggagggaggggaaaggggcgattgggaacggacggactgaccgatgggaggaaaagttacggtattaaaaacagacgaacgaatggaaagagacgggggggggggtcaaagagggaatcataagaggaagagaagggagtcatctccgtttatccactaataaattaatgcaacaaaataaatttgaaaaaccgaacagaaataaatgacaaaatgaaaaaaaacaagtgatataaaagaatgtgaggattgagttggaacataaataaaactgaacggacgaagcagcgaacggcggtgatatgataaaagggagagtaggagaacagacgcatcgcccttaagttcgttcctccgccgttattcatccagatcattcaccaatggttccatgcgattgacaacgtcggaaagagtggtccatggggacgaatggtaccaaataaacacgccgagaatctgtcaaggaaacagtttcatattcctatctaagcaaccgagaaaaaaagaatgatggaccgacctgaagccagtcaagcccttccaagcattgttttcgtttgtcagaccaatcgtcagaaagcaattccaaaatcttcgtatagccaatagccgttgtgggttttttgtcggttacggaaagctgaacaaaaacggatgtaagtaatcagattcgtattttgtgaccaaatgagaattacctgttttttgacttggtcccgtgttaatttggggctcggacatttaaacagtgacaaaagcaaagccaaattgtaatgacgcgactggcgggcagtggcaatggccttttcacatgcgccgcagaccaaatggtggaagatgaggtcgaagacggaggcggacggaccaagtcgctgctggggacggtcgttcagctgttgtttcagccaattgcccatctgaacacgctgaacaactctttctggaaaagaacatttgtaagaaacaaagaaaagcatgcgatcgctaaatgaatgaccttcggcattgtcacttttggcacaaataatgtcacaaagcgacagaatgattccctcggcttttatcccttggtcggcggaacgggacgatttcataacgaaagcatccaataaacgtaggagcaccgatggaggatcaaaggaaatgagaccgccggaaagcgaagggagcgcattcagttgcaagtcacttttgcccgttttttgtttgtatttggcaaaaaggtcctgaaaaatcaaagcaaataaaatactaattgtgagaagggcggcgatactttgatggttgggacaactttcaaacggcgcatggaaacagagcctaaatcgacactccaagcagccaaaaggttgcctgaaatgttaaaaaagtcaattagaaacaaaaaaaagtcggccattactcgaaaaggtgactcgacagcctcgtggaccaaatgcgacttcggacttgttcactgcaactggcaatcccccagcaatgcctttaaatacatttttcggcatacgttcgaccaaataacgtcgtttttttgtttccttagtgccatggtgcaacagtttcctaaaaatagttttttgttttatgagtaaacataacaaccaacaaaccttgactcgaaaagcgtatcgtccaacttcagtttcttttgcaaaacttcgccgttttgaaagagtttggtgtcttctttgtcaccaaaaaccgataagtcgagacgattttctgtgtcttctaaaatgcattttttggtaaaaaaaagaagaatctcaggcgattactaccgccggagtcatcagtgtcgtaaaaaacaattggtctctttgaagttgcgttgttattattctgattgtgcgttgtcatcatttggtggtgatggccctcttcataatcatcttccnactntnaataatgatgattnaatcccttgagtatttatgattatntaagcctaaagcacttac

SEQ ID NO: 11365 - DNA, 1156 bp, Heterodera glycines
cggtggcggaaagtggacatcatcatcattttgttttatttggtgtgtggctaactgtacatattattattattattattgttatgtttgctctctgagctgacgggaggaggggaggatgagaaaagaatgcagagaaatgtgtgtacaattaatttacaaaattatataagatagaagaaggaagcatcatcagaataattgcaacgggggtgtcgggaaaacccaaaaattgtcaagtagagacaaaaaactggggtcccaagaagacttgaacaacacctgggcaggagggggtaagtgaaaaaatcaaaaaaaaaaaatcatagaaaaattgggatcaaaatattttacactatcactaatttcctccattttctcattaaattagcaataaaataacgtgacaggtacaatatacatacataaacacatattggcacacaaatgcaaaaacaaaattaactgacttttatgaaacaatgatcattgatcacagaccaaaccaagaatcaaaaaaaaaaaaaaaaatcaaaaattgcacccaaaaatgataaatttaaaaaataataaattggttgaaattggaacccttattaaagtgctagactatattgaactgaccacttccacaatgctcaacccgatgccaccgccagtgccattgttgttgagtcggctgagcgcaatccgctccaccaccaactgtcgcgcgccttccgcatcaatttgccgttcgttccactgttgacgaccacggcacggatcggcaccagcagcagcagcggcaggagaggatgaagctgatgatgcctttttagaccaattaagcgctgaatgatgatgatgagcagtgggggtggcattattggatgtgccaccgctaccgccgcctccgccgttggcaaaaattgaagcggattggcatcgtgtgggcggttgtggggcaaacgactgcttcttcttctgcgggtggtggttgtgttgctgttgttgttgctgaaagccactggcgccatgactgttatgttggcgtcgaatctgcaagactttgtttttgttgttaaaatatccagaattattatgccatttaatcaattaagttttattttattttcaaaaatcgctaaaaaagttacataaaataatcagaaac

SEQ ID NO: 11366 - DNA, 1778 bp, Heterodera glycines
cggggggagggagggggaacaaactgctcccgataaaaacagatcaaaaattgatgatctgatcggtacacaaagggaatggacggatacatttacagacagaaaaagcggaagacataacgaaaaaaagcaggactgaatttgaaaactcaaaaatgaggatcaaatttcgcttccaaaaacgaacgaccgaatggaagaaatggagaatgattggaataattaaaaaaaaaaaagagatttcgcccctcgataaaaaactgaactgactgactgatcggaacgaaatgataataaccggacctaaaagaaaaaagaaagacagaaaaattggggggagggacgaaatgggaggaaatttgacaacacacaacaccacttctgtaaaacaaacacacaaaaatttatttcgtatgattaattaagaggggggtgggggaggacgagagtcgagagcgagcagcacttttctcaccccaaaacaatcagcaagaacaacacacctctttgttgaagagcgttgacaaaggcggccatgtccggtgggataccgcgcagtttttctggagagggggggggggggggggaattacccttaatatgtggtaataaaaaaaagcaggcaacaaaattcattgcatcccactactacaatataattggagaagagcagccagagttcgagagtgtcgagtaattgagcagggacggtcccaggggggtactcgggatcagacttttagggtcaaaaattcaaaaataaagttaaatggaggtcgggcggcgttaggcgttgccgggaaattttttttttttgaaaattttaatgtattctgttaaaaattgcttaaaattcagaaaaaatttgccaattttttgttgaattccctccaagcgccaaaatctttggattgtccttggaattgagtgtctcaagctaatgctcggcctcaacaatttgtcctccattttcgacatgccctaatgttccgtccaattcccgcgcggtgccatcaaacatcacctacccacaacgtagccgtcatgtggcaacaaaaaagggagttgaagcgatgtgccctcgaacaactgcggctgctgatgatgttcgttgcctcctctaccaccatcgtgttgatgctgttcagctgttgcatctgatactgcttgatgttgttgtcgtgacagtgccacgaggtgttcaatgagttcccgggagactgccggtggctcaccggcgtgcgcatcgcccacataatgttccaacaaaaagcgcatcttcaaaggtgttaatgttaaacgatttttttaatgaaaattggtgttcatgatttaaatctagctaataaaggaacattccgaactgtgactgctcatatcacttttgtaaccactttcatcgtgtagagagagaagagcatggtatcaaatttgctattgccaatttaaggcttacattttggcaccaactcgataaacggcttatatgtagaagaaataaattcaattaaatctattaaaaataaaataattaaaaaagatttggttacttttttgacttcgtttattgacttcccattatttgcttaatttatttaagcggagaactccgtttttattgcttcagcgtttaggtgaggacattttgagaaatttaagggattcgtcctcaatataagtcggctttttccccactttgtgcactcattattggcaattaacaataattaacaattatacaacaaccacctgcacactgttcagccggtagcaggtga

SEQ ID NO: 11367 - DNA, 1225 bp, Heterodera glycines
  unsure (1)..(1225): unsure at all n locations
gggcttttttcctgtttatatccgatggatcgatcaggcgggattaaccccataatgaagaacatttttttttttttaaaaatgggccattttgccccccccccctaaaaagtactatttttggcccacagcgccaagaattttgaaaacaccggaagaaaaaaatttttacgtgccgatgccgataagcaagaaaataaaatcttggcgccccgctccgaatttccgccctccctccaaaaaaggcattaagaatggggtctgtaaaattcagtaaaaaatagaattcgggccaacttgtttttgccacaactcgttcctccccccccccccccaatttagatataaaaagtgccaataatttcatcgaaaaattttgttgacgttattagtgagacccccaaaattggacccccttcgggtcatgacaatatgaagagaagcagctcacgtggctccacacattcgataagcagtggtaacatcgcagaagatggcgatgcttccagctgatgatgattggcggtggtgatctgcagagatttaaaatgcaatacagtaaaagcaatcaatcatcaaaagatttttctattaggtattatccgatgcagaataacgagttaaatccgtgtctaagctaattatagctcaattaattaagattagcaaaaaattttttgacaaaaaatgaacggattcataaaaaaaacatttaggatttcaatagaacccattttattatatgacaaaatctctgctttagcttctggtaccaaaaatgttaggaaaatgcaaaaaaactcaaagtgcaaaaaaaaactcagttttgacaaaaaaaaaattccagaattttctcgaatttgatcaaatttcgaatcggcacaaaaaaagtccggcatttaaaaaattcgggtcccattccacccacacaccctgccgctgtttctgctgttgttgttgtactggttgttgtgtgaccgatcattggcaccagctgtggcaatgtgtgtcatcatcggcgtcgtcctttgctgctgttgccgttttgttggtggttgctgggtgaaatgtgccgaggcagaagaagcagcagtgatcagcgtaaccatttggtgccgctcctcctcctcctcctcgtgttgttgtacagctgttggtgctgctggtgttgatccaatatgatgggggttggcgtactngtgattgctgccgcatactgtagtat

SEQ ID NO: 11368 - DNA, 3334 bp, Heterodera glycines
  unsure (1)..(3334): unsure at all n locations
aaaatttctgccttttatacttntttgaaaaaaccactgagaaatgtatgataaatttctggatatttaagcggtgaattccccaccaaaaccatccattcattcaattgcactcacttccattgtttccctccatcgatcgaatcttcatcctgctgctgctgtacaataaagataattcccgtcagttttttttgttttgtttatttaggttttcaaaatgtattaaattttgtgcccttttttcaggatggtcagagcaacaacggccaggacaagggcatcagcagcgcgcgcacggagcatcaaaatcaatcgtcgaaatgccaagaaagcgcgtgccgcaattggacgagccggacatgtgagtgacgcgcgagggggggagggggtggcaattagtacaccaattgattcaattcaactccctttttaaatttgccaattttcagacacgcaatgcgatcgcacgggagaagtgcatgatgtgcctgggcaaagtgagctccatgacgcgtgtgaccatgggctgtgtgcacgaatttcaccgcaggtggaggaggggcttaatgaatgtcaatcaatttagaatcccctgagttcgacaagtctaaaagccgagttttcctggccaaaatgccggaagttttgcttttgctgatcaccgaattcgaaatccgttccgatcaatttgaacccatgacctctcgagttagaacaagcataaaagccaagttttcctggcctaaattccgcaaacaagttttcaattgataccgacaacagtagagccaaatcctctaatctacgggtttttatgtgtctatgattttcaaaaaaaatggtgaaaaaaatttatgagtttttttggggcctagaatcccgattttattcatggtgatttcggataaatgcaacgctttttatcccctgaaggtgcctgtaccgctggctcaaatacaacaccaactgtcccgtgtgccgcttcaatttcatgcgcgcaattccccctgaagaaccggcggaggaacagcaacaacgagaagaaatgactatctgatcagatccatcattgaaatctctgtactatcataatgttgtgtattgtgtatatgtctgtgtgttgtgtgtgtactcagtataaagatgatgatactcggaagatggaagtttttaattgcatttccctgtaggtgttatgtatttagcggtaattaatggagtccggattttaagattgttgtcaatttttttttacaaaaaattgattacctttctagctatgtagctattttattttggatcaaaatatgtaaatgacaattatcaggttagctttgatcagtgtcctctcgctgtctctcactctctagctgattagagtcggatctatgtgcctctctctcattaagttcaggctcgcccatccacactgatcggagggcaaaaatgaggaacacagagctattggtatttcaatttttaaaaacatttactagcaaaatttgacgcctccttttttcatatttttggtccattttacaagactttgattagtttatttatatccacacacacatacacgcatatcaccaatacatacaatttaagtgatcagatattgattgatacatgatacacacacatcaacgaaatacatatgtacaattcaaatgatcaatcggataaatggcaatttcttatccttcttctgttgttgtgccatgatgctaatccaacgccacatccgcggttgtcgctgtcgtcggagtagtcgccgcttcagttgttctgtgttggtcgccgccgccccattttgaaataggtacttacttaaagccgacgataataatcgttgtcatttgttagtcgccaccgcccccgcccactgttcacgccgtccgattctgcccggcagggacactgaaaaaacaaaaacaaaattagaatgggcagatgaattaaagtggcaaaacttacaaatcaggtgaattgcccacaagtccacagtactgaaagagaacttggaataaatttttactatccaaacgaaatttggggtttccgtgtccgaaattggtcaaaacaaaatgtatttcatgttaatagctagggatgggatttttatgtgctaaaaatcctgaaatatgtaataaaataccgtaaatccgctatttgaaggcccctctctggtagaaggccccttccaatgaaaaaagttgatttttaggggtgtatttttcaattttcttgtatttttattgcaaatttttctcaaaaatgccaaaatatgtgccaaaaccccgaaatatgtgccatatgtttttatgtgccaaaatgccaaaatatgtgtttttatgtttttataattcgctctaaatcgaaaattgttcggagaaaatgttatttttgggcttctctcgccataactaagccgcagaaaaatatgtaaaaacataaaaatcccatccctattaatagcatctctgaaatgcttctaaactcaattttcgagttctatttcgttttagttccacacaaagtaaaaaacatactgaaaataagccaaaacaaaaattcatttttcgtgcttttatgagtcttgaatttgtcctgcttgaaagctcaatcctgaaaaatgttgtccattttttaaggacaaactagaaattttggaatgattacaaatttgcattgagactcaaaatacagcagcaaagcgattcccccgaccctcaaacccaccactccaccggttgcttctgcttctgttgttgttgcttctgctgttgttgctgacggattggtatacagaaggcagagaagctgggatactgagctaaaatgtaatggaaaattggtatttggtaaatgcaatgcattgattgtgaaaaagtcgggaagccgcaacaaattttcggcattttaaatggggtgaaaaaagtgagttcgggaaaaagcaaacatttttcatgattatcgggaagaatttgaaataggtataggttacttacttgaagagggaaggcggcgcaaaatagccgacgataataatcgttggcattataatattgtaatgaattgtgtgtgtgggaattggccgaaaattccgttccttttatactgccaaatatcccaaatttgtagaacaatttccctaatttgaaaaacaatttttcacatttctcttaataactttgtgagttcggcacggatcgagaccgagaatagaccatggaaagagcaactcgagctctacaaaaacctgtggtcataaaacccccccccccctttttcgaaaaattttttatgatttcaaaagtcatgaaaacat

SEQ ID NO: 11369 - DNA, 3029 bp, Heterodera glycines
gcagcacagcgagccgatcataacggcaccaattgtctttttttgtttttttttaatactttgtacaatcaaaagttggttgtttgttctttatatttaaacgaattttgagttttataaaaacactgatataattgataataagataatcaatctcatcccaaatcccaattatcaattgattcgttttattttgttctttttctctctctcctctctctttctcttcctctctctcttcatcctccattctctttcccatgcttctcctccaatccttcaaatggttttggaagtggtggaaaagcttctcgaattgtgtcgggaaagaatttgttcgggtcgggaatagcgcgctgaaagccgagggcgacgggagggggcgattcccgcgaatgaacggaagttggacgttgctgtacagttcgagcatgttgacgaggatttacggattcacgagaaacattttcttcagtagaggaggaggagggcgaagttcgcgaattctgatgccgcgaaacggcacgtccaatgccgggcgaatgttgcgaacggtccgcttctgatggggactgctgcgcattgcgacttcgctgctgttctgccatttcccatctctctcttcccctcgctctctcttcaccgccgtcttctctctctccacctctccctcctctttcgcgcactctctctcctcttcctccgtttccactttttcctgattgtccatcgtttggatatggcccctgaagtgggctgaataacagtgactcttctgtcgctgctcttccgtttccaccttttccccagtgccgtctcttgccctcctcttcctctcgctcactttgccctttctcatgccgtctcttgccctcctcttcctctcgctcactttgccctttctcatgccgtctcttgccctcctcttcctctcgctcactttgccctttctcatgccgtctcttgccctcctcttcctctcggtcactcggccctctttctctctgttgtttgttctctccgtcccatccattacctccgcgttcctttgcgcccctctcccattcccttgaactttctctctcccaactgcctctgcttctgtctgtctcctctgccttcccattgtcttttcccctctccgtctcagttctcctactctcttttcgctctgcctgtctcccctctgcttttccccgctcttccgcgttattctctcctccttcgtcttcctctcttctgttgccgtgttcttcctgtcttcctgtgcctcgcttgtcgtttctcattggtgcgaatcttccagcgagtggcacattctgtgcgtttcccatcactgctgctgttcccccattgtctttctcattatgggcacttctctcctcctcttcttccattctcttctttttctctccatttcctccgtcttttttaactctttccatgtccgttttgggctccttttccaccagaagttcagcccgttccttttttatcatcatttcttcgaatggtctttttggtggttgaggaaacggagcaattgtcgcggctccatcggatggcgccgcggaagaatttgtcggcacagttttcgtatccattggataatttccacgggcacttccttcctctttcctcattccgcttcttcttccactgtttttgtcctctctttcccctgtcccatttccattggcactttctcctctctctccccttcccctcatttctccttcttttcccctttctctctctcccctcatttcttttcttccgtttgcacttccttcttcctctctcattcctccttcttttcccttttctcttccttcctctctcatttcttttcctcctctccatttttgtccattttccgatgttccaaaaccatccgtttccctcgaactgttaaatgccgttgtcgttgtctgtcttccttcctcacttttgagatgctttgacggaggtggcattcgccttccaaagagaggcggcggaagagattggggggacaaaaagggagtgaaaggactgaacgaaggccgaggggggccattgccttaaaaccaaattcaacgaaataaaaaagacggccaaaactgaccagcggcagaagggcgaccgccccacccaaaaagagacgggggaagggcaccagaaaagccaagatgaaaagcaacgaaggccgaaaggaaaagcagcggaacaggggggaccatcggctggggaaggaacagtgacgcggaatgagcggtggccattcggaaagatggaagacacaaaagtggcgggagtgcccctcctcccgaacgccccccccccccctccgtaccggattgctccccgcccccccccccccccaatcccacaaaaaccgttcggattagccttagtttcctgttgcatccattacaaattattgtgttggtcttttgtacaaattatacaataattgcatcgttaaagacggcaaaatgttttttttttgtaatgaccaatcaacagaataaataaagaaaaagcagcagaacaatgaaccgattggtccggataaaaaatggtgcttaaattaataatacaaaatttggctaattcttcaaattcccatgtccttctgctgttgtccgattcctttcttcccgcccaatgcgttcagttgcaccaccataggattctgtgaaggatctttcgccttggctattttttccacctaaaaatgccgtttcgttgtgccaatttttttttgcgtgccaccgtttccgcgtccaattcgtcctcctcgttgcagataatgtaaatttgttgtcggatttcagttccgtgcaccgaaaaaacctttgaaaagtctttgagtgccaaacaacaaagcaacgacagccgatgcccttttccgccccctttcccaaatgtgccaaatcattcaaggaatggaggggggggggggggggcacaaaaagactttttccgtcccagaaaatggataattgggggtgtttttttggtcgttacaaagtttgaaataaaag

SEQ ID NO: 11370 - DNA, 927 bp, Heterodera glycines
taaattactcccaattcgtccattcgtaaaatttgttagaaaaggttcaaatggacccctccccccccccctcaggacgcactttcttctccattcgatggcccttctgttccattaccgttctgctgcttctcttggcattgaaatccatcctaaaaaacaaaaatttataattgttactagaaaatctcattaaatttaaaaaatttttaattttttcgggcggagtttgaatacgatgaagagggatggaaacgtattgcacctttcccacccacccgggcactctgtcctcctctgtgttccggcatcacttccggatgctttagtttgatgtgtctgatggctctacaaatgttgaacggaggtgtcacgggaaaactttggctgcaaattgaacattcgattagcttttctccaacaaattccattttcccgtcgcttattttctcgagtctcgccttaattttcgagtagaattttacggttatgtgtccaataaaatgtttactttgcaaagctcaaattgaacagtggacaaaaatgaacgatggaattttttgaagtgttttataacgccggcactaataaccgccgcgtaaatgtcggcactgcacaatttgcacttccaatgcgaatgggtaatggcagacacaaatttactctggcaaaataaatttaaaatgattccaaaacaattacccatttagtatcaccccttttggagctgcttgccgtactttcggcgtaatgaattgccttttcggttttgctcgtcttcctaaattaggtatacaataaaataattttagtggtaatggaacaattattgtcagtaaaaaaagaaaaaaatgatagcaccggatggtttcgatccatcgacctctgggttatgggcccagcacgcttccactgcgccacggtgct

SEQ ID NO: 11371 - DNA, 1321 bp, Heterodera glycines
ttttctgattagattttttgctccccacccccagcgaaaaaaatttatcgaaaatttctttatttataatatttttaaaaattcaaaaaaatatgaacctttttatttcctaaaaaaaaaattccggcggcgccttccgacggtaccgctggaccacccattttatcattagttgaaaattgaaccccaaaataacaaaaatttcgtcatagaaaagcgagaattcctgtttgtttttgtggttatgactatctgctgtgttttgtacttttgagctcgccacctgacaacaccccttcatccatctctgtgttcttaccacaattcattcgactgttggcgaatgcttcgcacgacgcggccaccgtttgtccgaccattggtccgtcttcgtcccgctcctccccgtccccactttcctcgtctaaactctcaatgtccaccaaagtcggatccgcaccttcgctgattctccgtaaatacctcgaaatcgctaaatatatgaataattaataaacaaaatggcaaataatcaaaaatcagtgaattttgtttttccgacccttttcaatgtaattattttgccccgtaccgttttccattgccatttcactttttaagtcttttttgaagcgaatgctccgaaacgaatgttcgttgggcaaagtgatgccaaagtcttcgccaaatttctccaggagtctggcgtttaccaacagttcttgcatgcacaagttgcacttgggcacttccacctcttcagggtgcacctcgtggaaatgcatgcccaattctttgctgaaatcgacaaataaggaaaaattgcgcaaaaatacaaacgaacttggacagaaacattccgcaccttaattgaagaaagtttgtttatttattttgcaaataaatattaaacagtctgtgccttctccgttttatcctttcacctcaaaagagtgaaatcatttaacataagtccaaagagaaagggaaaaacggcgaaggacacttcccaaaccgaccaaatgcactgcaaattctcagtggcgtcaatgtcggcgtcgataaccgcaaaatcctgggaactcaaaggttttccacccattggagttggaaattcctaaactgattagaaataatataattctgagccataaattcgcattgtaacaagccctttgaggccaagtgccagcgcatttgtgtgaggaagggtgccaagcattgaaatggcgcaccaaatggacaatttcgaattttttgttgagcgaagatgacgagtgttgcaagaggccgccacttcgcgtgccaatttgactctaga

SEQ ID NO: 11372 - DNA, 2813 bp, Heterodera glycines
atgatgaaggcacatattacgcgccaaaatgtaatcgtttcttcctaatcggagattttataaaaggcaatgaatttttttttattaaagtacaaaatttaaacttgagaaaatacacttttatatattgtaaaagcattttttctaaattttattataaatcaaataaatttaattttgcaaaatacaaaatagatttatttaggagtattatgacaatttttaatacataattttaaaattaattttataacttatgataaaaatattattataaaacactttaataaattattttaaacattaaatttcataaaatattaaattatttaaaattaactttataatatttaattaaattattttaaaaataaacttataataagataaatttattattaaactatttttactacattattttaaaaaataaattatgactttttcttttttgtaacattaactgaaaatgaaatgcaaattggttgtccatgcatttacatcatcatctcattaaggacggacgtttaaaagaaatgaaacaaaatgcgccctttccaattattattttgcttgcctcggggcgatgaatggaacatttatgatatgaatgactcaataatttgtgccacaccacaaaatgggccaagcaaaacagaaaaacaaaaaaacataataccctcaggggaatttcggcggcagaagaaaggcatttaagcggggccaaccacagaagaaaataattccataaaaaagtgggtggaaatttttgtgattgataggcgaaaattggtaataatatgtatttatataatccaaggataaaaaaggaaggccaaattttttattttttattaaaattgccttgaaaattttcatgctaataataaatgcatcttcgggcacagaaataaaggaaaactgaagctaacttcaaaaaaaaaattttttttttcttagcaaataaaattcataaaatgaaattcttttaaaccatgtatttttcaatccatgtaaactctcgtatccatggaagggtgaagtgagggcacgagtccaccccccccccccctccggccgaaatgaaattttaaatatttcaaaaaaaacgattttttcgagtttcggctagtttttttaaaataactcccctctaaaatttctctacgtagaccaaggagagcttgaaattttctaaattaatgaactaattaaaaatttattttataggaaaaataggagaaaaaatgccaatttaatttaaaattctaaatttccattagaacaaatggacttggaaagtgcaaaaaaatgtctttctgtgttgcttggcatttttcccatgggaatgattaatgaatgaatgaaaattttgtttttttgaaaaattgttgctaatgatcattagcacacacacaattaaagtactctttaattacaatattgcatttttaaattcaaaaataggaaatatttaggaaaatttaaaacaaaaatatagtgaagaaaaatgctggggtgtccagcctagcagatgatgccgaaagggacgggaagggaaaatcggggatttgatttgggggaagggaggaataagcaaaaatctgggccctggataaatgaacatccccaaaaatcagcagaaatcccatgggtgtgccactagaaccgaatacgtgtgagggaatggacaaaaaagaagcaaaataaattaattaaattcgccaaattaaaataaataaaatcgccaaattaaaaattaaattcgataattaaataataaaaaataatgtcccaaattaaataataaaaaaaaatttcgccgctccctttgctcctagctctcggattatgcccgccgactgaatctcgagagaatgaactcgttcaaaaatttgtgagttatggaacggaaaaaaatgggagaagcggggatatatgttgtgagaaaagagattaaatggatataaataatttgcgctttaccaatgggattaattaatatgtaaatttgctttagagtattgtaaaggagtatcatttcgttgaaaaatctctcaatcttttaagtatcgctaatgagtcccgtgaaatttttgacaacaagcagctttaatacacaaactaattttttcctttcttggccttacaattaatttaaataaaaacgccgacgggcaacggcatgccaaaaatgctcgtttttgccaaccaacaataagcgccaaatgggctttttccgaccggctttttataataactttgtttaaatggagctgattttaaccaaatttggcaacattgatgctaaacaaaagaggcatttttgggacttttttgggcatttttcattgaaaatttttaacaaattcccccccccccctaatttcgacggcggcataggatttggccaaaaaagtggtgtaaagctttaggagaggatctattggtgccaatgtcaaggacacttatttactcgttagaagggcatgttgttgtggcacgggatgggtgaaagatccgtccggaagaatgcggggcggagaagcaccggcatggaccaaatccaattgagctgtcccccgggggggggggggggggtgccatcgttggcgcggcggatggcattcgccccaagttggggacccacttctgtttcccccgtccccttttttacctctctaactaagtacacagaaaaacagacacacacccaaattattctgtggtggtgtgaatgttcgtctacggcgttagaaaaggatgcgcttgaaagagcaattctttggggggagcccaattggacgtaatgc

SEQ ID NO: 11373 - DNA, 3447 bp, Heterodera glycines
  unsure (1)..(3447): unsure at all n locations
tccaatggccaccgcagaatcgttgcaatccaaatggctctccaattttgaaaaatttcattaaaaaatttttaatttcatttttactcaatggcccgtttattctttggcccaatgccaacgccgttgtgcccatcgctgggataaatgccaatgccggccaacagacaaatcgactcggcaaccttaataaatttaaaaaataaaaataatgttttttttggcaaattaataaaatacatagtaaaaattggtcagatacggtattgctacagatgtcaattttattaaaatcgattggatatagtaaaaaaaaaaagttaaaagttaaatacggaccatccatgccgaatagacacgcatacgcatgtagacaaacgccaatgctgcccatataaacaggctaaccaagctgtactcgtcaatttgtgggccacgaattgccttatagaaaacattgataaataaattatattaaattaaatcgagagtttcgtagtcttggataaagaattggtaaatttttttaatttctcggtttatgttatcccctccgttttctttcctcttcctcctccttttaccctactcttcctctttatcttccacttcctccttcttccccttctttttccccccctccccctctctctccccctcactctttttgtccactctctctcaattttcatcttcccttccgttcccattctcacttttcccttcccacttcctcttcttttttgccccattctttctcttcatgttccacttcttccttcttctcccctctcagcctcccactatttctctccattctctctctctcccctcttctaactctcttcaaaatatcatttttggtttctccgtacattcaatgggtcaagccaagtcatcaaaacaagtgctggcaatgtccagcaaagtgtttgcattttttgccatattaatggtgccaatttggtccattgaatcggtgtaggacgaacaatggcatccgcatatgttttgtaggtgtagtaagggccttgaaatagaaaaacaaattacacctaatataatccattaattattttttaatatatttttttgtaaaaatattccaaaaataaaaaaaccaaaattcttattgccatgtaatccttttgcttttgtctggtcattatattccattatcctttaaattttgatgcacttcagatcacttttacaagaggtatggggaaaaatcgcataaaaagataaaaattaatttaaaaaataattaaaaatatggaatttcaatcactcctagaagggttatttatttatttttttatgaaaatttcaaattaatttctaagtgccattttcactgacccgtgaacagcccagtgaagctgtacaggtaattgaacgcctccagtgcatttggctcgtgttcataacgttcagcagtgtcattgttgccattttttccaccatctgtgccatccttttttcgtcgaatgtccgcaatttcataagccaatccaatggcctgattattttaaatattttttaatttaaatcgactgtttgccgacccgcaatgtcatgatcagttggatggcattggtgacaaattccaggcggggcagacccacaaaatgttggcaccggagcagtgccaagaagatgaaagtgccaaaaaaggaaaagttggtgagacgactgaaagtgaacaaaaaattgataatacgtgagagaatcatgtcttgatgaaaaaaaaaatttaaaaaatttgtgaattgtatttggagtaagtaagaaaatgagctgatcatgaatacgatcagatctcggaccaggctttttagtaaccactgagctcgaatatgacacccattttgaccaactctgaacctcggacccatgagtaaaaaaaaccaattaaaattttttcgaaatgctagaaattcaaaaaatcagatattatttaaagaaagtctcaagaaaatcttttttcaaaattttatctgaaattactaattttttccaaaaaaacgctgaagtttttcacatttctccactattatccaaaatttgcatgaaaatgggaaaaaatgatcgaaataaaaaaaataagcattgatcggaagaaaattgtatatcttcctattttcaatgtcaaaacccacctcggacatctgacaaaagtgatcagagccaaatgcgcaaagacaatgatcagcgaacagagtgccatccaaccgccgacaatgtaagcgattgacagaccgatcagaccgtccaattggagacggatggcattcgaatttggcagccgtaaagcagcggcgatcagtgcagagaaaagcagcaacagggcgtaaaccagatcattctgaatgccgaaaagcatgagggatgggaaagaaaagtaagcaattttttgatatttctaattgttgcatttagaacccctccctcattccaaacacaaaaaattgtaggaatacgagacaaaattacgcaaattcgagaaattaacaaaactacacatgggaaatttcaaataatgatgtttacgaattttaatgaactttcttttttaaggagttttgggttcgggaattcgaaaatggccgatttaactccgaatttgggaaataaactaaatcgaaagcgtgtttaggccattgctttttgttttcccaaaatggagggaggaccttagcccgactgaagaaggttggtccggctgacaattgggtgggcggagacggaacaaaagttgcttcctcctccatgacactcaaaaaaaggattttaaattaaaatcaaaaaaagattttctctgtggtgtaagagtttcaagaatagaaatgaatgaatgaaatattgaaaatccaatttatgtattcatcattcatttttattgggtaagaactctacaaaattaaatttagtaaaaaaaattgaatagatatttaaatatacaacataaattcgtgtgtttatattatcaattctcattaatcagcagcgccattttttaatatcatgataaaaaatatttaaataatacaatgttgaattggtatgtaatacataaaaatagcaaatttattagatcaaaataggggagggagcccgtgctgcattaggggaaacaaaatccatgttttgtgattataggagagggaaatttgttgtcagaaaccgactgaaacccaacggatatgtagaaaatggccctgatcaatgcatgataaaagatggcaaagtcatcatgatcagactgatcaatgtggcaacaacaaacaatatccaatgaatggcattgcgttgatgcataccggtaacttttgttanatttgagcttcgaccaaaactgtgtgaatcacactgatcagccattataaaaaataacacaaatcatattccaatcacatcgggaatagagaagagaaagcagcagca

SEQ ID NO: 11374 - DNA, 4517 bp, Heterodera glycines
  unsure (1)..(4517): unsure at all n locations
ttttataaatttcaaacttttttatttttatttttttataattaattaatttggtatatttttgtctaagatgttaaaatggttagaattaataataattattattgtccactaaatgacgggccgatcctccgttctttttcatagttttttatataattggataaggtattgcttcaattttattgttttatgcattaatgtgaggataaacttgacgtccagacagatcccgttggaaaaattaggagtttttgggggaatttttaatttattttaaaagaaaattgttcaaaatttaaaaaattttcaacatttccccatttattatttaatactatcaaaacaataattttcccggcgatgcctataggcacagcaggacctccccccctctcctcaagttcccaaaaagttttttttgaaaaaacgccgcaaaaaatggttttgtaaaatgcttagcggaaataattaatttttgaataaaatcattccctggaaaaatactaactatttgaggaaaattaaccttttttaattatttttttgttcaatttttatgtgtacttggatttcacaaattttccaccgttatgtacttggaaattggaatgcctgtacttggaaagtgacttggtacgatccgagccctgaattattaacataaaaaatcataaatattcttttctccgtctcatcgtcattcattcatttttctcttttctgaatatttttatgtaaattttttaaatttttcatcatattactcaattagagaggtgcgagagtctcatatttcatcttgacccgaaaatttcaacagaaaccgaaaaattttacaaaaaaaaaattgggcaaaaatttgagaggcaaaaacgtgaaagtggaccaacaaatatctcaagaaaaatttgaaattcagataaggaacaaggtatcataaatttcacttaatttctagaaattaaaaaaataaattaggtaactcaacaagaagcatccgttaaattatgataaaataaaagataccatctcaaaataaaatcgagaattctttttttaaattcaattctgtccaatttttaataaaataaagttttcaattatattaatggttgtgaaatggagagaaaaatgttaaaatatttaaaaatgttgattaatagttttcgtttttctgtttttttcccaaaagccccaaaaatatcaaaatattgatttaaaacttgaaaaaatgttttaatgcatagattgttttttattatgcaattttacgttaaaatgaaaattttctcggctaaaatgattattccataaaatttcacctaaatttagcggaagaaaaaatattaaatgagaataaatctaaatgttttgtttatttttaaaattaattttaacagataaattaataatttgttgaaaattttcggcggataccaaatgctgtgatgttaataaaatatattttaagcttaaaaataaatatttaaataagacaatgatttcttgttaggccaatcacatgttttaaattttttttattagtgatatcaacgtctaaaccaaggatggcacggaattccgagatttccgacattttggggtcggtattcctacttccaacttccgaaaattttttgatgcctcggattccatccctggtctaaaccagtggtgttgatcgtttcgtgtttcatgttcgtatttttcgtgtttttaaggcaatggctggaacggctaaccatgcaactttcatgagctttcgggtgatactaaatttaaccgggtttgaccgttttaaacagttgggggttcccttttttctgtatttttcgagtttttgaaattgttatcagcacataagaaaatgtataaaagggttattaattatgaagtaaaaaggaataatcttaaagaagaattagagtttttctttcttcaatctccttaattgtttatgatttgtcctccgtttttgcttcattcactgtaacatcgatggccaaagtcactttgcctcgcttttgtcgtaaaggcctttgcttgggtccatcagttccttaattgttcataattgggtaaataaggagaagtaattgtcactcaccancaatgaaatgacattggcatatccccagctgttcgatttattgttagaaacatgntcatcgagtttttctctgaaatccgcaacgccgctcttttgcgagacaattcgaaaggatgacaaacatttgcaaccccaatattcatctaatgactttaattatcataattattgctaataacatttaatttgcaccttcttttggagcattgcacaaaaggaaaatgcccaaccatttctcattgtcagtgcttccttttttcggatttatttctgccacaattttccatggaaatcctccgatgtacacagtttcacttatacggtcactcaaaatgatttctcgcgcaaattccgacacttttttaatgtccatcgaaattgtcctgttggatttgttgggatcagaaacgaatttctcaattttttatctgtctcggttaaatcgatggccagtgtcactttgtcctcattttggttgtaaaaaccattgttttggtccatcaatttcttaattaaccataattagagcaattaaggaatagaaatgaaatggccaacttaccgcaatggtaatgaaattgttgaaacagaaccagctctttttcttgttaatgacatggtcacaaaatgtcccagtcgaattgtccaaattgtcaaccccattcttttgcggaacaattcgaaaggttgccgaacaaacgcagcacaaattcgaatcttaaaacaataaaatgatctttttagtaatttaaattttttggtattttcctaatttttaccgtatatttccaataaatgtacaaatattagattaatttatggcatatatcgaagtttattgaattcctaaaatttcccgagaccgaatatctagaggccgagaccaaaaaaaaagaaactcgagaatttactcgagtcgagttaaaaatggaattaaatcgggaaaacacacccctaagaaatgacttgaaaaattttccgaaaatacacccctaagaaaagttttctcaaaaattgaccgccaaaatttcatttttttcttgataaaaaattttaggtttaaaaattttccttattcgaaaaacattataaaatatttaataatcattttaatgaccaaaattaagtttttggttaagttttacgtgttttgctcactaaaaaaccttaaaaattttttttaaaggccttttttcatgcctttttcgggatttttgtgccttttaatttttaaattttttggtacctattttagtgcctttttcgcgatttgtgatgccttttttgcggtctctagtaacatttgtacatttattggcatttaaaaaatgtttatgtgaaatatgtccgataaaaactaggaaagtgaaaattttttttaccttcttttgttgctatgtaccaaaggtgaaaggccaaaaacttttctctgttttttatatttattcttttttgtgccataattctccatccaaatcccattatttgcactgttttgctcaatcggcgactccccacagcttcacccgcaaattcggaaaatttttcaatgtccatcacaattgtcccatgaggtgaaattcgtacatggcacggaaattgcagtgggtacagtatgccgttggacatcccacgaaaatttggagggttatggtactcttccattccaatcacttcttccaccgttaaattgcgggatggaactgtaaaaagtgtgctaattaaattaataggtgtatttttagaattcaacccaattacaaggacccgtaaatacggtattttcgagttctaattatgattaaccatattttttatgccatcggacatctcataaaaattcatttggttatagtactggtctacttcttccgctgtcaacaagccgaaaggaactgaaattttggtacaaaaataaaaatctgttttatttttatatcccgattcttcgaacatcaatttgaattttttgttttaatttagttgcttctgcttcgcattgtgaaggtgttcggcataattgtggctttttgtctttgcaatgccatcgattcggaagaggcgaccaattgacaaacaagaacaaaaacagaaaaagtatctgtgctcattcattttatgttgcctttttccattagttcgttctttgctttttgtctaaaatttttacattttgtgaataaaatttgattttttgaatttttttgttgttgtaaatttcgggaggaatactcccttttctctccatttttctgccagttttcccatcgttttttttaaaagcaacatttagctattgatatgggtcgaaaaatgaactcaactacccattggcatttgaatttggattttgttatcttccccctccccccccctccattttcccatataattttttatcgaa

SEQ ID NO: 11375 - DNA, 2402 bp, Heterodera glycines
  unsure (1)..(2402): unsure at all n locations
acaacaaaaaaaaaaaaaaaaaaaaaaaaaaaaaaaatatttttttttttttttttttttatagggggggggggggggggggggggggggggggaagaaaaaacaacaaaaagggggggggggccctctgcggtgtaaaaaaaaaaaaaaaaaaccaccccccgccccggcggggggggcgcggggggggaaaaaaaaaaaagtggtaaaaggggggggggttaaaaaattttggggaaagaggtggggggggggaaaaaaaaaaaaattttttttcccctttttaaaaaaaaccccccccaggggcaaaaaggcaaaggggttttccccccaatttcccttttttttccccgttttaaacccttaagagaaaaaaattatttccaattttttttttttttgaaacccggggggttcccaaaaaggaaaatagatcctccaagtttttttaaattgaaccaatttttatcatttttaaatgaaaatcntaccaatgagctaaatatcgcaaaaaccaactttttttgtgaaaatctgttaacaaatgcaccnaaaatttttaaaatttccctcggcggcgcctatcggcaccgccggaccccttctttcccaaaagttttttgaaaaagcgctccgaaaaaatgtgaaaatcaaatctgaatttctattaatattcgatgatttagtccaaaaatgattaattgtttgaaataattgaagatctcaatttagctagggaagcacgcacagaagtgattacttgaaaacaggatgcatatcctttgcaacttattaggagattctggcaataaattaagaaacaacaaaacagaaagaaatattcaaaagtgagcaatttttttcgaatgggccggattcttctgaacattttatttttcttaattttctttgctaaaaattatgacattattgcaaaactaattcacggcccttttttgattagagacaaatgaatatatgcgaaattttttaaaaacgtgcttagggaaagtcttcttatttaggatatttccttggcaacgatagcgtagattctagcaataaatttaataactacaaaagtgaaacaaaggctaaaatgtgagtgatttttttaaaaaaggccgcacagctttctcgcggaagcgtttttctgaacctttttctcagaaaaaaatagtcgtattataaaattaattttcacccattattttggttgttaaacaatattaatatcttacgcgttaggtaaagcgctggcaatatcgcttttttaaattggtgttacaacaagaaccttaaacgatatgtagcggcaccgaataataaaaataaattttttatcgtgttcacattgttaaaaaattgaaaatgatctcatcttgcatggattcaacaaaagtatgttggcttatagaagtgaaacggaaaaatgttcgaatatgagcagaacattaaagacttggtgaatcccggtaacaaaatctcaatttagctagggaagcacgcacagaagtgattacttgaaaacaggatgcatatccttggcaacttattaggagattctggcaataaattaagaaacaacaaaacagaaagaaatattcaaaagtgagcactttttttcgaatgggccggattcttctgaacattttatttttcttaattttctttgctaaaaattatgacattattgcaaaactaattcacggcccttttttgattagagacaaatgaatatatgcgaaattttttaaaaacgtgcttagggaaagtcttcttatttaggatatttccttggcaacgatagcgtagattctagcaataaatttaataactacaaaagtgaaacaaaggctaaaatgtgagtgatttttttaaaaaaggccgcacagctttctcgcggaagcgtttttctgaacctttttctcagaaaaaaatagtcgtattataaaattaattttcacccattattttggttgttaaacaatattaatatcttacgcgttaggtaaagcgctggcaatatcgcttttttaaattggtgttacaacaagaaccttaaacgatatgtagcggcaccgaataataaaaataaattttttatcgtgttcacattgttaaaaaattgaaatgatctcatcttgcatggattcaacaaaagtatgttggcttatagaagtgaaacggaaaaatgttcgaatatgagcagaacattaaagacttggtgaatcccggtaacaaaatctccaatttagctagggaagcacgcacagaagtgattacttgaaaacaggatgcatatccttggcaacttattangagatttctgggcataattaagaaacnnacaaacagaaagaaatattcaaaagtgagcactttttttcgaatgggccgga

SEQ ID NO: 11376 - DNA, 1605 bp, Heterodera glycines
  unsure (1)..(1605): unsure at all n locations
aattttttttgagtttttttttttccaaaaaaattagcaaatttttgtacaatttatgttaataaaattgcatagaaattttcatttttttttccgacggcacctatcggcaccgcccgactcaaaaaaaacttattttcttgaaaatttgctcaaaatcgctaaattttccattttttggacaaaatttgttaacaatttacattaaaaattacaaaatttttcccggcggcgcatatcggcaccgccggacccttccttccccacagtttctcaaattctctttggataaagcgcgccgcaaaaaaagggtgtaactttcccaaaaaaaaatccaaaataatgtaaaattacttaaaatattttgatctttttaaaaaatatagaaataaactaaaaacagtttgaaattaccttttacatggttaaaaattttaaaatttagcctattaaatatttttaaaaaaatttattatatttttttttttgaaaaattccgacttccgagttccgacatttttggggtcggaattccgacttccgactccgaaaatttttggggcatcggaattccgacttccgaaaatttttggggcatcggaattccgacttccgaaaatttttagtgcctcggaactccatccctggtacccatagtgtggcttttcttcccatttctctattgctgcattatttcgtcactttcttttttctcagccgtatcttttcctgtctaccgctggcttttcctctagttttctctgcctctgtgttatttttcccattttcgtttttcagctgtacgttctctcatctgtctatcgttggcttttcctcccagtttctctgtcgctgcgctatttccccttttcgtcttctccatccccaatttttgcacattgctctcctctgacaaattcgattttcaatggattcattcactcaccccaaagagatagcaagcagtgcatttttcatcgtttggtcgtccatagggacgcacacatagagaggggagaaagggagccgcgataaaaatccatttttacttcgtcaccaattcattagtaccatttccatttacccattcaattttgtaatcagtggcgacgtcacaccagttcatttcgttaattgacatttttcagataattttcactgcttttgcatacattcattctcgcgcattacaaaatgtcgattatatcaagtaaaccgatgaatatctcgtttagtaattcgtaagtttttttttacgatttaacctattaaaacccattttccgccctttcagctgtagtccggattgcccgggcctcacgtggtgctcctgacatccctaacagtgagaacatagacagagatgcggttgctggtttagtaaaaagttgtacaaagatttcgcgtccatttttaaagttcactcactcccttccccaaaattctggtgcaggtgttgctgagggttggtgttgtcatctggcggagaagaacacgttggcactgtttattccatccaaacttttctcatctactttatcggtaccatttttgtggaattgattannnattcgtttttttctatttttcatccttttcagcgcg

SEQ ID NO: 11377 - DNA, 2469 bp, Heterodera glycines
acttttctcatctactttatcggtaccatttttgtccccccccttaaatttcgtttttttctatttttcatccttttcagcgcgagaattttgtcgatctgttggagtactgtgaggagcacttgaaggtccgtcgcattttggcttgcttcaacaagtcggacatcaatccatgccagggcattccacgcgccctccggtgaaattttggatgccaaatttccaatttaccgttttttcagttgcattggcttcaccctcctcccgcccgaacgttaccccgctggcattgacaagaacaccatttttgcgatggtttacaaaatctaagcgcagtcgacgtccttctccccccccccctttctctatctttgtaaaagatcgacacaattttaaacgagttgtattttctatccatgtattcctacagaaaatagcgtttttcatccatccacagtgatgtcaaataaaagtgtgaccaacaagcagcgggggttcaagccaaattcgcaattcaaaaacgattacgtcggctgtaatccagaaatataagccgcacaataagtcagatttgacggtttaagcattaaagaaaatcaaaggaacaaacaaatttaagtataagaaatttacttggttaacaataattaaacattttaaagaaataattttaaatataatttattgctggaacattctttgactctgcacgccattttggttggtttttacagctcatctctgctgtcctctttgtgcacagaaaaaggcgtttccaccggaatttgcccttaaaaattggctttaaaaatacggaagtgtagtgataaaaaaaattgttgtgcacccctcgatttttcaggtggtggggacccggcaatcctacacacaaattttggcaccgttaattgccctctaattagctatgcccaaacccatttttgtacgctttgctcatttcggttacctgccgctgcaattgtcacttccttctcgggccgatcaccgcccaatgtttttgtggcttcaattcggcgaacaacagacatcccggaaagcacctaggataataatgtcgatgtaaacaggcacaaaaatgtacccattttaagccgatttgggatattattccataaagaggggggagagtgatttacggctttaattggaattaaagcattgcacctcgggtctatcccaagaatttgggcagtccgatgaaaaaaatccgtgccattgttttgcggtttattatgcccattctccgcatatttttacgttttaaaattgtccaaaaactcactttcccaaaaacaacgtgtcgtccgtcgagccaagttgtttttttgcaggtgctacaaaaacggaatttgtttaaaagaaatttttaaattttaaacgaacatgaaaaattgtgacccgtttgtgtctttgccggaattcgccatgctcagctaaaccaggaacaaatcttaaataaacatgcctaaaatgaaaattgtcacccatccggcgccgtaatgtttcaatttgaagttttcatccgggaatttctcgccccaaatggacttcccgccagtgccgtcgcccttggtgaagtcaccgccttggatcatgaagtccttcaaattaaattaatcttttttgtattagtaaaaaacttttatattcgatggaacatttttgggtacttttttttttgccataaattctttggatttaaaaacttctcgaactttgcacattacaattaaaaaaacgtaaggagttaccgaataccaggaaagtttaattaatttggttgcttttttcaagaaaaaaatgcctcacagaagccaaagaccttaatgactcggtggaaaacgctgccggcgtaaccttcctaaaaagacaattggcaaaaaccggaaaaaactgcaaaattttacccccttcggtttcttggcaagttcaacaaagttttccacagttttcgggacagtctttccgaataagccgatttcaatgcgaccaacgctttcatcgccgattttaatgtcaaaatacacctaaaattatttaaacaaaattatgtgtgtgactcattttttttaattgaccttctccgttacttttggccccttcggtttttctgcatcatttgattgtgtgatgtttataattgatgcaaaaataagaatgaaaatagctgaccaaatgtacattgtttgcctccagaaaatggtaattgatttgtacactggtggaaaaaagtctttactcaagccgatcaaatttgaaaaaaattaaaatttcgactagaaaatttaatgattattttttgtttatgtgtttttacttacccctatttatgtgctttttatgcaccacataattattttgatccactcattcattctgagcatgagtcgtttgatcactctttactcaaaaaagggcggaaaaaagtctactcagaactatgaaaaa

SEQ ID NO: 11378 - DNA, 1157 bp, Heterodera glycines
  unsure (1)..(1157): unsure at all n locations
ccgccccatccgacgccggcaaatgtaggcccccgctggtacaaacagtcgaagggacggaatggcggcggaacgatcggacgaccgccgggcagtgggaaaagcgcaggcggaggacgcggtgagaacacttgggaagaaatgagaaacgaacggacagtttagggaggggaaacggaccgaacaaacaaattggcggaaaacaaaacgccaacggagggacagagacagtgctaatacaaattgaagaagagcagacgaggcaaaagataacggacgaaatatacggaggaggaggacaaatattggcggaggaaaagagtgaagggaaggcggagaaagagagggagagagagcagggggaagatgagcagagacggcagacagagggacagcagcagcaacaacaagaggaagcagtacaggctaagggggaacagaagaaggggacggaggagacgcaagcgaatgcgccgattggagacgaatgagcagagggacagacagacggacgaacgacgcgagagagagagagaagcagagacggactgatcatttgaaactctctttcttcccccccccccccctctctctctctcactctctctttcttttgcctctctctcccttttccctactcttttcccccctaccgatcacctcaccgtccacaaaactcaattttttgtgcgactttcttcctttctttcgtatttttgcctttttgtgccattattcaactgattagtgagtgccatttgatcatattttagtgacataatttgttaaatcaattaaattggttaaaattaatggacaataaaaagtaaaattgcggtttttggggtgccattcattggcgcaattcaatcggacgaatgaatgaatggcaccgcctacagaaattagcaattaataaagttaattatttggttttattgacggtgttcctctcattcgttcttcagttagtcttcccctgttgcttttccaattccgttttccttcggcttttcctccctctcgatgggttgcaaagtgtgccattgngcgatgggccgtcgtggcgatgccaacatatcctanagaggcgcttggccaaagtgccccatttagcatgacaaagtgcggaccatcaaatggcgaagttcggcgcc

SEQ ID NO: 11379 - DNA, 3875 bp, Heterodera glycines
  unsure (1)..(3875): unsure at all n locations
cagaagaaggggacggaggagacgcaagcgaatgcaccgctttgagacgaatgagcagagggacagacagacggacgaacgactcgagagagagagagaagcagagacggactgatcatttgaaactctctttcttccccccccccctctctctctcactctctctttcttttgcctctctctcccttttccctactcttttcccccctaccgatcacctcaccgtccacaaaactcaattttttgtgcgactttcttcctttctttcgtatttttgcctttttgtgccattattcaactgattagtgagtgccatttgatcatattttagtgacataatttgttatcaattaaattggttaaaattaatggacaataaaaagtaaaattgcggtttttggggtgccattcattggcgcaattcaatcggacgaatgaatgaatggcaccgcctacagaaattagcaattaataaagttaattatttggttttattgacggtgttcctctcattcgttcttcagttagtcttcccctgttgcttttccaattccgttttccttcggcttttcctcctcttcgatgggttgcaaagtgtgccattgggcgatgggccgtcgtggcgatgccaacatatcctaaagaggcgcttggccaaagtgcccaatttagcatgacaaagtgcggaccatccaatggcgaagttcggcgcccgtggcggcacagcccaaaaggacgcggccaatggcatcgttggagccgagcttatcgtagtccatcaccgtaatcagcagagataccttctgtatctgctcaaagggcacttcgaaggagaaggactcgttgtagtaggggttcaacgtgcactttttgatggactaaacggacagaatgccaaaacaactcacaaaaattacagtaattttttatactgtaatccccggccgtttaccgttttctttttctttaaccgtttgccgccctgcatcagaaccaacttcacgtatgggtctgaatggtggggtgataattaattgactggttacgctgggaattgggatgttgctttgtccatggtacggtgaccgtaccctctctttacagtataggtccattttcttacccgacagtccgcccacgtccattttcttcagattcttcgcttccaataccaccaccgttaatttgcccgccgtcggcacatagcgcaaagagaagcaaatgtcgcccaggttcttctcctcaaatgccatggtattaattggccgtgcctttcctttgttcttcgctaccgcttctttgtcgtccgggggcggctgaatgtctttccattcttcgatcacttggcccaagtcgattttgcccagcggaagtatcacttgtccgatctctgtcaatgccgaagcgataattaccacttaattacccctcccttccccccactaattacggtcgtgtttgctgaagcgatcgaagtcgtaaatagagaacacgagagtctgaaagagagaagggacgaattggcgctttttgcaatttgtgcgcttactttgcttggcaattcattgaacggaacctaaaagagaggcaccaattaaattaaaacggaaattgtgccgtttcggcatttgaccagccttgaagatgaatgtctcgttgaataccttaatcgatcaaaaattccaatcacacttttctttctgtctattttgcccccgttttcgcccttttggtccatttttgcccatttgtcctttttcgtcctttctcaccgggttcagtgtctttctgtgcactttcgtctccactttcttcttcttttcaggcaaaaggtataattttacgtaagggtcctgcggtataaaagaaaaatgaattcattagtataaacgctaattgataaaatgtcctaattaattgtcttttgtctaatgaattaattctctgctctgtctgatttcggcatgccattctctctctctttctctctctctttttgtctctctctttctctgtcttcgctttttgacacccaccgatgtgccggacatgtccatgccgggcaaattctccgcttggattacggtgactgccaactgtaatgctttcgtgtccaaaatggcttttcctttcccttcccttttcaatgacctgtccctgctggaagtcgtagtccaatttgtactgaattcgtcccaggttcacctcctccttctgttccgcttgtgccctttcgttctgttccatatgatctcccaacttttccatgtccgcggtgaactgaacgaacgaatggcattttgtggtgccactaaaagtgccaaaagcgatgcttttcatcatcagcccacttttgtcatttaagcggttcatttcgctttattctcaatgcttttgcgatgctttgttccccgagtttattaacctcgtcctcctcgtctatttttgcgaattttgtcaggctttttgttttctttccaagatcgttcagctaataaaatcggtaataattattcactttgaaaaagtaaaaggcatttacgacgaacagtttttagtcacagtatttaatatttgaccttttttaagacataaaaattattttttattttccattccattttatttcttcgctttttgttttctaagtaatttgtaaattaatgctgaacttctctcccttaatggcttaattagcgaatgtttgtcctgccactcacttaattgacttaattgggttgatcagtgtctttctaattgctctgatcagccgtggccaatgccgtcccttccttgcccctccctcactttgttggcaccgcccatcgctcccccggcgccgatgggtccgacggcgtccgccgctgcgcttccgctccttccgccgaaaaatgccttcagtccgccttggccccacttctgttgctgctgctgtttgttcttctccccgtgccttttcttgccgaaaatgcgtcggatcagcgcgaacaaacagccgagaagcaaagcaaggccaaccaaaccgaggaacatcacggcccaaccgggcgctgaaaggacaggcaaatggcattcccacaacggactgactgttaatacccttcattttcctaaatttttctatctctttccctctctctctctctccctccactcctcactatcttttatctcctctcgttttctcctcccgctctctccctatctctttgtccctacttccctctctctctctccctctcattttcataaatctaatcttcctctcccacccgtcgcctctctcaacagactttctctgccaatttggtcatgtctttgccgtagtaatgtcttttcgtcggtcaccaatcgtgcggatggctcgcgactggaagtgctaaagggactctgattaattggcatgcgttgtctttgatctcgccgcgcacccaattagtggtgtcggccgttgcgtccccccgggcgtctcttcccgtgccccctcctcctccggcacctcctccttttggccctgctctttccttgcgctgctccctttgcccctttggcttgtcccctccctctctcctttgcttttgccctttgttttgctttttccgctcttttctctgtccgtcttccgctccttttcctcctcctcctcttccctctccccctcttcttccctttccttttcctcttcttcctcctcttccaccacaaattcgtcttcctcctcctcttccaatttcaccatttttatttttgctagattttttaatatttttttccgtttttccaataattttttcaattaaaaaaaaatcgccctattncaagcacacacaacacatangtattatgtatntgtcagtcagtcattcagagtaatt

SEQ ID NO: 11380 - DNA, 928 bp, Heterodera glycines
gagagagagagcgagagatagagagagagagagaaaaaagagagagagagagagaaaagggatgaaatgaaaaaagaattattgacaaaaagagattaattatttgaaaagcgtcggagaagcaattaagttgtttgaattaataacagttcgtcatcggcgaatgaataaattctgtgcaattttctcgactgattttgccgaataaattcactttgctttcccttactaatgaccttctccgagcatttggccaaatcattcggatgacacggaaagcaacttataaagaggcggggaaaaagcattttgctcttatcattgagctttgaatattttgaggacaatgaaagggaaaaatgaacaatggcacgggaaaagagaaaaaagagagagggaaaccaacagaagagggggggggggaagggccacgaatgaaaaatgagatggcagaatatggcaatggcatttggatggaatcgatggaatgtcaggggaaggaatgaaaatggaaaaatgtagagagagagagagaagccgaaaagagtgggcaaaggggacggaagagaagcagacgaagttagagagtgaacgaaactgaaaagtgacaccaccttaatcaccagtcagcagagatgttcaccatggactgctcagtgccaaaggtgttgttagccgtgccactcgcattggatgagcggggcaatgccacggggattatccgctcaccgcgggcggcacaacgcccgggggattccctccccccccccaccgccctatgccggtgtgcaccatattattcgttattcccttcactgctcagctaatccctcagttcgcattgactcaaagaaggggaaaaacacggcaaaatgccaaaaaaaaagggggggggaaacagaaggaaaaaaaggacaaaagaacagaa

SEQ ID NO: 11381 - DNA, 3798 bp, Heterodera glycines
  unsure (1)..(3798): unsure at all n locations
aacaaataagggaataggcggtagggttcgcgcggttgcttgcttaagcttaaggctgtgaattgcggagcgtttgacgattgagatgagagcactatgtgctttggatgaagaatgaattgatgaatgagtgggaaatgcttctagtgaaaagtggagattgttaatagcgacgcttttcccattagctgttgtaacatttaagagcccatccctatcgtggaaatcgaaaaatggaattgtccaggctcatcggcgattacagtaaaagataagtatgatattagtgttcaaagtgcaatgttctccacaccgcgcattgttgtactgtattagtttcaatagggaattgaacttttggcggcaatgttttttttttgacgaaaaaaatagaggagaaaaaaaaattgaccattattttgttgtttggtagcaaattgaattagttagtggaaaatcagcccaaaaacattgattaaattgataacagggaaaaaaaataaaaaaaataaaaatttgaccgttttgtggttttgatagtaaattaaacaaattaggcggtaatgacagactgaatcaaagaaatgtttgaacgaaattgaatgcagaacagaaaaattcgcttactgcacacattgcaatgccacgagcagtttgggcagtgcccaatgtccattccgtcgccaagcgcgtcatttgcgccatttccagtgtccacaacatgagcaattttcgggtcgctgctgatgttcgcgccattgtttgcaccactatcattgtccacatttcgcctcatttcctctgtttttgttggtcaacggcactgagatgggaatgggaatcaattagaaatgaatcgattttgacccttcgttattttttgtcgaatgccaaacttacgaaaaacttacagccatataattactgccgatagtgaagagagaaaaaaccaaatacgaaaacaaacacaaaaacgaaaacaaaaaaattttcgacgccctatttctcactctcgaaaacgaccaaaaaaaaaatctgtgtttttcttcatttttataattattttattcgttgtctgtctaattgcttttatttatttttttttggtttatttttgccatttaacctattttacttatatgtaattcatttctaatggtggcatgtccacagtaacgaccactgaaccctgtctcggccgccccttggctgtttgttggggggttcacatatttgttagtgttaggtggcaggtggccttggtttagcaccgcaaagttcacagttgccgaaaatgcttctacgccaccagcaaagcgcttataaatttgttaaatctcataggaaaatggcaaaataaacttttatataaaaatagcgcacaacgaacaaaaacaattaaaaaaaatagagaaaagagacaaatttaatggtcgatttcggcgatttttgaggagaaaaaatagctatataaattttaacttaacgccaaacataaacttatttaaatcattaattaagtattaataccttttcgaactcggagaagtgattcgaaactcaaaaataaatttgtaaataaatttgtccttcgctaaattgttcttagagatgaaaacaaaatgaaaaaatattaatgtcaacaaatgaaaagatttgtttctttgcactctgacgagtgttcaatggccaacgaataacgcccatcatccaattgcaaattctgcataaacagagggagggcagtatcaacacaattcaaaggagaaaatggggaaaaaatgggaaaggggggggggggcaaaatgtcgcgtctgttggagctgtggagattaaatcgttattatgagcaaaaatgctaattctccgctgagggcgcccaaattcaaatttttctgctatgtttagttaattcagtccccataaaattactgtatttctttcttactgtaagtaagttctggcggtttccttttggcactaatattcgccacatacatctgtattttagcccgtttcgcccttacattcaatttctgatcagtttgtctcattaatttgtgatctgtagggctcataatttctgatcacttgtgcttttcattttctgatcacttgtgcttttcattttctgatcacttgggcttttcattttctgatcacttgggcttttcatctctgatcactagcgcttctaatttgtttatagacgtctcttctcttttttagaggtattccttctcaaattttctctttttatttatagacgtctcttctcttttagaggtattccttctcaaattttctctttttatttatagacgtctcttctcttttagaggtattccttctcaaattttctctttttatttatagacgtctcttctcttttagaggtattccttctcaaattttctctttttatttatagacggccgtcttttctgactccctaacgggatttcaccaaatttaaaaaaaaaaattgcgcaatggttcaaacttacccatccttctgagctgttccaaactttgagtttggaaccatccggtgctaccagtgaaacgtggggggcccttcccaggatcgctgtagtccaaatattatccagaaatactttattgttccatctcaaacttgggtaattaaacctttgcttgtgaaatgtgaaatgaatggaaaatacaaatgacggatcgaaatggggaaggatggaactgatcgaaatgggaaaggatggagaaatgatgaaatgaaatgataaaatgctcgggaaatctcggaaaaggatttagcggagaagagaccagagaccaaacggggaagtgatcggaaatccactttacaaaatcaattaatatctaatttgtaataataatgtgttttaaaatttatttaattgttttttgataactcaaataatacattggtttcctgaattaattaattcgaaaattttgtccagaaactccaagctttttcgtattttgcctggacctggattttttttcatatttgacctggatctgtggacaaaaatccaggtataagaaaaatttaggttgcagaaaatagcttggacttggatccaggtccaggctgagcactaatttttattcttattatatatatgttatatcggtaaggggtttcgttgctaaaaccaatttctcgggatcgcgaataggtagggagctgaaattttgcatacgtatgcatcttgggacgggccatctgggaaaactataggtttttttgtccgacggccaactgagtcccagcggagctgaaactgactttgctgacagtctcagtgttacgaaaatttttgcttttgctcttagggcttagtgaaccccaaaaggcacaccccccaactgtgctctacaatattgtcagcaaaatttttttgatcagatcaaaggcctgacctgtaggttaggcaacgtaagaatcactttttttggacacttcagtaccaggcgaatagcacgcccgggtttgatctgagccagggggcgccagcagacttattgtagagctcgatgagctcgatttttgcaaattttaaaattttcaaaaatttcaaaaattttcgagttaggccccctaaacggtttttcagtttttgaattttaagattttttaacgaattttcctgngaaaacgaagaccacttccaaaacatcgtttttcgagctctatcgattggtaaaatttttaaaaaattttcgattttttccccgaaaatagaaaaattttttggcctcagcgggaacatttggagtcccgggccc

SEQ ID NO: 11382 - DNA, 4153 bp, Heterodera glycines
attaaaattgccttttttgtcgcagtcacatcgctctttttaacctcatgcaaatcgggcagatccttcagactctctccattttgccctatgaacagcgatttccttcttatttcggagaggttcttgcacgattggacaaggcattgttttccgtttttattcctttctttatttttctttcaaggaatcgatgactgtcgccatggaattgattctgaattccaaccccgcgtccatcgacaccatttttcctgtgcatgttgcggattccaacgggtctgaactcttcttacaaccggcctttgttgggacacttcgcgagattaatgttattgtgagttgggaatcaccgtggcaaattaataaatgctagttaatgcgatttgccatatttttatgttctttgtatattcgaatttttggttttaattttttttgtttatttttaaatttacttgtttagcaatcatatttgaagtctgctgcaatcgaagaaatcagtgattcagcattgcgtaagaatttaaagaacatactgaaacgcttgcctgatgaatttgttgaaaattcttccgatgttttaccttttgcgtcggaacattcgccgacttcgaatcgcttaaaaagtcttgcggacaaagtccaaaatgccgcttctcgaggccatcaacgccttatgcaaacgtcgtccgtctccaatttccgtagcatgggccagcgtagcaacaattttcccgcttcttcctctgtaaattttctcaacgatagtctcgcgaatgcaactggaaaaagtgggcaagaacaaccgacggcgaatgggcgtagcatttgccaggtgaatttatatttctttgttgtttaccattgccaaaaaatcttcaatctaactccgtatttttgagaatgtgctcttcttccacatccccgatcgaaacgaccccattggaatggactccgagggatcgatcatggaactttttcgacgtctccagtcaaaaaggcgaaagttggtgagcggagagaagaaaacacgctttttgacggctacggaaagcattggtcttcgattagtcaattgtattgtttttaaacacatgtttggccaattcagtgtccgacagaacagcgactgacgtggtcagtgacgaggacgaggaggagggaatggacgaagcagcggccggatcttcggtcagctcgtcaaatgacaatgttgttgatgaagtaaacattgaactgtttattttacaccaacagcattaattttttattttgagactgaagacatttccgctttgcccgacaatttttccgatgtcgttccgatcagtgccaacgtttctgggaggggttcgcccagtctcagcgggggacgcatttcggggcgcgaaacaccattttctggaaatgctcctgaacaaaacagcggtaaatggattaattgcgacaaattaaacagagttctttgtcagaagctgccaccatttgctccaccgtccctgccatcgccacgcaaccggtggaaccacgacgaactcttcccaccattccgattagtgtgcggaagcaaaatactgaaggactcgaggaaaaatttggaaaatttggtctcccaccgcaagattcatcaagatatcgtaaacattttgtttttaaaccattttgtatatttatttttgattatgtgcaggtgacgaaacggtgtcacttgtgagcgacagttggtcgacggatgtggtgactttgtctattcgaattcaaaaggttaactcactttttcgcaggtcgcctcagacaacgaagggttcaatgagcttcggtgtactgagtcggtcactttgggccttccgccgcaaaatgtccaagcgacggttggaagttccgtcccttccgccgcttctgtcgccgtcccttccgtccaacaacagcaaaacactccaaaagcgcattctcattatgtgaacaatcggtctgggagcagcagcaacactttgttttccatgcaagagaacaattcgcagcaggggacagcacaacttcaatcgaattcagcccaaattgaggcattttgaaagagtcgccaatattttatttttactcatttttatagacacaaaatgaggaggattttcgctattacgaccccaacaatttgacaagatgcagagcctttttggatgcaaagcgaaaactgagattggtgctcagttggaccacgaatttgccatacgcttctcattgtcaaacgcaaagaaataaaaacgaagaaaatgggaaagatttggccaatggaacgaacaaaaaccagacgaatggagcaaagactgagccgaacagtgaactggttgcactacaacaattcctaaagttgttgcttgccgaggcggtgaacagtcgtgatagaaaacagtcggcccaaatccgcgaggtccaacgctgtctgtccatttttgaaccgaaagggtacaattcgcttgtcgtcgtacaattctgtgttattttcgcagtgttcgcgttttgttgcgtacgttgcgcgaggagcaccgaaagaggacggctttccacctttacctgcaacagtcgcgtctcacgctgcttcaacttgacttttgcctggatcggatgagcagacgcattcgccgtgtcaaatcactcacttccgaatgtcttattgaaatgcttgttcggttcagtcttcaaaagaaggaacaacagttcttgcaacaatttctccaagattttcagcaattgaatgtccaggttaataattaaagtttaaaaagcttttttgtacatatttcagcctcggaatttgacggggtcccgactcgagttccatccgatccaaattgtttggtctctaatattggtatctgttaattaaggacgagaagattgaccttgtcgagtcgcatttgtgccatctctacgagcaactcgtcttggaatcgatgtggcggtcggcatccatcgaagacattgaatatgcacgaaaatgtttggagcgttctttgatgggacaaatttacgtttatgcgctcttcccaaacggtgaagcggattacttcagagatgagtcagttttagaatgctttccaagttcaaaatttaaaatgtttgaagggttctcaacaaatcggtccacaaactctctgagcttatttcggtcggccatcccgaattggcaattccgaaagtaagcatattgcgttgaagcaaaacttttactttcccacttcactcagaatctttatgcggaatgtccgtggccctctgctcaagctgaactgaacataatcaacgcgtacaaatcaccgcgagacaaaatggcatgaaatgatttacttttcaattcgaacaataattgtaattgccaggcatgcatcacccgttgctgtgagaccattgagaatttagttacgctttcctccggccgatcggcagcttcggcggatgacattttgccagttcttgttttcgttatcattaaggtgtgttgggctttatttttgattaattcgctggaaattattctttcaggcgaatccgccagctttgctctccaatttgcaattcatcgatggtttttacggaaaacgaatgcaaggaagtgaggcatattggtggactcaagttacaagtgccgtggaattcctcaaaacccttcttaataagctgtgcaattagtccttcaattatatcatcccagtattatgcatatcttcatcatattttaattgtctataaatattatttataaaatatgactaaacatttttgtatatcaaagtttctatcgctagaatactaataatataaacactgtatatacgttagtttttaaataaaattaattggaactgaccatcttcggcacgacaacgaggaactctttggcatcgatgccgaatggcgtcctcactatctttgcgcagcagaaaagtgattttaccatttatttcttttttggtattataaatgtgcttttgttgtctaaaatttcctcagaatttcactgattcaaatcgcaacaacaaaggccgtttttctggtcgatgtcctcgtgttggaagagagtcggacgatgactgaaagtcaatggttaaatttcttcgacgctcaggaacttgttggacgaactccgcatcat

SEQ ID NO: 11383 - DNA, 1532 bp, Heterodera glycines
aaatgtcaaaggattaaaattgtgcagaaacgggtccatttcgaaggagcccgacatgttggccagggagaaatgggaggaaagttcctgcgaaattttctaaaaaaaagaaagattttccctcaaattttttaaaaatgttctaaacatagtggtactattttcaattaactcataatgactgacacttatcaccagtgttaatgacgtgctaattataaacgtttctaaacaaagtaatttatgaacattttgctaatttgttaaaaattaccttatttatccccccctttttttgctaattatgccatttgcttttccttctcttttcaaaacccacccgagtgaagtgcactttgttgatgattgtgcagaagcgttctccgctgttttggccattttccgccgttttgcctctgctgcagacggcgaacagttcgatgaacaaacgttccctcatgtgccgtgccaaggcgcttatctcggcactgagattgcacatttcttagaaaatgaaaattcaattccaaattttttaaacaaacaaataaattaattaatgaattaactcacggtcatcccaaaaaataatgcccattaatccggcaaattcctcatccgaaatgcgcatcgcataaaagtcggagaagagatctttgttctaagcaaatggtggtggaaatgccaaattaaaaaaagaattaaaacacaattataaggggtaaatttcgtaaaaactttgaaaattccctttttttttgtttgattataaatttcggtttctaaaatcaatttttaaaattattgtcttaatattttaatttattttttgctcacttttcgtaaagtttctccaaagagtcgcgtaatttctgctttatgcattttgcactgttcgaccgcaaaaagatgatcaagttgagcaaggttaatgaaatggcagggggacatcagaaatctgacaatgcgcagaaagggggaaaatgcacacttatgaaaatcagcgaaaaaatggacagatttatggagtccaaattaatgcattaattaacaaacaaacattggcaccacggatggcattccgaggcccaaaaaattttcgaaaaacggaatcggaaaatttaaaaaaatataaaatataatgaaattttctaaatattttaataggctaaattttaatattcttaaccaattaaaaggtgattttttttatcgtatatttctatatttgtttaaaaaatattcaatgatttatttcatcaaaattttttagaacatttttggaaaagggattatttattacacctttttttgcagcgcgttttttcaaaattttctgggaaaatgggggggagggggggggggtctggggggtgccaatagggcgccgttggggaaaattttgtatttttaatgcgatttgttaacaaatgactaaattaattttcccattttttcttgaaaataattttactttttcccaccaaattgtgtcccttggtcattttgcctcttctcaccagacaattata

SEQ ID NO: 11384 - DNA, 3845 bp, Heterodera glycines
aatagttggccaccagcaaatgctaattgggaaaaatatgtataacaaaattatggggggggggaaatttggaacgaatgccaataatttaaaaaaaaattgcttggaattatttctagaaaattgttctcaattctcgaagttttgtaaatttttgttggcttttcctccttttgcccattgaatgtctgtctcactttgtcctcattttctttgccatttgtcgtgccgttcatttcatccgaaattcccgtcaaacgaaatgccgaaattcgcaacgattgaaactgaaacactttaattttaaacttaaattcccattttatttgtcttttttcattttcgcttacccttcgatagccgcgcacaatttcactgatcaatggaatttcattgtcaaaagcgcagaacgctggattaatctgaggccgaattatggcggatgaacagcaggcgacaaaaaaggcctaaaaagtgccaaaaaaagttaatttgatatgccaaatataacggtgagttaattagcactaattgccagtctggtcaaatcacataaaaggagcagaacatggggtgtgccaaaataccctcggccttattataagagtcaaaaagggaaacaaaatgggcgcaaaaccaccaacagagggtaaaaatggcaacattgggcctatcccatcaaaaagccataaaactttggagattgcactcaaatttatcatcaaattttcacaaaagttaccacggcggcgcctaacggcacagtcacacgaccccgtgcccatcgaaagtatgcgtcggatggggtctgattggcacaccctttgctcattaatgtgtggtgggccaactcgcgagaaaatgatcagacagtggggacgaggtaatcagcggaaattgattagaaagtgccgccacgtttaggttggcgcactcgctttttacgcggtactttttttgctcacgttctgctgctgctccgtgggcgacgcatacactgaagaggaaggggacgcgttgccgctgtcgccgcccccgatgggtcctccgccgacgccaccctccgcacccgcgttgtgctgcgcaggcggaggagcggtgaacgcggaagggagcgcgcattctaagagagaccattgctgcgcggcaggagaggcttctccgagcagtgcgtacagtttgcccgcctcggtccgaatctcgcgcgaaattgccgacgaaatggcgagcaaacttaaacagttgccaatgtggccaaccatgtgcagtgtgagtcatgtcaatgtttgaccattgttggatcaaacggaaaagcaaagagaaaagaaatcgccggaagagagagagtttaagccgtgcctttactatttttcgcctttctttttctctgtttgaatattttttcttttctttgccatcgtccggcacttcccacaaaaagtacaaaaattttaatttaatttgatttaactttttgctactttgggtggggggagtgaataatgccatgggtgggatcggatttggcacgtctcccgtctccctgggcccacctttgccctgcttcttcgttgctcatttccatttgttcgaattttgccatattttgctgctgctcagtttctctcataaaattattcggcctcgtcccctgtcgttggcacattgtctccgacaaactatttaaaaattaaaataataaaaaatcacaaaaaaaaaaatattattaatgttaatccgtagaaattggggggaaatttcaccataaacatttcgtgctaatcttcgggcttggcccactttccctccctttttccccagtaatcccccaggaaattcgccatctcaatgctatcgcacaatctcggacggatttgttgatgttcgccatccgttctccgtcaccccgacgccaattccatcatcacaatgccaatggcccatccccgcctcgccacttcgctgctcgccattccacccgccccaattcgttgctcgctcattggcccttgctctaatcccgcccatcttgcccacccagacgcgcatataaaaagaaatgaggcctcaactcattatcgctttttctccggccattcgcagccaaattctcgaaatccgacgaaatctcaccatttcatttcttttggcaatttttttccacaaaaaaaaccaaataaaaccaacaaaaaaaatactttgcgttcattcattttccaatttttgtcacatttcacgtttgcttcacatttggccctccccttgggctttccaatttcttgtccggcggctccttcagccgcttgtacccatttcggtccccaaagtcagcacctactgctttggatccattttccttcccttttttgggttttgactgttcggcaccaggaccgagccaaaccccccccccccctcgttctttttcccgtatttcgcttgcccgatttctgtgtgtcccacacacattgaatctgttgttggtggcgaatggcgttggcactttcgtccgccgtcctccgtccgtcgcttttcattttccaatttcgttttattttgtcggggcccaatttggtcacggtgtcgttggacagctaaaaaaaaatattaattaagcttttaaaatgtaaaatgcgaccgtccgggtccatgccaagcgccaaacatttggctaatcgacacgcgcggcacacacaacgcacttcttaaaatgtttggttagaaaatgataaagctggaaactaaaaggcctgaataaagcatcttttcataattaattacctccatgcggtgaccccccccccccgccccggtcaccgacccctttgggcgatgtcacagtttccgtcgtaacggcaccgatagacgcgtgccgcgatggtggagcgtcggaagaaggcggcacaagcgcggcatacctggcaaaaacagaaaagcatatgagtaccaatttaaatttgaaatgccaattcctgctgaatgccattgctatttgattagcacctgtacgccgaagtgcaccccgtgggcgtcgtcggcgcaaacggcgcaacaatcgtcgtcagctgcgggcgatgcattcgctgtgtcaacagttgccgaaatgggcacgagggacggcgagggcatctgctgaattggcaccgacacggcgggaggtcaaagaaagcgtaatgagtcaattatcgagagaaatggcggaaagggaggagagggagggagagaggagagaagcgggaggaaaagctaaacgaaaaaattattaaataaaatatattttgtaattttacaacagtaataaaaacgataaattgtttttaaccactaatatataaaatattaatataatatattttacatatacatattataattttacagcgtataaacaataaattgagggataaaaaagacaattcaatcaatagcatatgaaaagtgaatgatgagaggaaattttatatattcttgggcaatcattaagaattggtgtcccgacgaaaaaaatgttaaaaatttgtcgggtattttttctaggcttaaaaaatgcgctgatcacgaatctgagctcagattttgaaaatcattgatttttatctaagattttttgtcaactacttgatttttttcgatttttaaagttatttttttaaaagtttagcaatgaatttgggttaaaaaatactctgatcacgaatctaagttctgattatgcatgaaccttcattttgtctatgattttcatcaagtgtcataaaaaaataaaccgcagccaagcggactcgaaccccaggcccccgtctcatacgacccctagggattaataatatattcaaaaaatcgta

SEQ ID NO: 11385 - DNA, 2440 bp, Heterodera glycines
aatatattttgttaactgtcattttttagtttttctcttaaaagaaaatatttaataaaaaaatatgtattttctaataaataaaacgaaaaaattctttttaattgcttaaaattcaagctaaccatttaattgaggtaattgccaactagatatattatttaataaattctaattgattaataaattttcacattttttttataataccgtaaatccgctatttgaaggcccctctctggtagaaggccccttccaattaaaggcccccctaaaacacggtttttaatgggaaaacgatcaattttattaaaaaaagaaaataaatttgatcaaagtcgtacagtcgtaataagatttgattttatgttgctaaaaaatgcttggtaatcccattatgcaacaagtgagagaaaataaatgaatgaatgcggataatccgatgggtgggacgacttccaataatgggcttctctgctccatctccgcttaactcggcctaacgagcgcaatggataattctcaggcgccgcgaatttctttgtctcacttttctctctcttttggcctctttctctttttttggctctaattaattgccaattttatcaattttcatgaaaatttggtatggctccgtccgccttaaaacactcaaacagctgtctcatcgcacgcaaagacactagtgtaactaaaattagaatatgcgtgaaaacttttacgctaatcattacttttttcatgccataattttattcgaacaaatgaataagaaacgaggctttactaaattagttgaattgccacattcaattgatgggtccatcttatagagaaattggtataagcaaatttgtttaactaaatttattcaaaattacaaatttaccatgaaatttgaatgtaaaaatgcttataatgaataaatagaggtacaaaaaataggcaattcacatttgacttatagaggggttgaacaatagaaggcccgggccttcaaatagcggatttacggtaaattaaataaagcacgaaacgccaaacggctattcaattcaataatttaaaataaaagaaaataaagaaaattcattattctataaaaaacaatcaatactcatttaaatatttatataaaaaataacaaaaaaatttgtttattttattaatgataaattaaataatatatttaaaaattttaataagcaaattatggaatttcataaatttccctgaataattcatagaattaattgtctaatagaccgattattgcaagaagttgtgatgaaagaaaacacgagaaaatgattagaaaaaatgcaaaaaaaaaactaactatattatataattataatattaaaacaataatcaatgaccgccatcttgtagcatttagtggcttatttgctatcaaaaaataaaagtaattttaaataaaaaaggattttaaaaaataataaataaattcaaggcaataagtataaaagaatgattagaaaacactaagcctaaacaattaaattggtattttttattctgaaattttatttaataaaatctaatatatttaaatagatgaagacgagcccgaatgaaggaagtttgaagagcgatatgaaagaaaattttttttataaaaagtcaaagcaacaatgaaataaataaataattaaaaacattgattttaaccttatgattttccctatattaacaaaaatatttaaattgtagattttataataaaaattataaatgaatatatgtaaaaactgaaatattacaagtgacaaattaaaaggtttaaaacttgttttgattgaattgaattaaaatttattgtagaaatcgaattaaaccccaaaaaatatattagtgcgacaacgaaacatttatttccgctattgaaaaaataaaaattatataagaaaagcaaaatgacaattgtaaacagatatttagaaaaaatttcattaatagcaattcttaattgatatatatatatgtacaagtcaaaatactacagataattaacttagttattaaaaaagcaggccgaacactttggtcaaaaagaaaatatggcgtgcaaataaacaaaaattatctattcaaagtataactgaaatactaatataaaagcagaagactcgttacttgatttgaatttagatcaaacctttattagacatttaaaattcaaatcaaaatttaaaattttaagagatatttaataaagaaaaaatattttcaataatttattgataaatattgaaaattttgaaaaagtgcaaagatgtatttttatataaatattaatagttatgcttaagatttaataaaattatacattattcaaataaaaccccaacaaaacaaatgttttttattgcacaaataaatagaaaaagaaattacataaaagctccagacaatt

SEQ ID NO: 11386 - DNA, 1581 bp, Heterodera glycines
  unsure (1)..(1581): unsure at all n locations
ggcaataagtaataaagaaatgattagaaaaacattaagcctaaacaattaaaatgggtatttttattttgaaattttatttaataaaatctaatatatttaaatagataagacgagcccgaatgaggaagtttgaagagcgatatgcaagaaaatttttttataaaaagtcaaagcaacaatgaaataaataaataattaaaaacattgattttaaccttatgattttcccntatattaacaaaaatatttaaattgtagattttataataaaaattataaatgaatatatgtaaaaactgaaatatttcaagtgacaaattaaaaggtttaaaacttgttttgattgaattgaattaaaatttattgtagaaatcgaattaaaccccaaaaaatatattagtgcgacaacgaaacatttatttccgctattgaaaaaataaaaattatataagaaaagcaaaatgacaattgtaaacagatatttagaaaaaatttcattaatagcaattcttaattgatatatatatgtacaagtcaaaatactacagataattaacttagttattaattaattgttccaaaaaagcaggccgaacactttggtcaaaaagaaaatatggcgtgcaaataaacaaaaattatctattcaaagtataactgaaatactaatatataagcagaagactcgttacttgatttgaatttagatcaaacctttgttagacatttaaaattcaaatcaaaatttaaaatcttaacaagagatatttaataaagaaaaaatatttttttattgataaatattgaaaattttgaaaaagtgcaaagatgtatttttatataaatattaatagttatgcttaagatttaataaaattatacattattcaaataaaacccaaacaaacaaaatgttttttatgcaacaaataaatagaaaaagaaattacataaaaggctccagacaattatcgaaacaaatataacctaccgaacgagaagaagccaaaaaagtaaatataaaatgaaagttggcaattttaattctgatggttatctataaaaataaaatataaatgaatattaacatttaaagttgaaaatttaaaatttgttcttttaaaatgttatttaaaattttagattcacaggatatactgaatgaatcggcattaaatgaattaaataaaatttgttaactttcaaggcaaacgttctaaataatttttaattatatgaacataaaattaaaattttaccgattttttttaatcgaagatgttgtatatttaataaatttattttacaaaatatttcaaaagttttaaattaataataaataataattttatatatcttaatgttttaatttaaacgaaaactaaaagcgtgttttaatgaaaaactatttgggtaaaataaaaaatcattattaatttcttcaagaaaggtaaaattcttgaccatgatgttttgttctatcctcttaaagttaaatcaagcacatacacattaatttattatttctagagaatatttgtaagtcatttgtcaaacgctccttaaataacatatttt

SEQ ID NO: 11387 - DNA, 2067 bp, Heterodera glycines
aattaaaaaaaaattacattcaattaatttataatattaattaaaaaaactaaagacctaaatatattagggtaggtcatggtcgttggtgctgagtcgatccaaaaaaaaaactcagttattgattaaataattagattaatttatattaatcaatgtcaatgaatttaattgaaaaataaattctttcagggaagaattgatatgaaaaaaagaccaaataaattttgcaaataatttaaaaattttaatcaggagattttaaagaaaatataaaatatttttaattaatgtaacattttaattcaagtatggaaattgtgtggtccttaataaaaaaaatcgttcaaattaaacaaaattacaaaatttaaaattattagattaattaaaattttaaaatggagaaagaataaataaaaataataaaaaaataaaatttttaaaataaataaataatatttctattgtaaatgaaaatttgcgctgacaagaagaaaacattaaatttaaaaatattaattatcctaaataaaatagcccatccataatcattagaaaatacatctcgtcttgcttgattatttatttattcttccttaattaaaaatttaaaaaaacaaaaaaaaaattaaattatcgaaaattcagaatattaaatttataattatgaaaaagcaaataaattttataaagtaaaataagaaacaattatagatcaatcaatatttattataagataaaacgttatgagtaatattagaatattcttcattgtttaataatttttcaaataattacaaataatttattatattaagtaaaaaataaattttattcaatgttgcattaattttaataaagatttttatcgtaatgaaattatccgatttaaaaatggaaaaacatttgctttactattaaagtgaaatgaaaaattaggctaaattgaaaatctatatgattaaaaataaaataagaaagtaaaatttgctaaagtgaagaattaggataacaaaataatgaaaataatttcttaactaatcatctgataaaaaattaaatgcatctcaaaatagaaaaaaaatacaaaatcaaaatatttcaaaaattttaattaattaattaaaattcttcaaatttataaactgatcgtactgtgggagaggaaatgaatcgaagcttagaggacatgaaattaaagaaattgattattatatattattaaaaagcgaataatttgaaatttaaatttataataaatttcatttataaaatattataaacaagcaaaaaaagaaaacagaaaaattaaaataaaatctgaatatttagcgtaattctaataaaaaaaattattttatagaatgaaaaacatgttttaatgaaaaataattggataaaatggaaattttgaaaaataattattaatattcatcaagaaattaaacaaattgtaagccttaaatgaaactactttttttgcatagtttacgttttaacttgtaccgaattatattaaataaaaagatttaaatgtttggaaaaaagttaggtttaaaccagggttgttccgggactagaataatattgggtttcggttcaattgacaaatttttattatatgttcaaaaatcaataaaaattttctgcagctcgccgccgcctgggcaaaatttaatttattttttgactatttgaatttgctcatgaatgaaaaagaaagaattaaattcgaacttttaaccgcctaaaattttttttgataatttttagatatttaattaataaagagtaaatttaattatgtttaattgcaaaatttaatttttgatggttcaattaattatttatataagattttatgaaaatttaatttaattctatttttagaagatatttttatataaactttaattgctaagaaagtgattatcctttcaattgattagcccatattttgggattttcacctcaaaaaaacatgcagatcttttattctgatcagaaattaatcataagaatttttatattggattttttaaataaaaatttttaaaattaaaa

SEQ ID NO: 11388 - DNA, 1012 bp, Heterodera glycines
tcctgctccccctccctccgcaccacacctccttgaaactgttgacccaatcgaacttcgcttgtgcgttcaaatttctgccacaacgaaatcgcttgggttggccatcttttctcggagagtgcaaccatttggacaatgcttggccagcagaaattgttgaatttggcacatcaaaaccatcaccaaacgcagcgggcgacagaccaaatgatttgattgaagtcaattggttgagatcagtaagaattgtcggcgaaatgagactacgcaaattgtccaaatcatcacgaccggtaaagcccaaacagcgaatgttttcagaaaaaattggccaaatttcacgaacaaaaacatcccaaatcggctggccattcgtagagtgtgatgatggaatcgacaaatataaattggtgcctcttttgtcgaaaatttggtgatttgaacgaagaaaagcgatgacggagtgatcgatgtacctaaaaatgggatgaatgcttttattgcgatagctctgatttttaattaccacatctgaaggtgcttaaaacggattttgctgggcaacggacggtcgggcaatggaaatggcaaagatttgtcatccatccacacagatagtttcggttctggtcctttgtccttgctaatttcgattggtctccaaatagtcaattcgcttttgccattgaaatgtttgtccaccagcgaattaaaacgtggcgaaagaagtgccaatttgaggccgagttgaggacggtcaaaggatgggaaaatgtccatccaaacgtcgttgcaaatccaactgaaatgggaaaacagtttagtcaaataaacgacgaatttgtgacttttaaaattcattaccgtcggttcatttttggcaattagcacaattttggccgagttccgaatgatgtcaaacaaatagcagaagaattaattgcgttggataaagcctggatttttaaaaaaaatatgtgaaaacataaaaatccgggccgggctctac

SEQ ID NO: 11389 - DNA, 2731 bp, Heterodera glycines
tatttgttgatcgcctcgatactatttcttttgacataaattgcacagatttcgactaaaaagtaaccaaaatttaggggttggggtcatttccctaccgccaattccctaccagccatttccctaccggccacttccctaccagccatttccctaccgccatttccctactaaggcatttgggccatttccctaccaaaaatttggcgctatattaaaagtgggtctttttgaaacaaaaggggggacccttttgttttgcaaaatttttttaagataaaaaaccatgataattttttatccggagttttaaaggtcgctaatcacgaatctgacatgtattttgactaatttctaatccctaacccgaactcgaatacaaatcggaattttgaatttttcaaattatgattttttgttcaaatttagattaggaaatcggaattgatcaaaataattgaaagattcgtgatcggggaccccaaaaacttttaatatagcgccaaaaatttttttgaaattttttggcaaaatttcaaaaatagaaagggtattttcaacattttgatgtttctcgtgaattataagacaataagttttttgtttaagttatagattagaaaatgcaggcaattctaacacaaaagaaccgtacaaagcttcaaaaaaaaaaaaaatcgaattttcgaaaattttagcgctatcaaaatgacccgacattcgcagaaatggcacgatgtgtcacgtcgctcgcgtttctcccaattggagacttgacccctggaatcattgctctggacatggctcttcccgacgaacttactcccgtccttgactggtaaattgacaatctcacaaattgtttagtatttattgttctttaattatttattaggttcatcatgaactatacgggtcgtcttaagcatgatggaagcagaacacgcccgcgatttgacccaaacatttggagtgtttacactcgaacattgcaaggcgatgaccgaacgaataacattcagaagccgcaaacagacgcctgcaatacgcatttgcctgttcacatccatcgatttggcatttcattgaccttctgcgaaaggatcaaaagttatcggatgatgacttcgcgaagtgttcaactggacaagacccaccgcaaaaggcaaagaaatatcgcgaagcagaccgccgaattctcacgatggttcaaaattatttaccactcaacaatggagaccccaatgtttttccacttgagcagcgctttaatcatctatttatcattacctttttgatcggaatttctcgaaattatgaaatgagaccgtgatttgaaacagataaaatgttatttaattttcttgcttgttttaatcgtactgtttgttaatattcatactttggtagggaaatggcccaaatgccttagtagggaaatggcggtagggaaatggcggtagggaaatggctcgatcccaaaatttagggatttttgggtaattttttttaagaaaaaaaaaatttttttttggggggggggcgtgccgataggggcgaattttaaatttatttctaacagatattcaccaaaaaaattaagactttttcgataaattttcgttttttaactatattaaattatcgtgaaaattttcctattcgcttaaaaatcgtttaaaaattttttttgactctattcttaactaatttttggttttttttttattttgattcaatttggtacaatatttatcatttcaaaaaagcacaaagcaaaaaattagtttgtttttttcgcagtttttgtgtcaatttaaaaaaataaagggtattttggagctccggcggtgccgataggcgccgccggggaaaatttttaaaatttgagtgcaatttgtgaacaaatttagtactaaaaatgacaatattttatgattttaatttgattagttcacttaaaaaggaataattttgaaaaattggaagaaaaaataactacttggaggggtactgatccaacgctaaaatgaagacatgaccaagaacacaacccactgagccacgcacactaaggtaatgaagcaaaaatataccaaaagtatatttatttctaacttacaaaaagccgatcattaggggtgtaaaaaaagtctcggtctcgagtctcgaaagtctcaaagaccgagaccgagactgaaaacccgagactcgagaccgagaccaaaaaaaaaccgagacttttctcgagtcgagaccgagactctcgaacatcactagtatatatgtataaaatatatatgtaatcctttggaattcggcccgatgccttggctagggttaggatttatatttatgaaaattgtgccccattctgaactgttcatttttccgcacttgcagcggtttaagcgcttttttgttgttgaaattgggtccgctccccgagaatttcttccccgaggagtcgtggactctaaccctaataacaaagtaaaaattaaaaaacaaatttataaaagtcaatggaaaattaacaaaaatcataaatgaatgaccaataaaagtgaccgcatttttgaatatttcatcatttagaaagcatccaaatcaagtttgaatttgggcaaaaaattcgcctcaattttgtcaccagaataaaacaaagaaacgaatggataaaaagaatcatcaccaaaagatgaagcaaccaaaagatcggaggaatctg

SEQ ID NO: 11390 - DNA, 2261 bp, Heterodera glycines
ttgaatttgtttgcagaaagcaaaattgttattatcttatctcaaatcatcacgagtaaaaaaaccattaaacggcttgtaaaattacgaataatatatattaacaataattaggccttaaaattattaatgtccaattaaaaatggtaatattcgacaaaagtatgttatgatataaataattttttgacaagtacaaaaaatatatatatttgaaatttctgctccaatatttttgcaccgtaaaaaacatatttttattatcattaacacttttagctacaatcaaaatagttttaataaagtttgaaactaaaaaaaataatttaaacccagaaagagcagagaattcttggttagaggatctgatggttattctaacaaaagttaaataaaaaaatttgatcgatcgaaaataaaattaaatctaaaattttcccaatttcaagcaattttgactttcctgatcaccatgaagaagcgatctgattaagtttgtgtaaaagacttttttgatcagtataaaagataaactagcatgaattatttcggatgcgggtaataattattagggactccatttttaggcacataaaatcgcgaaataggcacctaaaaggcagaaaaatcgtaaaatagacacaaaaatcctcaaataggcaaaaataggtaaataaaaatttttctttaacgctttttaggtagcaaaacacataaaaattttcaatagtaaaagaaattattaaatattttaagttttttcgaaaagaataaatttttaaaccaaaaatttttattaagaaaaaaatattaaattttgtggatcaatttttgggtaaaaattttcaattcttaggaatgtattttctgaaaattttttcgggccatttcttagggtgtatttttttttgtttttattgcatttttgttaaggattttttcaacaaccctaaaagaggcacattaggcacaaaaaccccgaaataggcaaatataggcattataaaagtcatcgtagacaccccaaaccatgtggaaatttttcgtacttatctgtgcatattaagtgcgcaaaaattttaggcatttgcctaaaaatggagtccctaatgattatacaaaaagaaaaataataagtcgacttaaacaagcaaaattttacaaattttatcactttgagtcaagacttttttccatcactgaatcccttttttcaatcaacaatttcgtgttttataactcaattctgaagcaattaaattaaattttcttcatatgtttaaaaccctttaattataacttaactttttttaaaattttataactataactttttatacttttgtaaaaaaattaataataatactttaaattattaatcaaataataagggatttggttactggaacaaaaaagcatgaagcatataaaaattataattattataaaataattaaaaataaataaaaatttttttattttgaaaaaacaaaataaataaatatattaattaatgttataagaaagatattaataaatgaatatcataatatatttaaatggaaacaaaatcgttcaatttaagactcagaaaatggagttttcgctactcttgaaaacagaattgttcaaaattggtcatgggaattagaaaaaaaaacatttatttatagaaaaattaacaaggaaatttaatttaatttcactgtctccaaataaaagtaatttaaaaatgtaataaataaactgaataactcaagttccaaaaacaaggactctggagattccgatactctgacaagatgaatcctaaatttagtaaaataaataataaaagtagtcctgtgaattcgaagttaaattataaacaattatttatttctaggaaaaagcaacaaggaaatttaaaatctctatggaatacaaatacttatggtgtgccataagttttgtcccccgaaaattttttcatattaaaattcataactccataatttttttataaatttgtatattctttttttatttatcctttattgtttattctttaatttcatcatattatctgtcaattttctcagccattttcccggtcatgccaaaattggaaattagcccactaatttttctcgaatttttttaggttaaaaaacaaatctctaataacaaaaaacgaagttttctataccatttaaatcagtataatccgaatatggtcttaaatatgttatcttttccacctgagcttgtactgcttcaac

SEQ ID NO: 11391 - DNA, 2705 bp, Heterodera glycines
  unsure (1)..(2705): unsure at all n locations
aagcttaagctttggctntattttgtaaaatatgaattggcttttgtacaagtttatttgcgttttgtcgtggcgcacttttgctcacatagatgatatttgctattgtaaattttagggttttcggctccggcccaaaagtggtcagaaaagaaaaatcgttaaaattaaattactagcaaaaatacataatataaagtcctcttacattatgacaagttgtcaaaagatgataatttaatttaactttttaaaattataattgcacctaacattttataaattaaaatttaatatttgatttttcatttattaattattaccaggactgtcaaaaatatgcaaatgcatattttttctggattctaagtagtctaattagtaggaaaaacatcttctttttggtttttatcgggatttttatttgcatattttggccatttttcgtgcatattttttgacaaccctgattatttcttatatgctctattagaatatgctcaaaacaattcttatcaatctttctttagttctcggtaaaacattttcttgtaaaattttattgaccttattatattggcatgttgcgcggtgtgctgttgatagatgatgctgatttttgtcgtgcaaagatagaatgatttgcagtgataggtaatggaaattattgtatatgctcataaacaattttttttttaaatttaaactatccttttggatatttttactatatttattacctctctaggttttcaaatttaattaatctctcagataatcttttctcctcttggagtttttagcttatttaactcccttggatttcatggttaaaatttatattaaaaaataatcattgattttaaattaaaaaatgttaaattatttctttagcaaattacaaaattagaaaattgtgataattatttttatgtttttaattctaagtatttttaaatatttcataagttagactttttgaatttatattatgtattatcgaattattaaaaggtgaagatttcacatagaaaacaagggtaccaaacttttttcttctcaaatagactagttagcgaattttttgttataagaaaggaatactttttaattttgaatcatttttaatgttttttaattaaaataattacgtgcaatgaatttgctatcagtttattttaattttcttgaagaacaaacagtaattatcattgtttttacattttttaaaataaattttcaagaagtcttatcaataaaataagaaaaataaatacatattcgataaaatcaaaaaataaatttcattttagacttccatttctgaattttatcacccaataccaatattttgagctttatagagaccggacgggctctctgatacagaaacagggcttttttctttaactcataaaattatcaatgaaaaaattgaaaaaaatctcaaaatatctctatgcgaacattaattcgttgaaaaggaagtgaagcgtaatcctctggaatgtagcaaatgcaatcaatcgctacgaattttaaatcctatgattcagctgtttaaaataattttacgccaaattcataatccgcctatgtaatattgccgtatttaagcctttgcaaagtcaccatttttatcgttctttcttaataaattggttcgatcaaaattcactaataaattgtgaaaataaataattgaagtattgagaaatcaaataaaataaatttaatataaataaaattaaatatttaaagcagtttaaaaattttatcagttttattagccgataaaaagttgagactgaaataaaaactttagttattattttagaaaaaccaaatctaggaaaattttcaattttttcaaaattttcatcaaattaacaatttaatttattttgtattatttcttctttctaaaagtattttccatatcatctttcgccatttttcgagattattagcttaaatttagcagattaaagaaatttaccttaatttaggaaatttattccatatttatcacttttatgtctgtattttgcaattttgattcattttatttgcatattttgcgatattctgttcatattttttggcagacttaattgttatgcaaataattaaagatacaataattaattgcattttttctaataaaattcttaaaaatgtttcaattaaaaaaattattaatttgaaaaataactgcacttgtttatatcaatattattatgagtaatttactttttgtgttctacactactcattagtttaatttaaaatatgtaacgtacagtacccctttcccccccttacacacagtaacaaaagaaggcggggattaaggatcagcatttcgctgatccttttccccgtagggaaacggaatatcagttagctcccccggtcaattacgagcaaaactccggagaagaaattcttctccgtccctttcatcgagatcccaagtccctttcctcggttcccggacaaaactctcctttggttttttcatcccactcccatcccggaccgtccctcatcagaaatccctcttttggccatttttcactcaaatacttttggaattcagatcattttaattttcatcaatttcacattcaatttcaattccttcttttcacatttaatttcaaatccatttttcacatttaattcgcaaccattttccaatt

SEQ ID NO: 11392 - DNA, 944 bp, Heterodera glycines
  unsure (1)..(944): unsure at all n locations
ttcctgatttactcattaaaattccaaaagccgattccaataataaaatnnctaaaaanncaacaaaaggactaactattatttcttcccgtgtatcaaacaagagaagcatagaatgtcatttacggttcctgatttactcattaaaattccaaaagccgattggacggatagaatttctaaaaattcaacaaaaggactaactattatttcttcccgtgtatccaacaagagaagcatagaatgtcatttacggttactgatttactcattaaaattccaaaagccgatttgacggataaaatttctaaaaattcaacaaaaggactaactattatttcttcccgtgtatccaacaagagaagcatagaatgtcatttacggttcctgatttactcattaaaattccaaaagccgatttgacggataaaatttctaaaaattcaacaaaaggactaactattatttcttcccgtgtatcaaacaagagaagcatagaatgtcatttacggttcctgatttactcattaaaattccaaaagccgattggacggatagaatttctaaaaattcaacaaaaggactaactattatttcttcccgtgtatccaacaagagaagcatagaatgtcatttacggttactgatttactcattaaaattccaaaagccgatttgacggataaaatttctaaaaattcaacaaaaggactaactattatttcttcccgtgtatccaacaagagaagcatagaatgtcatttacggttcctgatttactcattaaaattcccaaagccgatttgacggataaaatttctaaaaattcaacaaaaggactaactattatttcttcccgtgtatccacaagagaagcatagaatgtctttacggttcctgatttactcattaaaatttcaaaagccgatttgacggataaaatt

SEQ ID NO: 11393 - DNA, 2285 bp, Heterodera glycines
  unsure (1)..(2285): unsure at all n locations
tttcttaccgtgtatccaacaagagaagcatagaatgtcatttacggttactgatttactcattaaaattccaaaagccgatttgacggataaaatttctaaaaattcaagaaaaggattaactattatttcttcccgtgtatccaacaagagaagcatagaatgtcatttacggttcctgatttactcattaaaattccaaaagccgattggacggatagaatttctaaaaattcaacaaaaggactaactattatttcttcccgtgtatccaacaagagaagcagagaatgtcatttacggttcctgatttactcattaaattccaaaagtcgatttgacggatagaatttctaaaaattcaacaaaaggactaactattatttcttcccgtgtatccaacaagagaagcatagaatgtcatttacggttactgatttactcattaaaattccaaaagccgatttgacgtatagaatttctaaaaattcaacaaaaggactaactattatttcttcccgtgtatccaacaagagaaccagagaatgtcatttacggttcctgatttactcattaaaattccaaaagccgattggacggatagaatttctaaaaattcaacaaaaggactaactattatttcttaccgtgtatccaacaagagaaccagagaatttcatttacggttcctgatttactcattaaaattccaaaagccgattggacggatagaatttctaaaaattcaacaaaaggactaactattatttcttcccgttgtacgctttcgatggcgcacaaatgggaggggtaggaatttggcgagatgtgggggtgctgatgagttcagtggttggtagagggccggcgctgcttggtggtgctgggctttgagttgtggacgagtagtgcgagtcggcggggtgggggcggctggcgcaatggtgaccaggagagggactggttgtggcgaaattttggggtggacgcttggcggtcaatcggggatggtggaattgctgggggtcaagtgaggcgggaaagcgattcaaaatacactttattggagtcctcaaacttgggtaattaaaccgaagggggaaatgggggaacggcacaaaatgggggacggcacagaaatggggacggcacaatggagggaaaatgggggacggcacaaaaaagggggacggcacaaatgggggacggcacagaaatggggacggcacaatgggggaaaaatgggggacggcacaaaatgggggatggcacagaaatggggacggcacaatgggggaaaatgggggacggcacaaatcggaggacggcacaatttggggaccgaacgggagtggtcggctcggcacacgtcaacggcacgggacgggcggcattgagcgggcggtgtgtcaaggcggtagtcgggcacggcagggcacggatcggcatggcacagaagtcggcgcacgaacggacagggccaagagtcgacggcacgaacgggcgggcggcgcagttgtcggcggctgttgtcggcacagggggaaggggagggaggaaaaggaggacgaggcaatgcctctcagaaaccgttggtgtactgattggtggggggtttgtggcctccttttataccggcagtttctgcttgaacaattgtttgccaacttggcatgtccaaatttctgtccctaacatttgccaattttactaaccttttctcattttccagtttgtgccactttagccttttccagttttcttaacattttacaatttctttaatatcattcacattttgtctcattttaacatttgtttaaaatctgttatttcttttaacgttcaaattattcataattaaattttaacatttgataatttttcggatagaaaaaattgtgactaatatgactaatgttttttctttctctcattccttcatttcgttcacatttaattaattaatatttngctgtttnntttnnccttnntttnnntgttttttgtttttnntgtttttnttttttnnnttnnnnttcctntttcgcgttgtcgcgncnttcccgcgncggnnnggnnngtntttnnnnngnngtgggtnnntccttggncntntncnnnttntnnntgttntcntcnccctcccngtcnccngtnttgttnncnncttcccccgctttgttttgnttcntgtctntntgnnntttcttaaaggggtcttttgttcgngggnngttccnngtncggctgtacgataagttattcgatgggttaattatttt

SEQ ID NO: 11394 - DNA, 1728 bp, Heterodera glycines
ggcaattgcaaaaatgatgaaaattgatagaacgacaatttcaaaatggaagaaacattttggagaagaaattttggaagatttaaatgaatgattaaataatgacctttgtttttcaatggaacaaattttatttctaaaatgtattaaacgaaaattattcaaaaataaaagtggcaaaataaataattccataattattttagtggcgaaaagatttaaaaataatttgcaataataataataatagtagggctaaaatacacgaggtgtcccaataagttttaaaagtttcggttcgaaaactgatttatggtgagtatttctacgatatttgaataattaataaatttgtcatttctttgtgtctttaaaaaataataatttttaaatacgtaattaaattacattaaatttatttattcattcaatttttaattttttaattgaaaaaaaggtgctatgtcgatacttaaaaaccatcataatgggcgatacttaaaaagccatcataatgaaatttgggcgatacttaaaaaaccatcataataagaaatcaatatacctttaattaattacaggttcctttaattaattatatgattacaatttgaaattacatgagttaattacaattttaaaccaattatcccttttatttttattattttcctcaaattcacacatttttatttggagtaaaatttcccttttatattttattgctttcctcaaattcacacattttttatttggaaactttaattttaaaaaatatttcagccttgcttaagggcaaacaacaagcattttaagccaacatggagaaatgttcaaaggtccatccatctttgaggcgtaccacaagaacactgcgatctgtgcagctcttgtgtgtcgttttcggttgccgtttttatgtgatccaaaaattttaaattgataaattttttgattatttataccaaaaaaacaaatgctttcaaggtttgagattgaccaacgctggcctatctgttgaaacatatactcattgttaaaagtgacgagatgtcttgaattctcatcttcagtgccaactaaaaataatttttcattgaaacgttcagaagtacattgtcttgctataattttagcggtttccgtattctttttaatataatatttatttccatgcgctattcttattcttgaaagatatctttctaaagtaggtttgctgagtccaaaagttgtttggttgttaattttatatagtaattcattgacggttcgaatttcgttctttccataattattcagtagattttttattgtattatcattgataaatgcatcaaaattggacgttcgagcccctcctttgatttactcatagtgatttcgttttataaaaaaaggagtaaaaaaatacagattagtattggagtatatttaaacaaattcattcttaatttaaattattatttaaattcaagaaaatatatataatgtttttatttaataggctttgttgaaaattttatgaaataacaggaatgttaattattaaatgaattgccaaatattaaatttacattgcttttatattaacatttattaattcatattttaatgacgtatttccggctattaaatcatgtaattagttgcgcaaattccattatgatggttttttaagtatcgcccaaatttaattatgatggttttttaagtatcgcccattat

SEQ ID NO: 11395 - DNA, 1165 bp, Heterodera glycines
  unsure (1)..(1165): unsure at all n locations
aaaagcaattttaaaaaagatcacaaagcaaacaaatgaatatttatntacggaataaggaaaagaaaacccaaagttttgaataagagcgaaattttaaaagaattcaatttttttcggatcaacaattgcttcaaaatgtccgctattatcataataaataaatagtgattttgtatcaggtttttgctttgatagaatctaaagattaatattatttttttaacaaaatgaaaattactgaaatagcgtccggagaataactagcccaggtatatttgattgaattcttatcattttgaacatttggactgcacacaacaatatttatattaaaaagtttagcagctgtcaaaaaatctatgtttgatgcccatctgaaagtttcagatgcatccattgccggagtattatgattttgtatatattcttctagttcattgatttggggataaaacatttgccaccaatttcggttttcaatcccttgcttatgctgataaagttcttcttccaaaaattccattaaatctcgtcatatttcttttgctgtattgtaattatcgtctccagtgagtagcaacgaaagcgctcgataaaaacagttaccatcaccaataattgacacgcgctttcctaaatattattacatgtccttagccagagttgcttcggtcttaactatacctgggctataagtatccggatctatttgaagattttttgcgaattcgaaatttggaacaacttaatttcaattcagtttaacaatatttttaaaaaagtaccataattataatcccatttatcgcaaaattcctccatttcatttaaattcattggattaaataaaattgcagaattgggtccttaaatatgcattaattttttgattattattattaaaaccgtcttgatcgtgaactactgtaatttcatcatttgcctcggcatcattatcttgtatggattttgaatcagttatattttatttgaattttcactttgtattttctctttctcttaagtaaaaattatttgaaacataatatatcttaccgaattatttactgttttagcgtttcccttagatctagctagcagagaagctgagcgacagacgcgatcagtgttgtgaactgtgccatatctgcgattcatctca

SEQ ID NO: 11396 - DNA, 979 bp, Heterodera glycines
ctgataaagaatctgaaataagcttttggttaggactccgttaaggcctcagaatccctgcataaatggggcttcttaggcatcattctgaggggggggggggtggtcaggttcggatcccgatgaagtaaatgatttttatgtattatttttcatgtttagtaaacatttaaatgaatttcgattttgaattaataatttttattaaaattttaaagaaattattttttcaaaaagttccatttatcccccggggggataaatggagacgggggattattgttcaacctcctcagaagggggggggggataaatggaaatgggggattaatggagacggggcgataattagagataatacggtaagttgcagtcgtggtggaaattggagcattcattaatgaactgcgtgattttccactgattgggcatgttacccacccgcccccttcaatagagcccctcccccgaatttttgccaaataccccgcaaagaacgtggcgagttttttcttacattttattgacaaaatacaattaatttcaattttttggcgctagagtcaattccttatcagaaaattttcccattgatagcgtgcttacaaattattaatctgctcttcgtcttgaaattgggtcccgacgagcataaaaaaatcccacagacccaaactttggatccatgtgtcaaaccaatttgtctcccatatttgccaagttttggatgcgtctctcaaacagaattggctccccaatattttcaggcaccgttgcaacccaagacgagtcatggcaacccggcatttatgtggacactggtgaagtagggactcactattatgaccttcgaagactgcggacggtgatgatgattttcgacccgttccccctcccgcaaatgctttttctcacattttatttttcggatttttaaatgttttggctgtccttgttttcccaattgtaaggacatttg

SEQ ID NO: 11397 - DNA, 2004 bp, Heterodera glycines
atggacagactgtcgcggtccgatcgtgcggtgactgcatcaattttttcacgttccgccggtgcgatgaagcattggacttcttgcagcgggaaatcggacctgaaaaagtggaaaattcgtttaaaaaaaacttggaaaaaatttggagaggatgatacagaaaaaatcggggggagactgacactctctgtttcaataataataaaacatataattaagttttctaagaaaaaaggcgcaacttttgttgttgttgttgcggttgttgacaaattgtcggaaaatggtcctgtacattttaaatatttgaaatttgataaagtgccaataaaatctttgaatgtaattcggttggttggctattatttagatggtttgtccattttagtgttggggaaatattgcccgaatcctatgtgtgtcggcactttgtcatacctcgaggacaacttgtataaaacctttgctgggtcggcattttgtccaacagtgggcagacaaattgcctaaaacctatgctttgtcgacacttggatctatcttggcttcaaaatctaaactatgtcggcacttttcatatcatgaggacaaattgaacaaaactatgctatgtcgacattttgtcccagaatgggcagacaaattgctcaaaacccgttgctgtgcggcactttgtcacatcaagaggacaaactgcacaaaacctttgctgtgtcggcattttgtcccatattgggtagacaaatttcccctaaacctagtcggcattttatccccaccatctaacttaaagagacatttcgtcaacaaatttcacctgtgatgtccagcgagtggcatttgtgccagctctgtcggctgcctgttggtctgcaacggtcatgccatttttgatcattacacaaaaatcaaatttgctgatgaattgtccactgacggattgtctattactgacggattgtccccgaatgtaaaatatcgaattttttggtcgaagtcaaaaaattaattgaaaaaatatttttaataacaaatttattcactctattcatgaattgatatatctttttttggggggtccatgatccaaatttgatcacttccatcactgatcaaatccacaaaatctgttgcttttttcacgacagataaaattcggttgtgtcaacaattttactgcgacataacggacaatgccttttacaagcagcatcgggatacttcattatattttcggcacaaatgtcgcagacgacagcatgcttacatggagtaaacagaacacttcgctgtaaaaaattgtaatacatttataaatagagcaaattgcgggacgggataccgcgcgggatttcgccggatcttaatcctcaatccagcatttttttggaaaatgcgggattttgcaggattagtcaagtgggtgctcgtcccgcaaaaattttgagtcccaatcctacagcgtgatccaaagatttgaaatttctgggctctatttataagtagaagtcaggcgtggtaatcgtggtaatcccagatgttcagagaaatttcctgaattttttttttgtcagaaaaaaattttttttaattttttggaggtcggaattaattcggaaatttttgaaagatacaaaatataaaataaaatcctttactggttaagcactgccggggaatttttaatgtggttttgttaacacagattttgtccaaaaaaggatcaaatttagcgtttttagcaaatttttgaagaaaattttaagaatgtgccgataggcgtcgccggtaaaaaattgaaaatttcgatataatttattaatacagaattcatacaaaaattgctaatttgttaaaaaaaaattcaacgaaccgaaaatttgcgactttttatcaaaaatttcgcaaaccggaattccgacccaagaacgccggaaatcggaattccgaggcttaaaaatttttcggaagtctgaaatcagaattccgtgccatccctgg

SEQ ID NO: 11398 - DNA, 3698 bp, Heterodera glycines
  unsure (1)..(3698): unsure at all n locations
aaaccgttcagctgccccattcgacattgggtggaccgtaggcggaaaggngngcnnnangccgaanncngngcagacttttgcaaanncggcggagcgaaangggctnccanggncggagacaangncnnngggaannccgagccgangcacgaaggannnnagcanngaganggngagnnggcgggaagnccnnnccannngccanacnncgggccannncgagnaagcancgaccaanaccaggnaggnngggccgncagcacacgggccggcgaaancaaggngaanccgcncaaaaacnncgcnggcggcnnnccagggcngaaganncgcnnnngnaggannnnnggcggcggagngacannccncgcanngcnggaccacncgnncgannncggagncgannccgggccagnaaacggggnnccgggcaagggcncncanncgcacaaggccgggaggngcaaaaggcaagganangaggacgnngnnccggagtgacgaagggatgataattcgttcaccgtaggcgaggcatccttcgatttcggatatttgtgccttttttggaagaaaaggagacaatttaatgtcgtccaatttttgcggccatccttgtttggtgaaagcgctaatttgttgcaaaatttcgtcttttgctgtttcctccgctattattttcgcggtgatcggaagttgctcaatttttgcctcaaaaacaaaattaacacagcaatcagtgtcgttgcagatgtttgcgatgagtatgtcttccgatggcctcgggtaatttgcgatgagcctcgaaagtacatcggcatttccgaatgcctttgtgttgacgtatttaatatcaaattcgtaatttgacaaaattaacgcccagcgctgaagtcggctggctgaatatattggaatgcctttttttgatccgaagatggccagtaggggcttgtgatcggtcaacagagtgaattttctgccgtagagcatgcggtgaaatttttgtaccgcaaaaaccaatcctaaagcctctttttcgatttggctgtaattttgttgcgcagccgtgaaagtgcatgatgcgtgttcaatgacacgttcacttttgtcgggaaattgatggctgattgttgcaccaattcctccttttgaagcatcagcggccacaatgattggcaatttggggtcgaaatgcgttaacaataaatccgaaagcataatttctttggctttctcgaaggatttttgttgttcatcttcccaattccacggtacatcctttttaagcaattcatctaatgggcttcttatttcgcgcatttgtttgatgaatttgccgtagtatgtgagcgctccaaggaaagaccgtagagttgacttgtcgtgcggcgctggcatttttcgaatagcctcggctcttgatgggtccgggcggatgccattttcagaaattatgtggccaaggaaaacggtttctttttgaagaaaactgcacttttccagttgaattcggagaccgaattgtttgattttgtcgaaaactttggtaattgttttgacgtgttggtcgagagttgtgttggcgataatcacatcatcgagatagacaaatgcaccattgatgggtgtaattattttgtccatcaaactttgaaaaattgcgggcgctgattttatgccgaatggtaaacgctggcattggaaaagtccgcggtgtgtgttgattgtacacagctttttagactcctcagacaattccaattgcagataagcgtcgcgcaaatcgagacgtgaaaaatgctttgagcctgcgattgcattgtaaatgtcctctggacgtggcagtgggtggtggtgtagctcaagtgcgtcgtttaatcccgtggaaaaatcgatacacactcgtgttttgccattcctctttttgactgccaaaattggagcggcccagtggctaaattcgatgggctttattgcctccattttcagtagacgatcgatttcggcatttacgtcgttcaaagcgccatgtggaactggtcttgccttgcagtagataggcttagcaccgtttttcagaatgagattggccttgaatttggtgcagtgacctaattctgggctgaagacatcggaatgtgttgatttgagcgccgaaattaatgtctccgtgtctttgatttggttaactttcgttgaaattgtattgatttttggatgaagatttgggtgcataatctcttttgggatcacttccaaggcttctatccatggcatgcccaataaattatgactgatttcggggctaacatatgccaacaatttcattggtggacgatccatgtattgcacttcgcaccaaaattgtcctttaattgcaaatgtttggtcgttgcaatttttgacacgaatatgtgctgacttcaaaggcggtttgcccatttgaatccatgtttggattgtgaataatgagatttgtgcgccggaatcaacatgcattggataatctgagccattcactttgattggtattttccaccattttggatggtctgcgttgatttccatgcaatttaagtcgatgatgactgtgttgatttgtacatgcctttcagttgtattcaccgtttggatgtggcgaattgaagaattgcttcggcaaactttgccgagatgtccgattttaccacattttgggcatttggcatctctatgcccacaatcggagcgccaatgatttgtgcttccgcatgattggcatggacggtttggcaatttgtgcttgctctcatacggttttggaaccgcttttggtttggcatattgctttgttgcgtctgccttgtcctttacttgttgtggcttggcacgaatggcattggcattgtactgttttgtgctgagtgccaatgtgctttccttcaaaatttggtactttttgcattcttcgcccaattcctgcagggcgatgcttttcccattggttcgggcttcttccattcgctgaatacatcgctgtttcaaatccgaaaattcgtcgcgtaaagagatgatgagaatcatgcactttagctcttctttcttcaaatccaattcggcgttttcacacgatgaattgatttgtgccaaaagactcgaaaggtcttggttttggctttggcgaatttgaaaacagtcgaaacggcggaggaagagcgacctcgtctcaccaaaaatctttttcagatttgccacggtttcgagccagttgaattgttcggtggctttaggggcaatgctgtcggcgttccttttgtatttctcttcgtcttatttttctctcaatagctgtattctggatgtcatatgtgatgcagatatccccgtgttgtggacggattttcacgtgtagttttcactaaccctcgcatctccgattcggctgtcctcattatacttgcaatttcttgtggcgggcatcgtcatatcatcctcgtgatatcgttgtggatgccactgtgggtgagagagtggggaggtcgaagatcgagggcgggggcaaggacttctgatggtctttcatgtacggaatgtaatgggtggggaaggggaagatctgggtgcagttgaatggtcgatcatatcatatataatatttgtggggcggccgcccggcgctccatcgggcggatgagcgggggcggccggagcag

SEQ ID NO: 11399 - DNA, 5577 bp, Heterodera glycines
attgtggtttttggagaaggcaaaaaggattttttgtaaatgaattttgagaatttggtggtggtttataagcaaaaacccgcaaaaattatctttttttgccaaaaccttgttaataaaatggagttgacccttaaacagcgaaaattgtatcaaaaaatttaaaatttagctaaattttccaagggcatttatcgcaatattcgtaccactaagaaattttgaaacaatttaggcaaattttctgagttaagagcaaaaaaaagtctttcgcaattcatccaaaatttttaaaactttttttttttactaaaattttaattttaattggataatttgagttatttattaaaacgctttagaacaaattattttaggaaatttgcattgaccaacaagcattttattatgttgagcatttggtgttccaagttgaatggattgcatcggacaaatggtcgacaagtgcacaaatcaatgagcacgaccaaaattttttggcacaaattggccaaattctttccatttcaagggcaaacaaaatagaggacagtgaacccccaattttatcatactttgagttgaacgcccccactctgggccgattgaatgctttatttggacgattgtgccaaaattggcaaatttttgtggcaaaatttaacgacaaaaacactaaatttaacgcatggacgaaactgtgcaaaaagaatgtgtttaaggacttttatcagcagaaatgatggaacaatttgaagagatggcaaaagttattttatttatttgtttattatcttatcaagttgtaggaaaaagaaatataaaagcagacaaatagccaaatgaaagagatgcgaattgtatccccaaatccaaataaatccgcaaaataattgctttgtgaaataaaagttcttgaaatgatttttaccatgatcgggaaaatggcaaaaaaagtttcaatccaaaaacttttgttctttattataagaaacgtattttttcatggaaatacaataaatgctgtggataaaattgtgggtttaggatagggtttctgtctgttctcacttctaagaaaagttctgttttttgatagtgaccaatgttctatttttttaaattattcaaattttgtagtttattgcaaagtgtcattatctcgtctggcattttttaaatttgacgaaaaatttggttatttttgaacaaattctgtcaaaaacctagccaatattaaaattgtaaatcgcatgggaaactgttaaatcagttgaagtgacaaaagttgtgcaaataaatattgtaaaaagtaaatggataatcccgaatttatatgactcatcatcaattagtcatcgtcgtcattgttagcattggcagcagcggagaggagcaaatggatgcccaaaaagccaataagctgatggggcgtaagacctgaagggtgaaaacggaaagcagattaagaaggaataaaattatagagccccaaaaatcgaaatctgatttgtgtttgctcttcagtgatggtggtcaagtggtgctgaccggataaatgcatcaacaattgccttatttctagtaaaagatcgggaacagttcaaatcgccaacgcacgataacatctgcttaatgatagtttctaaacacttagtgcttccgaataacattaattctataaaaattggtagaaaaagaaaaaagttacgaacaaaagattagtccgtcggcgagttgacatgtaccctaaaagatctaggtttttaccatttatgctcgtaaatagataattctaggttttgtcaccccccccctgaaatttttgatgctgaccatgaatctgacctttatttttagccataacgtgttttacatgagttacgtgaaattttacgtgaaaaggtgaaaaatttaaaaataaaaatatttaattaggcgacataaaggcaacaaatttcgtaaaacctaatcaaaaaacatcattgatggcttttaatttgtttccttacatttaagccggtttgaaccaaaaatgcgaaactagaaaaaattttaagtttcgactttttgttcgaattcgggttcaaggttcgaattgggtcgaaatggatgtaagaatcggattctccgaccgtgaaaacccctaaaagactttgctccgagaaaaaaattttgaaattttttttcgaaaggggtggggcaccatcggcactgtttacctttttaaatttttcacgtaaaacatgttatggctaaaaataaaggtcagattcgtgatcagcatcaaaaatttcaggaggtgacaaaacctagaagtacccgtaaatattgttaaaaaatttatttgttcgaattcggggtcgaaatggaggttagttttgtgttctgcgccccgaaaaaaaaattattctaaaccacgcggactcaaaccaccagttatcctgccagcacttgaccacaattacaaaaaagttattttagcgtgaaaaacatatttttgttttgttactttttcctaactcaccttgttgggccgatcagtgcgcgcgcctttgtcagacaaaaagcgagcaatttcgaaattgtgcttcaacagtgcccagtgcaaaggcgtgtccccctccgaatcagtgctttcgatgtccgcgttgccctcctcaacgagcaatttgactggaggaatgaatagaaatgaattgtctttgattaagggtattttgctgtttcattaaatattgggtcactgaccaactggcaaatggccattgccacacgcaatgtgcaaaggcacaatgccacgtttgtccttactcctctgattcactttggcactcttcgcgaccaacaatttgcacagcgccaaattgcctttttgggcagcgaaatggagtggtgaaaaaaggtcttaaaggaagttcaaatcatatgaaaaagggggggggcagacagaaattttggcgaaaggattcagccatgtaaatggacgaccttctttttgattttaaaaacgttttttgcggcgcgcttttcaaaacaaaacaccccggtaaacacatcaccccaaccataaaaaagggggacgcacttttgaagacaatgactcactttgcttctttttgtcgcgaataaaagtgccaaattcattgggattctgtccattttccaactgaaaagcaggaatacagcgatttaacaactaattgttgtgcctattaccataatttccaccagttttgtctgttccctgagaagcgcagcccaaaatggcgaaagtttgtctgaatttgaaatggaaaaataaaaaaatgaatcaatgagacggcatctgtcacactgactcatcgtgacgagtcgaattgtaacggaatcggtgccatcggttggacgaattgcgcctttttacaactaaaaaagtgaaaaaaaaacaaatacaacccatgagaaggacaaaacaaaaaatgatcagtccgcccgcgcgctctttacacccgttgggaattcttcggtcagccaaatttcggttttttaagaaattttaaactcggagggggggggggggaggggtaacactagttaaaaattgcttattaacataataaaattgttgtgcccgggtgtggagtcccctccacgccaaattctgaaaaccgtcccactgctggtcaatggtttcgagaaacaacaaaacgaaaaattgaattactgtttgccctaccaaaagtttggccacctccgttttgtcattttgtgccgctacgtccagcaaagtcgcgccattctgctcagctcccagcaaacgcttcaattcgactgcatcgcatccgctgagaatggcacgcatccgcgcgacgccgccacttttggccaaagtgaacagcaatttgagcttgaaaacgacggctaaatttagtaatagcccacccctacctccaattcaaaacacgtaaatgccaaattatggcaattatgaattatcctacactcgagaattatgccagaactcggattcggaataaataggaaaatttgcaccaatccgtggtataaaaaaatttaaaaaaggtaaattggtggggggggggggggagggccatcggtgatttatgacagaaaaacagcatttctgagggtttttgggccttgaataaatccaaagggatttgttatggacgtctaaattttgttttgccatactttttcgctctcattggccatcactttgttttgagtgccggtcgcttttggttgctgctccgtttgaacaatcgcctcattaaatgccgccgccattggcgaaaggttggcgacggacacagtagaggacggagagggcacagcggcgacaatggcggaactctgtcgctgctgaccatcgacgatgctgccactttcgctgttgtcggccgtgccgtttttgagcccatcagaagcgaaagtcgaaaaaatgcagaaaatgacaaaggacggacagaggacgaagagaaagaaaacgaagaaatcgacaagaagcaacattttaagctaaacgatgtgaaatgataaaaatttagctgttttgattaaattttaaaagaagttaattattttgtgggccggcgtaggtgcctccagcaaggaattttcaaaaattatggaacaaatttgggcaatctttcggaattacggtcccgaaaaaaaaatttttttttaattcgtaaggcactttttctaggcttaaaaatatgctaatcacgatatgaacacggattttgaaaatctttgattattgtctatgattttttatcgaatatttgatttatgaaatttttttaatcgattttctggtgtaaaaaaatacgttgatcacgattgttacgatagttcaaaagatgaacaccgatccgcacttggtcaaatgaaaaggtgtcgcaatatttgatgactaaaacaaaacaaatagtcaaatttcgggaccgcaattctgaaagattgccgaaattcgggctcaattgcagtttacacgaccataaaaaaattacaaagttatacataactagggttgggaatttaagtcaaatgactttttttgctgattctaaatggcattaaaatggcttaaaaagtgttctaaactttgtttgaagcttctaacatactttttttgtaactttttttttacttttttacactttttgggatttttatgacttttttacacttttatgacttttttcgtgacttttttgactttttgaggccaagttttaaattaaccaatgaaaatgccgaaaaatacaaagaaaactccaaaaaataaaatttccatcggtgaaaaggcaatgaaatctggatgaaatttttcgtaattgttggaagaataacttttttatttatgttttaggtacatatttgtaaaattaagtgcctaaaaatccgatctctatttataagatgttattctataaattgttaaaaatgggattttttttaacattcgcctaatttttcagaaattttttgcattttttcgtgcttttttggattttttgtgactttttggcgattttttatgactgttttagtcgactttttgaa

SEQ ID NO: 11400 - DNA, 1836 bp, Heterodera glycines
cgaatgcgtttttcaccccaaaattggaaatatatctcatatgcaatttcaaccaataaatttgaataaatttagagaaattatacccccaaattggaaaaatttatatgcatatttttcagtttttatgtgcatattttgccatttttgatgcatattttatgcgcatattttgcgattttatgtgcatatttttgccaaccctagtgatttctatgcccggattgaccggctcacacaaacaatgaaaaagcatcaatgagatcaatttggagttcattttcatttactatccgtccattagtatgactagcttttaaaaatattttgtattttcatacattatttaattagaataaagctaaaacaatggtttagaaattttagaggccggtttatggtcaaattaaggttcattttatcaaatttttgtgaatgataaaccaaagtcttacattcataacctttgcttggcactttcttttggcgaattcaatttaaactcaagaatttcagacgatcaaaaattgtgtaaaatcatttatgttaaacggcgttcttttggcacacaacgccggcgaggttggcacggtcacactgaatgtcgttccaccagccgcacgggtgccacatttggacacactcttccgcgggctcatcatctgcgaatattttaattagtagggttgcaaattatatttgagaaaaacgcaaaatatatataaaatatgtaaaaaaaaaccaaaaaatgacaaaaactgcacaatatatacaaaaatatgtaaaaaaaaaaatattttttatgattttttaaggcaaaagttcatagaaagggataaataaggacaaaaatggcataataacctaattagctgaaaataatgttttaggtatttttaaaccgaataaattattttgtgctttttggaaattaaaaattcctgttagcctaggtaattagtgatgttgttttactgtaattccaattcaaagtgcccgacggctcctgtgccgaccacgggtagtccgcttttgaatctttgcctcggtgctctgccacatttccaaacgtggcttggctcccatcctccagcgtgcttaattgaataacgaagcggatttttaagaattacaaaaaagataattgaatattttaattaagcatcaataagttttggtaaaaaaataaaattttaggggaaaatttttcaaaaggaaaaaaaattaattacaaaaataaaaatgtgttttatgtttttagcttgtgcaaaattacaaaaaataaataaatgcttcaaaattcgatctctagataaataattcatttgtacaaaaaataaggtgaaatgagcagcatttcttaagtgaaattaaatacaaaaatatatttgaagaaaaagaaatttgggacgaaaaaaagcaaaagagcagaaaaaattctaacaaatgagtaaaattgaaaaagtaaaagaaataaataaatattatcgaaatatatttgagaggctgtacacctgacaaagcctccacggccattgcgttttcggtgaactccgacgatgaaactgagataaagccactggctttttggagtgcaaaatagcggattcttagcactaaattgtgtattctttaattcaaaccaattaaaaatcccccattaataattttccactcgcatggcgtccattttcggcgcttccgccaacggcacattgaccccgttgcacagcatgtaatcctcgtcgatcagccgtgccaccaaagtgttctcctcctccgaatgaatggacacaatttggcctcccatcgcggcacaaatcttttgtgcctgat

SEQ ID NO: 11401 - DNA, 1824 bp, Heterodera glycines
ctttttggaattaaaaattcctgttagcctaggtaattattagtgatgttgttttactgtaattccaattcaaagtgcccgacggctcctgtgccgaccacgggtagtccacttttgaatctttgcctcggtgctctgccacattgccaaacgtggcttggctcccatcctccagcgtgcttaattgaataacgaaggccggatttttaagaattattataaaaaagataattgaatattttaattaagcatcaataagttttggtaaaaaaataaaattttaggggaaaattaaaaaaaaaaaaattaattacaaaaataaaaatgtgttttatgtttttagcttgtgcaaaattacaaaaaataaataaatgcttcaaaatccgatctctagacaaataattcatttgtacaaaaataaggtgaaatgagcagcatttcttaagtgaaattaaatacaaaaatatatttgaagaaaagaaatttgggacgaaaaaaagcgaaagagcagaaaaatgctaacaaatgagtaaaattgaaaaagtaaaataaataaataaatattatcgaaatatatttgagagactgtccacctgacaaagcctccacggccattgcgttttcggtgaactccgacgatgaaactgagataaagccactggctttttggagtgcaaaatagcggattcttagcactaaattgtgtattctttaattcaacccaattaaaaatcccccattaataattttccactcgcattgcgtccattttcggcgcttccgccaacggcacattgactccgttgcacagcatgtaatcctcgtcgatcagccgtgccaccaaagtgttctcctcctccgaatgaatggacacaatttggcctcccatcgcggcacaaatcttttgtgcctgattttaatggcatttttaattaatatatatttatgttaataattaattgaatttaaaattatatttaaagattaattaaaagataatactgagataaaattcatttccgacgtgaaaattttgtagcatttttgattgttttctgcccagccaggaccacaagaagcattgacaagaaagggagaagcgaaagagacaacaattagcaaagcaaatcccatttaaacaaaaaagcgaattttaaaaattataaataatataatgaaaaatggaataattaagatttggattttgtttgcttaaatgttattcaaaatttcgtctttgtttaaattatttattttatttgccaattaatttggtgtgtatcatttgtttttaataagaataattatggggataatggaattggaacctttttcaggcattcaattaaagcataaaaataatgcataaagtgaaatgatttgataaaaatgattttttttagattcatttcttacaatgtaataaaatgcattatttttatatttcgctcaaaaatcttcattcgccattttaatcaaattttcaaaaacattttgaaattaaaaaagagaacataaaaaaagaaaaaagaaataaataaaaagaaatcattttaacttattattctaaataatctttaattttaaatttaaaaattaagaaattgaaatatttatagcattgtaaaaataaattatagtttatcccaaacggaattttggccaaataatttcaaatttggccatcttctagaactttggccattgcatcacatgcttttagtaatcaaacccgaaccgtcaacgaacatatgaggcatttgaaatgaaatttattcggtgattaacttaatttaacagcgaaacgattaccaaaataattaa

SEQ ID NO: 11402 - DNA, 966 bp, Heterodera glycines
  unsure (1)..(966): unsure at all n locations
ttatttcgtcccttttctgctgatgatccaatcgaaaattccgttcagcgttctgcaaattttttcgtcactttgtcagacaaaaaattgcgcatcccttgcaacaattcgagcacccatttgcttggactctgaattttattgacttttgaaaaacaaatgccaaatttaaaattccaaaaacccaaattttcaccctttccttttgttcgtccgtctcctccgttggccatccgttgtttaaagcatgccaattgtcccatttgtcagctttaaatttgtataaaaatatctcagaaatgcccttaaatgacttacccccttccaaattgctgggtggctcatagccaagccaagagatccagcagatttcggcttaaatttaatatgtatttaatttactgttcttttcaaatttttttttggtaattaatttgattgtcattttctattttaattatattaatttataatgtatttaaaataccgtcatcgaaattggcagatggagcaactgtttgttgcttcagcttttccatattcggatgatcaacttaaaagaataatttattaaaaatgaattgattttattattaaattaaatttattaaataaaaatttaaacaataaattcacccccttccaattcctctgacaatgatggcgcattttcctcccacagctgccgatcatctgtgagctgctgctgttgccagtcttcagtttggataaccattttagcgaaaagatttaaacaaaaaatgctctgaaaatgattgaatttacacaattttcattttttaaatggccaaaaatgtgtctttttgtcaagagaaaaatagactgataaaaagaatcaagaaaatgggagaaaaagaaaaaggagtgaaaaagtggagaagcagaaagcggacaagaaaaaaagaaattaaaattaaattaggaaactttcacanaaattttatt

SEQ ID NO: 11403 - DNA, 972 bp, Heterodera glycines
  unsure (1)..(972): unsure at all n locations
aattaatattaattttngggcgctactgaataaaaacaactcactttaagacagcgcttttgaagcagtcgaacaatttttgtattctgaaattggaaaataaaaatattaaattttgaattttatataattttcatataaattaaatattaattacaatttttttatgaattttaattatttttttcccaccattaaacagtcgagcactttgtcgcccttctgattcccgcaatatttgccaatgtcgtatttgcatgagttctaaaattgtttgggaaattgagtttaatctcgccaaatgatccatgtcccttttttctttacttgtaattcgtcgtcaaatgtgttgtccaatgcttctattttttcacggctgaacactaaagccttacagtcgggcgctgaaaaaatggcaagaattttattttttcgtagaaaaatttgcgatgggttcaaaattttgagaattcttgccggctttttcccccacgctttttaaaggaatttaggcactgtataatgttttaaattctttaattagttttttaaaaaggaaatcccaaatttgcaaagaatttatctttctccccctctcacgcactctctcgtccctcttttaaagcccctcccccgccgttggatgggctcccggacaatccgcagtggacaatccgtcagtggtaaatccgtcagtggacaatccgtcagtaagtggacaatccgtcagtggataatccgtcagtaactaatccataagcaaatttatttttaaaatacccagatttatttaaaatcatgtgaaaattaatttaattctctaaaaatctgaattaattgtgttatttttaaaaaaattatgaaataatcattttaaaagaattaaatgataatatctcgagatggacaattatttgaaaaataaagtaactagaaatgttaagaatctataaaaaattatatttattaaat

SEQ ID NO: 11404 - DNA, 1223 bp, Heterodera glycines
  unsure (1)..(1223): unsure at all n locations
agtgcatctcctccgtcggcttncacattttgggagcctatgaaaaatggaaaaaaggattaattttaaatatttaatggggcagttgaatcggaaaaatcaggcggcatttgatcaaagctaatagtgatcggttgcattggtggttcccaatattaggaaaacgattatcgcaacaatttttgttaaaaattctaaatttcttggctaggtctgacgaggattccacaagtttaattgtccaaggaattcccaattttgcccaaaaaaaccgtaattgatcagttggcgatcaattagttaaatcaaaaatgcttctttttatgtgccaatggcaaatgtacttacagtattccgaaagtgcgtccctacagttctcctcaatgtccgggagcagattgacacgtgccgcacgctcgcgcaacactcggcgcacatgcaacgcgcactccttgcccaatgggttcgcctcatcgtaacctttgaatttttatttttttccaattatacagtatgaatggacgggtgtacggtacaagaatacctgaacggtacagacaggcaagcacctgaataaatttgtaaattatggggcaaactcagcgcattgagtcgcgataggtggctggctggcttacctgtggtcctgggtccaccaccactttttggtcctgtcctggcaatttgttggtattttcgtgccaattgtctgtggcatggcaccgcgtcactgcctcttggtggcacgcctcgtacagttgcgggtccaacgaccagtcacgggacatgaagtattgcacctgagcaaattacaaaataagaagccaattttcagatacttttctcgtccaagaatcccgaatgagcaggcaggtcggagagatcgggagctctgggtagggactcaacccaaaaatattccctgaaccacccgctggggtgaaagttttatgagaagtgccaagtagtgctgttcgagatcgaaaatttcccgagactcgagacccaaaaaacccgagatttttctcgagtcgagaccgagagtctcgaacagcactagtgccaagattactctttaaggaacgatcaacagtagtgacactcgagatttctcgtcaaaatttgaaatatnccccttaacgggtcgatgtgggcagcactacatttcgccaccgaaaaattatttaaatatttttaaaactaaaaactaaaaaaataaaaaa

SEQ ID NO: 11405 - DNA, 3230 bp, Heterodera glycines
cccacctttttctcgtccctctcctgcgcatgtgccatcaaacagtgcaccgttttgccctccgactcaatgtcgccctgtggcgagcagtacttgtcaatttcttgggcacagcccatcacaatttctggcgacatgcggaattcttggaccatcatttgacgatgtgtcatcatctcatgctgacacctgtgatcggtggggatgggattttatcgtcaaaaaaatcttacatttaaacccctaaaatgtccatatgtaaagttgtgtttggatgaaaattaacaaaataagaaaatgcatttacttgcactaattaattaatataatttgtgtctatcgaaattatactgtcattctccgactcccggaaaataaatccgtcagtggaaaatttgaaagtgagaatgacttttaaaataagattctgtaaccttaagtattgtagtgcgaaagattgaaatgcataacaatcaaatttggaattcgtcaattcatttaatttggtcattgaaagcaggaatgcgggatttttgtcaattcttgggtcttagtcggcaattttccgtaatccgtaattcaataaatttccaatgaaatttttctctttgagtatattttgtaaaaaaattcaaaaattctgactataatgaactgatatacaaacaaaatgccggtatccgattgccgacacggactttaaatggcaaaatcggcaaaaagtcggaaatgaagcatgctgttgtctcccctatgttcaatcctaatttaattcggatagccaaaaatgctgaaaatctataaaaattttgtgcactttttcgggttttttccttggaatttatgagtttcaggtaaaatgccgaatccgtccaagaaccggcaaaaactttccgctatatccctggattgtaagttgttaacattttgtgtgaattcacgcttataatttgcatacagtaacaggtacataccgaaatatttaatgtgtctcagtttttcaagaaattctgacaaatgacgaatttccactgactcatttcccattcacatgttcctcccccccccgccccactcactcatcagtgaatgccaaaaggttgggccattggcgttgtttggcatttttgtcctcctccgccttcttgcgctcgtgctcctgcgttttgaaatagtggagtccattctaaaattaaatttaaaaaataatttgccgtaatgattttgagttttgtacaatacacctcaaggcacaacaccacccagctgaggtggaactgcagcgatttttcaaagcccggctgcggcacacagcgataagcctaaaccagtggaaaattaattaataatttggaaatattttgtaattaaaattgaattggatttgacctgcaactctttgtcgcaagatttcagcagtggatgagccaatttgtagtcacggcctgtaaaaaaataaaagaaaatttagtgagcatcttacagttaatttgcgcaattccatggcccaaagcaaatttttgacgacgatttaaattcaaatttccagaaaatgtgacccaataaatggagataatttaaattacgcatttttttacagtaagtgaaaggtaacgaaaaatatttctgtaaaaatgtgttaccgtacccattagtccggctcgttccgacaaaatttttgagcacttaaaataaatatttataaacattaattcctttttaaattggcccacctgtggcgacatcttctcgtcctgcttgtgctccatcaaacaatggaacactttgccctcccccgcggggatttcgccacaaaatctctgaaaattgtaagaaaaattaagaaataatattttaaaatttttatttttaaattcttcacctctctgtcaatgcgacaagcgaagaaaagcggccctgaactttcggcatttttgaaatttgtcaaatttttcttttgtatttggcatactgtccaaatgccagtcgtccgactggagctccgcgactcgcatcacttccttgcggcactcttgcgaaatgccctccacaattttggctttgtacgcatcctttggcacattgaccatgtagccgatcaaacactccaaggtggagcctgaatttggcaaaattagaaaagttcattaaatttcataagtagggataggatttttaagggtgaaaaagtccaaaataaggccgtaaataagggcgaaaaattcgcgaaataagggcgaaaataaggtcgaaaaagtcaaatttagggtataatttttaaaattgctgttttttacatgaaataatttcagactaaggcaaacaattttattcactgattgcagttacaaataagctatattttagaaaaattttttcatttcttagggtctatttttgaaaaatttagtgtcgattcataggggtatattttttcgaaatttttttgggtcgattcttaggggtgtatttttcgttttttattgcatttttgttaataaattttggacaaaacgccaaatcagggcaaaaacttattttaagggcgaacatccaaaataaggatttttaagggcgaacatcaaaaataaggatttctaaggtcgaataagggcgtgaaaacgcaaaattttcagacaaaaaatgtgtttttcgtgtatttctcgttgagttaaagccgcagaaaaaataagtaaaaacttagaaatcccatccctaattatcaatcgaacagtgatcaaataaataaatgtgccattttgtcacggtgccgacgattggaaacattttggcggaagaaagcacgactttgtgttgttattatttccagtgttttgcgcacattttggacaattgtcatccaaaaaattcaaaagacaattttcgcagacaaagtgacgacagccgacgaaacaacttacaacctaaaaaatggtaatttgaagaaaacaattagatgggctgagacgaagtacgaaaagtgcaagtgatcaaattaaagcaaaataattattttaatccaaattaattaataatatctatataaattatttaaaacactcgctacataattaaacgttgtgagccgaagctacactatttaaaatttaatttagtcaagaaacaattacatttttcacattttgcactaaagatcgatgctagatcgtttcgtaaaatccgccattcgtgtgagtagagaaaaacgtcggctatcgacaatagaaaaa

SEQ ID NO: 11406 - DNA, 2377 bp, Heterodera glycines
  unsure (1)..(2377): unsure at all n locations
accaatccgtccaagatgattgagttatcatttttgatacgcttaaataaaaaatatatatattttttaaaatgactgaatgttttctatttttcatactttacaacttttgtccgtcgtaaattcagcacaatttgtttcctcaccaattatgtcaattaaatccactgttgggtttaataatcgctaaattaatttaaattaaaatttaaaaataataatatattatttttacataatttttggctgaattttgcggttcttttccatttccatacaaagcaacgtaataatttggttgcattttttgtattcgtttaaatggggtgaacgttatattcactgcgatgttctccgtttgatttgtgtcgttgaagttttcctaaatgtccaagaaaatttgaaaaaaataataattaaaattgttttattatatttattaaataaaaatcatattacccaaagggcccgaagattaagatttaaatatatatcattttgtggtttttaataagcttttttgtgaaaaaatggcaatttctaagaaattttaatcaattttccttaacaaaatgtactaaaatttcaaaaaaaaaaatttccggcggcgtctatcggcaccgccaagtagtcttttttggcgaaagcgagtacaaattcctgtttttgctcttgggcgctgaattacgggcttagccccaaacggaaaagtaccgaaataattgtacatttaagtttaataaagttagaatttacaatttttatgccaaatttctttgttgcaaaaaaaaaatttttaaacgacttatttgggatttttttccctaaaaatgagtaaataatttgttttgtgccataatgaattagggtccttggcacaatcggacctcaatgatggtgaaattaaagtcagcaaattggccacaaaattggcgcttcggaatttgtttttgccttcttgccacagtcggacccattgacagtgtcacaatctgagaaaatgttttttcttaattaattatttaaaaaatgaattaattactaatttcaataatctgcaagtctttttcgtcaggagtaatgtgaaagcttgagccacatcggttggaccgaacttcatccgcttcaaatgcaaatttgcattggcgatacatcagatcggcacctatatataattaggtgctagtgttaaaagttattatatattttgaattttattaaatcaaagtggggccttttggcacgcaaaaaaacctttttttctgcagctttattttgatgagaaatgcacgaaaaacatcatttttagccgattttgctttaacttcaatacccataaatataaaaaaatattttagacttatatacactataaaaatttacaaaaccattttgcatttttatcaatattttgataaatattttgcgttttttgaaatttttcttaacaaaatgcagtaaaaacgaaaaatactccataaaaattgactttaggaaaaataaaattttttaaaataaaatttaaaaaaaaacaaaacaaaaaagatttgaaaaaagtcgcacccaatcttaaaaatattttgtcttaaatcgtatgaactttacctctgaaacacttgaaatgtaattaatttgcaaatgcaacattgaagaattttttttttcacttttttgtttttatatttgaattagaagaaaattttcaatttttattgctctaaatttctcatttttggtcaatatttttaaaaatattttggcattttttcttaaatatttatttaaatttttcgggattttttgtaaatataaatcatcaccctaataataactcttgaaaatttgttaaattaaaatttttagtttattatgtttttttttcaaaatttaggttaaaaaatcagaattggttaaaatatctttcagattcatgatcagggagagaccatccacgaaaatcgcagaaaaatttttcaaactaaaagccttttaataaaattaaaaatatgcgactttaattggcgccataattgtacaaattaaaaataatttttttaataaataaaaaaaaattaaaaattaccaacaaaagcttgtacagtgtcatcgcttgaaccacgatgctataaaaggaatacaaattgttttaaaatgtaaacattattttttttttacaaattccggtgctgggaaagcatgttccaaatttggcaccacacaattaattaaatgaaaaattggtgccacttcgagatcttcaattcccatgggccatgctanaaaattaatggaattttctattagtttatgtacatatgattaaaaaaatatattttccnaatttatttttataaaaattaatttataaattaaaata

SEQ ID NO: 11407 - DNA, 2309 bp, Heterodera glycines
  unsure (1)..(2309): unsure at all n locations
aaggaaatgagacgcaagcaaaagaaacaanaatagcaaatgcttatatgatagacagcagagaatgcatacggaaacgaaaaacagtgtaatggaaagacgtaaagagtgacggaatagtgtgtcaaacagcaatgttagacaatgagacgcaagcaaacaaacaaatagcacatacttccatgatcgacagaagagaaggcatacggaggggaaaacagtgtaattgaaagacgcaaagaatgctgaaatagtgtgtaaaatagcatttttctctgccatttttcacaccccatgccctattttcactaaataattctctcttctataaaagaaagaagcaacggtcgtcacagcaggggcacgggtaaaaggcggggtgccagcagcacagttggcgccgctgccgagcggaggctgagcgcagctgtgtcgtgacggacgcgggcgttcgtcggtcggacaccaaatccgacgcggcgcggcttcggccattcaaatcaaacaacaaacccacaacaaaacagacacacaaacaaacacaaactctctaaccagctcctcagctcaaacgaggccccgcggaggaaagggccttgtggcctacggaagggtacaccggggcacaaatagtgtacaacgatcgccagttttggcgatctgggaaggatggaggcttcctcactttgtgagagaagagaaggaaaagcccaatgcgtccggagcggccaaacacaaataaagtcgtcctctcagccgatgaagcggcccatgcccccaatttttttgtttcaaagaaaaaatccattcaatttatagataaataatttcattttattattttcgttttctaaaataaagtttcatattgggagtcaaaacaattgaaaacaatcaggataatgtaatttttacgctgatcaaacgtccttataataaaagcacctaaaaatttggtatgcgtaaaattccattgattttatatcaaaagcaaataacacttatttgttaagaacatcccacaataaacatatgaatatgaccatgaccatgactgtattttccttttcgcaatttaaaaatttgtttacatttttagattaatttaattgaatataatttttcaaaacattgtattaaataactattttgtattaaataactatttatttctatatttttttgaaaattaatcattttcctttaatatatatttgtttctttagaagggtttttttcatttaattttttcaaactcatgcaaccagcctgaattcatgctgaaccttaattcaatgtcaagcgtggcatttgagagataatcatcataattaaatggggtgctctaaattaaaaaaaataataatttaatttatttaaaattgctttttgcacattgaatttgacgtgcacaatgtccatttttccggcaatttgtggcccatccggctccaattggaccgcatttgaccattggcttagctcatgcttggcacttactgaagcaactttaatggaaattggggcacaaattgtgtccgctgatgaaggggtcatgccattgatgaaatgatcggtggtatacttaatccaattaattaaaaaataagtttacatgactagacattaaaaatttttgtaaaacaaaagggtcgctcgcctatatggtttttaaaaaattcaaaacaaacactttaatagcgccaggattttttttttaaaattataaatcatcccctactgatcagtgatcacccttttccaaaatattttcctcttgaaaaatttcaagtcattctggcaatatgaatattttacaaataattgttcaaaaactccgtcaaaaatttttgcatttaaattgtatccctatttattatttatttatttattttttaaaattacaatttgtgaaatttgccgattcggaaattcagtctccatttgcagcaaataaattttggtcagttcaccattcggagcagatgtttggctccaactcaaatcaatcgtcatattctcattataaattgcctaaattttaattaaatcatttattaattaatgctaatgacttaaaaatttgggtaaaaaatttttcaaaaaaccgtaatagaaaaatttaatctaaaattttaaatttctcgggaagaattttaaatgaaatgagaaaaaattacctcaacatcttttgggacttggattttctgatgatgaccttttttgtcaccaaaatcttcgggtaatccaatgtctttgcatttttccagcattcgttattgcttttcctaatgttttaaataaaaatt

SEQ ID NO: 11408 - DNA, 784 bp, Heterodera glycines
caatattataaaatttgatacattttaggagaaattatgaatattctgtcaaaaattattcatttgatggttttttgactaacgcccattttgatggtttttggctaacatcccagcaccgtcatgagtcgcagccaccattttgggctttaaaaccattttggctcttatatagtttgaccaacataatttttagacccaaaaattatttttcatttcaaaataaaaaaaaattccaaattataggtttgcacaaggcccgttgatcacgaatccaaagcatccccgtatattttgttcgcttgataataaattttgaattaaaaaaaattattcactcattgttcgagtttgggtttatggaccttattggatgccggcttcgtgatcagcagcccacaaaaacctatataataatacaacttgggggggggggggctctaaaaaatttgtgaggctatattatataagtaagagccgcaattttattaaatattacgctaaaaattgcaatttattagaaaatagtaaatattaataatttttgtatttgccaaaattgataaaatgataatgagccaatttaactcacacataattttgtctgcccgtagggtacgcattttgtttggcattctgacaatgttttttgtgacgacttttggccatttgctgttgaggactgctttgcttttaacacattttcataacattttgcaacacatcgcgacaaacaattcaaatgcaaatttggcgaaatgcctttcggcggaacagaatggac

SEQ ID NO: 11409 - DNA, 1674 bp, Heterodera glycines
  unsure (1)..(1674): unsure at all n locations
tataaattttgctcaaagaacgtgtccaaagattcgccgcgcattttaattcaattaaaatctgcaaagaacaaatattatgctcaaacgtgtccaaagatacgcnccgcatttaattcaattaaaatgtggaaaaacaaaataataaaggagtggcaaatttgaaaagcacatttacgctatcgtggcaaaacgtacagcgaaaattcaaatctagatacattcataggcatcagccaataaatgtatcccttttacccggtatataatagagaccaaagtgtgtataatttaattgctgatacaatttaatttacatacatttataggcatcagccaaaaaattaatgcgcttgtttagaaagggattatagaaagggattatttaaatcaataacctatttattctgcattttttttacatcaatcaattcttaaacggcaaaaatttaataaaatcctatataataaagttgagtgtctgtatgtatgtttctgccattgtttgaatttgtgtggcattatgttttgtttttgcattaaaatgcattaaaaattatttaattaatttgaattacgcttattatgtttatatacataacaccaattatttctccttattcttttatattttatctcgtaatttttttacattttagttaaataaaaatgtattctcctttgtttaaaacctctttgcctaaaagctctgtatctgtggaaagtcgtcgaaacaccatctaccttttgaacccaacgggcactgttaaaaaaatgtgtcgtggggaggctgcacagccgcagaaaggggcggatgccacggatgtcaagcagcagcagcaccaccaccagcagcagcagcgaaaacatcaggtttcgagcagcattttttgatggctttttaaaatgtaatcgtgttaaacctgcaggggactgaagccatccgagcggcggagaaaaaaggggcggatgccaccgatgtcaagcagcagcaccaccaccagcagcagcagcaaatgaaaaaaggggcggatgccaccgatgtcaagcagcagcagcaccaccaccagcagcagcagcagcgacaaccaatgaactgggcaaagggaatacggggggaggatggaaagtggtgcggactctgcaaggttgtaaaccattggccacacgaatgcccactttatctgaaccagcgtgaagacggcggggtgggtatatgtttgtaggtgattaaacaaatacttttataatcctttagaaccgtgtttcttgtctggcctgcaggggcattggtcacattcccacggaatgttgggtcatgagagagtggagtaagtggtgacgattatttgcgtttagcattttttttttcaagttggttgggccgtaccatttcttggccaagcaaagtttgaaggggcggatgccagcgagcttaagcaacatgcttgtttcgcatgcctggaagtcggccaccagctccccagctgcagagcgtaagttgggtggggatggggtcctttcttcacgaggatgacaancagaattataccttttattggncgttgccccataaggggtattctttanatacacctacagtgtacatttgcaggtcctccgcgacgaattatcgcatttcgccggaggaacaagtcatccagcggatggcat

SEQ ID NO: 11410 - DNA, 1259 bp, Heterodera glycines
  unsure (1)..(1259): unsure at all n locations
cgctctttctcaattgtcgacagtccatcaaaattcagcagctacagctcgcaattgagaagtcgggggaatacgcggcgcgcaagtttatgtgctgccaatgaatcctgataaacgatcaatttgcatatttattataaaattttgttttttggattatttcgattcaatgttttcttatactatagtccatggatttcattcaggtcagagtaatacgcatagttaatcgatattgccaactaatagcattaatggggaagtatctacattttagaaagctttataggggagggtagggtgatcaagcaatactatattaagtggaatagttatgagcagacgccatggaataagcatcctcgggaaataaaagattagaggctaaaacaattacctttattggcatattccaataaaggtattaactgtatattttatttttctgaaagacaccccaaatcgagtttgtgatatagtaggctaagacaattacctttatcggcatatgtcgataaaggtaattgtcttatatttaaatcatttcctattcacaaatcaataaaagatatactgcatacatcgtgatgtctttgagagtgactaattagtgcatctctttagcccctgttcgctacattgtgaaagatggcttcgccagcttgcataaagtccacgtggagaacggaatgtcgaggctggggccgcttttacaaaaagtcgccttggccgagcacaccgaaaatgggtggcgggtgagcaagggcggatgcactggtggcggtccgtccacatcacagcagagcgagggcggatgcaaagtatgcggagataaggcaaagcggggggagggaatgagcccaagatggtggagaaaatggagggcaaattcattccatccgttttagaatatccttatagtatatttttcatcagggtgctgacagcggtaccgatggcggcgtctacagaagcacagtctgcgcttgggaatgggacgagttctaaatgaaggccggatggatgttggcggcgtgtggctttttttttcacgttcaataatcatcctattccaaccaccctcccggtccccaactcgtaatctatgctggntgtggctgtccccactgggacggacaacaggaaagaatttacgggatggtttagaattattttggaaatggaaactcagggtcccccataagaggggactctttatcccaaacggccctctttagggccatatagagtaanaaagg

SEQ ID NO: 11411 - DNA, 3895 bp, Heterodera glycines
  unsure (1)..(3895): unsure at all n locations
ggttccgggccgggttgcattttcaaaaacgaccgggttccgggcccggcctctcaaaacccggtcaacccggttaacccggtcaacccggatttccccaaaaatcgccgggccgggttgccgggccgggaaaacccggtaccgggcccggcccggtccggtctctactaatcaccataatttatattataaatcatacttgaaaaaaaatttatattctaatttttaatgagtaatctcatttgtccatgatgtttttttagttcgttagttgactcaaaaaattaatggattttaggaaaagaaaggtttgacataaattgaacaaaggccccaactcaatgttttgaaatgttttggtagattttcaaagattatttatgaaattgtcttcgcttctaataatcaattaagaatgggtgtttttttgaaattttttgttgttaaaattgttcatgtttatgacattttaataacatatgaacagagttattaagtattctcttgatggtatttagtatttcgcatattataaaatgctttaattcaaataatttaaatttaatgacaatttttattttattagctgattttcatatcattttttgatgtttacattaaaatttgagattagtcacatgtataattttaaatttctaactgattatagatttcttataaattattttaatgcttaacttatgttggaattgttctaaccttataaagtatattttaatatttttctgttgattaaattcttttttttggctcttcttatgcataaaatgactacaattttaattttatgctttcattaatatatttaactgtttaaaatatatgttctcatttgtaatatttttacgcaaatttggtcagatttaaaataaatcagaattaaatacaaattttaaaacatgaataacaaaacaagaaaaaatttttaaattttatattagaaaataatcgattaaatgatgtgcaattcgctttcgcatttttttcgtttcgcatttttgctttcgcaaatttcgctgaagcctttcgcattttatttttcgatttggcccatccctgatacatatatatcagggatattgcaaaaataaaataaaatatgaaataaggaataagaaatacgagaaaaactttaaaactgttgcatttctgtaggaaatattagatttattattacaaatgattatttcaagcaagaattatgcattttattcaacctgagcttgtactgctctaactccattcatgaagttggagctgtacaggtttagtgagaacctagagaccaaatctaaggctatatttggactcagcgtggtcaatttacccagtttaggaattcccaacaccacttcaaacattttgttatttgatggtcttgaaaaatgccgtttttggagattcattattcacattttctatgtttatgtgtatattttcattttctttaaatcagccttcaaaaatacttaccccaaaaatgaccatttttactttatcaactctaactccttattgacttttccatttctattgaccttttgcctgaaaatgccaacatcttatcgatagtaaaggacaaattttgaatctttttttgttgaatttttaaaaataaatttttattaaaaaaattttggtgcaaaacttatgtaacacctaagtaaaattattttataatttacttttcatttattttcctgtaaaaattaaatctttataattggttctataaaacaatattatttcggcttttaataatcgactttgagaattgagggtttatgtaaaaggcttttatttttattttttgattgataaaaatttataatgttttagacatttttattttagtatttaaatattgttttcgtttatatattataatgtaagaattataaataaataaattattcatttgtaatattttttttgaattttatttttttcttagttcacagaaaatccttttttttattctttgtccaattttaaagttaaacacattttgttttcattttttaccaatttttttagcaaagttactaagaagttcgttcttcgaacaaatatttttacattttcatcataaacattctctaattctttcaataaaaatacaaagatttgtttcattgtcatttttttatagttaattatnttcctaaaagatggctttctgaattaatataattgattttgtaacacattgaattgtgattacgattacaattttaatttttttctattttaatccattgtaattaacaaatcaaacattgtattaaaagtgtaatcataacttatttaattatgaaacataatttccttctacaatattttatgtgagacccaaattaatttttaatatttttttatttgatgcgttttaattattttttaaaaaggattttttgttgtccttaaaaatattcttgcttaaatatttttttacaaaataatctcgcaatgcttcccacttgcacggtttttaatttcttttttgtgtatgaaagtgttttcatatgttttatttctctttttatttatggaaactattttttctttgtctattatatgtaataaaaacgaaaaactttttttaatctaattcccgtttcaataaatttttcttttatttttaaaaatgcattaaaagatttaaattagggggcacgaaattaaacatagagagattaaatgtattgaattaattttaatttattaatttcacaaattttttcaatagaaatgtttttaaatttctaatttgatattttaaaataaacaatttgcgataaaactaattacttaataaatgatatataatatataaacgtttattttcagtaattcattcattattttattttattacaaaaatttataatatttaggtagtttaatattttactttgttttgcttttttaaatttattaaaagttttttttcataaagataattcattttaatcaaataataaaactttataatataaaaattttattcttttatattttaaatttataaatttaggaaaattttatagtctaatttcatggccatctgtccagagttttgacattaatttttaagtttgaatttatttaaatttactttttgcgtaatgaatatttattttgtgataattatcaatttaacgttcaataccgccgggcccaaaaatatatttttttcataaacaggactcagaatcgcaaaaattggtcactttttgatgaaaatttgttaacaaattccaaattctgaaaaccaaattcattttaagccaaatattatattatttaattaatattttatttacttaatctgataatttgttataataataacggcaaaaatttattattttaattctttgtcgctggaattcctccaccagcgaaaagtgatagaaataaaattgccccgtcctccgacccgacccgagacgctttttggacttattccccgacccgacccctgacatgtcgcccccgaggtccccggcccccgactttttgccccccgaccccccgacactaattcgggggattggggactccgagcgttttaaaaatttaaaaaattatttcaacaacgaaggggagaaaggttgaaaatttttgaaattttgaacaaattttttaaataaaattcattaaaattacgaaaaactttccggtggtgcctatcggcaccgcctgccccccaaaaccccaaattttttgctaaaaattgtcgcaaaatgcaaaatttggacaatttttggacaaaattctcttaacaaattatactcattttcataaaatttttaccgacgttgcctatcggcaccgccggaccacttccccccaccccaagttccaaaaa

SEQ ID NO: 11412 - DNA, 3302 bp, Heterodera glycines
tatccgtttgtgaattatggtaaaaaatctgcttgcatttttgaaattttccttcgcttaagacaccctttatccggtgggggtccctaaaattgtggtgagcagggaattcgatgtgaattggacggtgcccgacgatgtgccctatgatggtctgctaaaggtgaaggtcatccccccaaaggaactgctttatcctctcctccctatgcatattgataatatgcttctcttccccaattgttatacatgtgcgaaaaaaacgaagaaagagtttgtgttggctaaggatgtcaaaaaatgtaaccatcggccagagcggagagctttgattggtacattcacttcgatagaactgcggaaatccttggcgttgggatatagagtaataggcttctatcgggcctatcactttgagcaatttgacagtcagctgttcaaaggatatgtgcgcatgttcttgaaaataaaggtggaggcgtcgggctggccctcggaggtgagaaatgaggaggaaaaaagagcattcatcgaaatgtacaaggccaagtacaacatttggttggaatatgataaaatggtgtttaaccatgggctacgtatgatcgctaaattggtgagaaaaacaaataaaattcaaaaaacaaataaatattaagggattgaacagtttatgggggaaattttcaatgaggaacacactttctgtgactgagattgttaataatttggaaagatggacggagctcatcaaagatgacacgattgagtttaaaagaccgattgagataaatgagggtgtgatgagagcagtataccagaagaagcaagagtttataaaggagcataaagtttcgaacataattttgtcattgtggaccacgagtgctgccagggtaaagctgtacgagtatatggagcaggtctacaggaaggagggttgtaagcttctatattgtgacacaggtggacagaaataaaagacaataaaattaaagtattaagattctctggctttcgctcatctgaaagggcgctgtcctttggaggaggggaaatttttggggtaaaagatgttttttgaaaatttctataaacatttgttcagcgagatgactcgtgagtattcagacagtgaaattttggagtatgtgtcggcgggtccaaaacagtacgccttgaaaatgaggaggaagaaagatggtgtgatttggcataaaacgaagatacgggggatgacgttggacaggaggaacgaattcagctatgaaatgttcaaggacatggtgttgaatcatcgggatgggttcaaaaaagtgtttcgttatcctgagaaaattgggccgacaagggactgtcgagtcctctcgagggatgtaatgaaagaatacgagccagtgcaaaagaaggggataattgatgatgaatataatgtgttgccatttggatatcattaaaataattttgtgtttgtgtttattctttggtttgtttatttcattcaatatttacgaaaacttttttatgctaattattttttaagaatgtccaagaaaaatttccaagaaatttcaaaagacgtaaggcgctcgagaaatacccgtaattatttccggaagagcccagacttgggcaagtattacgaagaggtggaaaaacatgtgaaggaaaacaaaaaatttgggattaaagaatatgtccgcacgttttattttaaatgtccaccaaatgaggatcccgaaaacaattttaaaaaaatcctcaaaaaattgatgtccgaagcaataagccaagaagccgagccaggatggaaaatttcgaaaatttctgtcgatctgtactgcagtgccctgtcggaccccgtgatcattccggctcgccccttccaacaatcaaacccagacattgttttcaacgagttcatgcaccgacaacaatcatttggagagctgaatctattggaagagagaatttcgattattattgctacatatgcttttcctgaaaaataaattttttttgatgaaaaaggatgtttttatttaatgttttatacgcttgtattttaaaaattatttcgctaattatttttagttttaaatgtactcgttcaaaaaatattttgaaactgctcttgagaaggaagactttttctggcctaagaacagagctgaggttgaagcgatgttgattgaatcatcccaatataaagtggccatacaccgggattatgaaagcccgttttccggctacatagaaatgcacgaacacacgtctgcgttttgttttaccatggttgagcgagatatgcgaattttttatgactcaggggcgggtactcctatgggtagatacacgttggtactacacggcatcgtacaggggaactattgggaaatgattcgggattgggactccctatttttttcttctggttttactgggagggaaggagctagacaaaccgcaacggtttttttaggagtcgtctttttctggcaaaggtccaaatgctaaaggttctggcattagcttggggaaaagaactgttgacttccccaattgaagtactattaaatgttttctttaatcgtatggacaggtctttaatgattaaaaatctatatgtcattattattacagagaattgcttgcctcttggtcattgctctatcgggtccctccaagtctctttgatatttctcgtcgaagtgttgcagaaaatatgatggaagaatttttagaactgccatcacactttcgaattgctttttataataaatattaattgtgtaatttatttttttgccttagttatagtcgaaatttatttttatacagacgttttgggggtgttgcttttttcggcgtgaaaaatgtagaaaagggtgacggaatggtatgaaaattgtttaaacacaaaaatttatttttttaggaaaaggttaaaaacttggttgggaccatttgtactttgaaggttaatgtgagtgtgaaagaatatggtggtaagaagggaatttattatactttgattgatatttatgaaatttgattttttttgtctataaatgaaatgttaattttttatttaaataaaaatgttttttctaaaactatttctgttgtctttcttggtaattgggggtcagtgttggtgtgcttgtcgaaagaagaaaagcagcagatggatgcctccccgaagggttgttgaaaagtaatttaagatataattaggttaactaatgaggccaaaaactttcattttctgctcctataccatggttgaagctcaaattatt

SEQ ID NO: 11413 - DNA, 1621 bp, Heterodera glycines
aatctttgcaataaactttttaaaggtgtgaaaactctctccatagcagcatttagtgcacctggaatcgaaaatttatacttttcattcttaggaatgctcgaaaaaattcaaaaattacccggtcttattatgagtgaatatagaaaacaggccttagctatgcagaaactagaaattggcatcaaagaaacagatatatttaaatgtcaagaagcagagaatatatcggacctttgtttttcaaagataaatgaattcgaaaaacaagtgcaaaattatcggtttaacatgagaatgttatacaataaaattagaataactgcagtaaagcatttgtttaaacctgaaaaagaaatattttttagtccttttagaatagaaagaaatagagaaatattttattctaaatctaagtatatttaataaaaattcaatcttacaaaatcaaataatcgcgactaattaaattatagctcgcatggttttgtgtaatatttgcgcgcaactcgtgcaaaaaaaaggggttaagcgcgccacgaagggcacaacactctcctacaatggggagggaggggggcgatcgccggcgcgctctgtgaagggcacaacactctcccacaatgggaagggaggggggcgatcgccggcgcgcgctgtgaagggcacaatgtggcggtaaaatttacacccacatttgtggccttatactactcctaccttctgcaattcttgcgtggactgttgtttttaccataggttccagctctttgtccgctttccgttaattctgcatttaaaaaattgttcactgccgtcactacacgatttgcaagctcattcacgccaagctgatcctcaggtactgtgctaaaatacattggtgtaagttgagcaatgtagtttttcgagtttttaagagcttgttttgacatatctgcgtgtttacggcattcattcaagttcttggaatcataatgtatctaatttccgctttgcttcggccgcctttttcgactcttgtgaaatcttttccacaagttcacgcaaattattctcaatatttgatagcctgtcgaaccatttctttaaatgtggagcattaggtgcccgtttgcgggctttttcaactcggttgagggctgttttagccttttccgcgatatccgctgcattaggagccaatttaacggtctctttccacgattgttccgttactcgttaggctaagtccatgcgctcttggtctatcgtagatattttaccatgttcaacaatgggagtgggtggcagttgttccttttgcgggttttcaccttctaattcacccaattgtttgtcagaaagttgctctggtcctgtttcacgtcctagttccttctccgatggttttggctcatctccacgtggtagttcaatgtcatgtgttgctggtaaaggcgcttcacgtatcagttccttatccaatgttttagatgaaggcacttcacgtgtcagttccttatccggtttaggtcgcgtttctggttccaattctttatctgcagaagcagccgccgctctttttacccttttttcttttggaaactttacatcataggccgattgaataaatgctgtt

SEQ ID NO: 11414 - DNA, 4285 bp, Heterodera glycines
agcgccatcgccggagcagacggccaatttcgaacatcccaaaggtggagttgaccagttttgtgagcactgaccaaatgaaatgttccgcagacggtcatcgaagtaacccctaaaaaatcacaacagcctgagaaagaccaagacgggggggggggagagggtcggatgatgcgtgggggctataaaaagaggaacattttttgaacgaccctcaattggccaattgtgtgtcgtacgagggaagcctgttggccgatcccttgtacaactaagagaataaattcaccggttaaatcctgcgcaaatggccgagtcgactgtgaagattggctgtccgggcgaatgcgaatgatttgaccagaatcactgccagaaaatatttcttcgtccagcagacaaagtgcggttgaagaagcaaatctgaaaaataaaaatttaaacaaaaataggcagcgttaacaccgacttatgcactcgcggatatttggctaccgacgatattttcgcaattccatccgccaaattcgctccatttgatgccaaaggactttccacaatttgcacgtctcccgctgttgttgagacgacaaattgttgagcatttaccacgctaaagtacggcaatgattgctgtccaattcccttttcgctcaccaaatgtcgccgacatcgcaattgggcaactcaatccgtccattctgaacaatccgtcttccgccttcctgactctgttcgtcgcgctgttgttggaccgtccaaagtgtcacatttccaccggaacccgcaggggaacaccaagtgccggtgacgaaacgggaggaatactcagaatggtcatgaaggaaacgcacctcaaatgcaaatcaaatcaacaaaaaaagaactttcgcacctgctaaaggcacctacagaggaaattttacggccgcagaattttcgcacagtttcatcaccgtttggccccgtagaattcccaaagattgcgctggtggcaccggtgttgtcctccaacgtacccattggcaaaaacaattcacaacaagacacagaaacaaacccaccaaaacaagcaaataaacaataaaaagcaaaactaacgcacttcgagtggactttaaattcagtattttttgtgttaatttaatcaaattaattgtaagagaaaggcaaaagatttaatgtgtaaaatatccgaataaaaagcatcatttgtgggtgctggaactcttggccattttggcaatgcgcacattggacaaaccgacgaacgacgacatcccgcaaattggcacgatcatttgatgccgcgaaatgcggtccatctgggtaagcaaaatttaaaaaaatgaggaggggagagttgcaaatcacctttttcagacggtgaaaacgctcgctaaggttttgaggaatttgtgaaggagaaaacaaaattctgtcgataacttaaaaaggtaacagtctaaaaatcacataaaatgacatcgaaccgtcctcctccgccacctttccgccttcgtttccgactttttttcgtttccacgagtggtcgtcaacaggaggaaaggaacagttccgtttcatcgaccccaacttcgttttgatttgtctaacatttctccattgttcaaaacgaatccgcgcgaaacgcttcaatacttcctggaccatctgacaaaaaggggaaacaaaggttgtggattcattaattaaaataaataaataattgcattttgaaaccagttgaaattcataaatattggtcgtgcaactcacaattcgcgtggtccctttgtgtatattatttccagggtaaatgttggtcagaaggtacttaaattttgatgacgaaaagggaatgaattttgggtgcatttgtttcaaataccgaatcagtggcaacgccgtgggcagttcgaatgtgctgaaagaattgttcggtttttctcagtgaaaagctatcccttcaaatccacctcacgaattgccgtgacagaaaggaaaaggacgcaattcgaatctttgcacaatttacagctgaaaaactcggccatgcattttttgtccaagtgccgtaagacatgggcatctgaaaggagtgaatgagattggccaaggcatttgcatgataagcgtacgcagatgggaaaaggctcaaattttgcaaaacaaacagggcaaacaatcgcattagccacggcagttttcatcggtctattctcgggaaaatctgaaaattacccattaaaattgttaaaatgataggcatttggtgtggggcgctaaaacagtaaatcattattttatgttcgttagaacccttaaaatacaaaattaaaaaattgttagaaagaaaacgttgagtaaacagtgggatgggtggtggtggtggtaaaaggcgtaatgcacccaaacgtacaaatccgaagaccacattccaaaactttgctcggaacggacagtgtattcggtggcattcgatggtcaggctctttcgataggcaaatagacgaaaagcactgtaattaaaacaacatctgaaaatataaaacggaaacaactaaataccgtattattgtgagggtttgggaggaataaattgcgtgagacaattggcagacgtttattgttaacggcggattgggtacgaaattgagggactggtctttgtgcgagaaggtaacgcgacggtggacgtgaagtgccaactttctgcggtttttgttgcggcatttggcaggtttcattattctacataattaaaaatttggtgaattgggacagtctcaacttcagcgtcagtgagttgaatgaacagctcagcaagccttgccaatttgttttccacgttacaaatgcgctcgccaatttgcgttatttgagacagacaataaatgccatcgcaaccgcttcgcatgtgaggctcataaaatcgctaaaaacggaaatgaccgtcaaagggttcttgccttttcaatgggggcacttactctcttcgtcacgggatcaaaggcacctaagaaaaatggaaaacattaaaggataaaaccaagggcgtagtcaggaaagggaaatccaaaaaaatttaaaaaataataattcaacgaattttttaagcaataattctaattaccttaattattcaaaaaatagactcccaagtagggatttctaaaaaagaaaacaaccccctaaaaacgaccccccccccgaagccaagggtctgctggctacgcccttcacaaaaacttaaacgaacatcgttcggcgttgccttcctctttctgatgcgaatgttggcagtttcgtgagttacaattgtctgctaaattgtccaactgcccatttgaattttctccacttgaaacatcgattatttcatcttcacagcaattttccgttgaaacctgaaaatttaatgaacttgatatttataatgtataaaataataggcaatttgaaatcgttaaataaattaatcccaatataatagaacattcaaaaataccaaaggcgaattctgaaaagcggaactaatattcgaagtatgagcacatgacgaaatcccttccattaattgataaattggaggctccgattgtggacgaagactattttgatcagtcagaaaactatcattttgattgcgggttgtagcagacgcactctttcgcactgattcagagttggaccgtgtcggttttgccaatcccacttcgtttgagttctcatttcgtttttgtttgccagatactaaaacgtcgaattgagagggtcgttggccgagcaaatcattgactattgaattgagaaatgaagatttaatcgcctaaaggaattagtgcttttttcatggggaaaatttaattaaaacctcatcagtcgaattctgttggtcagatggcaaaaatgaagaagaggagcaaggttgaccatccgtcttttctctgtcgtcactctcgtcaaaaattcggcaaatttggttgcaaaaatcagaacgaagtgaaggagaagcactgttgcatcccattctgtcctcctcacaaccggcaaccgccctcaattcgttgtccttttcaggtgaagacattaaatcaaaatcagactttatagtgaattcagttggacatgtattatccatttaaatacaaatattactattttagttgagcctgcaatgctgaaaatcaattttttgcggcgcttttccaaaaaacttttggggaatagggggccggcggtgccgataggcgcggccgggaaaatttttgtaatttttaat

SEQ ID NO: 11415 - DNA, 3426 bp, Heterodera glycines
ttttacccttaattcacctttctctgctccttttctttctccaattcactgattttttccaaaaaaattttctcgatcattttgaatttttgacaaatgatctgcggtagcttaaaaatcgaaattttattttttgaaattttccctcaccttttgtctgttctttttgttgcttttccatttcactgattctttccaaaagtttcttgtgatcattttgtaattgtgagaatcgttcctcaacaccagcttaaaatataattatttaataaaaatggatgacaaatgatattttatccttttaagaatatttaatgccaactaatgactgattttgaactccgaactcgtgccactgaactataaaagtgccaaaaaaatttacataaaatatgttctgttgaagaaataacaaaaaataaagataaaaacaaaacaaaagaatacttttgcggatcactgttctgggttgaacggtctatgagtttattgtcaataaagaaaaagtccacaaaagggaaaaatccgcttacattgaggacaaaaacattatttaaaaatgtcctcaagaaagcgcataaacaattaaaacgagatcatcgccaaaataaaatataatgtgaaataaaaaataaaataaaaatacaataaaataatagtgaccaatcacttttaattttaatgaattaataatttcgactttaatttttccagtctattttacaggaatagagatagtttaaatttatttttaaattgatttaatgagtttatttcaataagccttttatcgagttggttccaaattttagttaaaaactaaaatagggtagggtcgtccctcccccaagccgaaatgctggatggagattaacctaacaataagcaccaaatcggctattaagcagcaatcgatgataaaaaatttaaaaagataaatttacaataaaaaagcttcatttttaaataaaaagcaaaaactggtaaaaaaattaaattttttattctaaaatatttcttttgaaaattaaaattttctctggaaacaaccacccgaactgaagacagaaactacataagtctaaataaaaaagactcgtgtaagcgtaaaaagttgtgagagcttttcctcagcagcttaaattaaagtcgaattaattcaaaaaaaatttaaaatttatttagttttctgcttaccttcgtttgtttgcgtttccctttcttcgttcttttgctcatcttcttcgtctgttggactaaactcatcatcatccgatcctaaaatatttaaaaaatcaaagttttgcgctacttaaaaattggtcacattaattttttttaaaaccatagggtccctttgggttagcatatttttggttcgtaaatttattcccaatgattttcatgttttttgatcgcgtgactttggcatccatttctattcgatttttggttttcaatttgtgatccttcctctcccctttgtgacagtataattttgatactgtgttcctccaatttcctaccgtttccgtcttgtccaaacaaatcagcagaacttgcgattgatggttccgctgtgttagctcgattcagctcagcaattctggcaatcagaacactcatttcctccgatgtgctcagatttggaaaaattgctgaaaataaaataaataaatttattaaaaaattaattattttaaacaaaatattttacgttggagtggagagaattcgtccgctgacgaaaaagtggtggttaatgatggcattttattttcaaaatctaatattggaatcgaattttgtttttaaaaagaatttaaggttaagaaagtcaattgctgaatttgcttacatatttatacgccaaaaagtaaataatttacggcaaaacgatgacccaaaaatggagaaagcgatgggcaaaaaaagataaaagaattatcgttcattcatctttgagtgttcggcaaacaatgttccaaaaaatggcacaaacaacagaaaacggcaaaaaaaaaagattgggatataaaataaacaaatataaaaagattggataaattgtagtgaacgccaagggaaaaaaagggtcaaatgatataccactctcgaggagctaagcacgaaaaaatattttcgagttgcggaatgccaaaaaaccggtttttgagccggttcaaaactcaaaaattgagagatttggaactataactttttttaaacgatcgaatcttgacaaattcagtaccattcggtaaggaacataaccaagaggacaaccgactggattatggatggtggaattttttgcagaataatatttcgattttaaataagcttttatattttaaacattcaaaaacccaaattacaattgaagaagaaaagcataaaaaagaaacgaattggtcaacaattattgtatgttcttcatccgagtttccaaatcgaactcgaaaaagggcataaatttcgcctcaattttgtcatcaaaagtggccaaagtaacgaatggataaaatgaatcatcagcaaaagatggagcaaagagaaaattagaaaaatctgtgaaaagtaaagggattttctgtaatttaaacaaaaatcaatagcataaaattttaatttaaaatttgtttaattatatatttgtgccaacccaaacgaagtccattctttgtaaaaaagatctgtcgcgtgatggaattaacaccaattcctacagtatcgccaatacagtaggaatattcgacatttgcttcctttaattcttcgttaatccaaacacagccattactttcatatgcataagtgtcctttttatgtcgcactgatttatacgattcatctgtctgctgtttaatggcgaatccaaagctaaaaaggagagagagagagagagaaaagggtaataagcagggaacggatttatatgtgctaaaaaacgccaaatatatccattttggccaaattccaaaaataggaaatttaattctccacaaaattcaaaatatgtaacaagtaaactacaaattaaaaaaactttttttatgcttattgcgctaaaaaaccagcgcacactcgactacggcgaataaatttttttaacagaactctttaaaaataccaaaaaaatttccggcgccggcccacaaattctcataagatttcaaaattgaagcgaaaattgtccatttttcagtgaagtccaaagaaaaatattcaaaactctttttttctaacgcggcgcctatcgcggtaggggcagaactcgtcaggccaattccgtctcagcaagttcaaaaattattatttttttgttgataaaaccaataaaataaaagcatttaacttatttttcaataactgaggccctgtaaaaaagagcagttattattctcacgaaaaaaaaatccaatt

SEQ ID NO: 11416 - DNA, 1739 bp, Heterodera glycines
cgaatcccaaaaataaaaattttcagtaaattttttgaaattttatgcaattttcgtaacaaatggcattaaaattttcaaaatttttccctgaggctcctaacggtaccatcggaccccccattttatcatatttttgaaaaatggagaccaaaatggcaaaaaatagtaattttttggtgaaaaacggctaaaaatttttagatttctcgattttcgattcccgagtcgagaaatttctcgggttttttgggttctcggttctcgtatcgtttctcggggtcatttcccggtctcggttctcgtttctcggtaaaaatattttctcgcacatccctaatatttaccggtaaaaaaggaaaaaaagcggcaaaaaattttttttattgttaactaaatttttgcataccgatagagaaaaaaattaggcataatgtaattggcgttttgtttttacgccaacgatttttgccagattttttacttttttaccgtccatgggtaaaacataattttttgggttttatttcaacacatttgctttttaagctagattacacagtttctaaccatattctgttaaattttcaaaagatctaatttttgataaattttttttatcattctcggcaaaaacgaatattatattcttgatcagcgacccttaaaaccccgatgaatatgttttcagggccttggtacattaaaaaataacatttcttcaaaaaaactaagttcgaaagaaactttgaaaactcgaatattttaaatgcaaattctgtcttacattattcaaaatcactagggccgcgacttttagtgacaaaaatctctaaatagttaactaaaatagtgagtaaaaatgccaaaatagtggcaaaaagtccgaaatagtgacaaatagtgacataatttttggccaaaaattaagcaaaaataatttttattcaatgactgcagttgcaaatgaagtgcatttcctttctaatattttcttagcaaaaattgacctttttttaaaccaaaaattttgccaaaaaaaaaaactttgggatgaatttttgagaaaattttccaaaaattttttggtattatattaggggtgtattttttgaaaaattttttaactcgattcttaaatgtccattttttgattttattgcattttttcgttgccggacgaatcgtcgtcaggacgaatcatcactttttctgtttccttaaccatctgttcctttatcaaatttattatttaaatttcttttcttttcatttcattttattccgtcctcaatttttttaatgtttggccaaattccttttttaactcataaatttgtttatgtgttagaggttataatttaaaatttaatctttattcttcagcaaaagctttaagaattaattttttgaatgtgattaatgcatttattgccatttgagttttttgctcctatatccttaatcattgctttttacatttgaatttcctgtgttcgttatccaacaactataaatttgtaatattaaataaatctttgctttttaattcttagtcatttttagccataatgaatttaaacgaaattttaattcatataaagctgactatatatacgtgtatatagcttgttttatgtacattaatttcatcccaaaattaatttcaaaaattttcaataattttagttattctatgtaaagcaaatgaatatgcgggtcaatggcaattcgtacaa

SEQ ID NO: 11417 - DNA, 3224 bp, Heterodera glycines
ataatcatcgaatcgcgggtctcatggcaaaatgggagatttttaattttactcattaagcagttaatcatttgtagaaaaaatcggcccggacccggacccagtcctggattttgacgaaattttttttaaattattcaacaagaataaaataataattccaattcggaccgaatcgcacaaatttggagatttttcaattacacaatttaagcaattaatgatttgttcttgagtacaaaaaacttaatttattggcttttgacgcccttttcattagtcatcacttctcaaaatgatgaagcatacaacgagcagcagcagcagtaacagtggggatgccaaggtctgtcctgtcaccatttcttggcaccctttcccaccgccacactaattttgccacgaacgtgtccccattttgtaggacagttcatgccatcgaaaccagcgttccatgtcattgggtggaccagcacatgagtcactgttgtccaagcaacattcctcctcccctccacagacggtggagctgagccgggccgacaacggtgtgtttttctgtcgaccgcaggcctataaccagaaaaaaaatccgggaggggaagccggagagctttttattttatttttttactcttcggtccaaaatgaactatattttcggtgccgtagaaaaaaaaacgggaaattttggcaattttgagacctaattttggaaaaaaacatgcgaaaattgggacccggcggtgcttataggcgcccgccggggaaaatttagaaaattagggtcaaacatgaattcaatcgagtaaaattttaaaaaaaaacatttttcgcacaaaaaatttaatttttcatttggggaggggggctggtccactggcaaaaattctgacaaattttttttttaatttttactcatcccccctaggcgactgtgttgtgttggttgtggaaaacacgcggttcattgtgaacccggctttgctggtcgtcaaaccggacacaatgctgggacgaatgttctcgttgagggcacgcacgggcggcgggacaagtaaataaaaaacaaattaattcagtttatatataaaaaatatttagcgcattttaaaaaatggcaatgcatccctttttgaaaacaactaaaatttaaaaataggaaaaataaaaaaccactgggatttcaacaagaatttgtcgaagaaatttctcttttttacatttcgacccaaaattttgttagtgaatttttcaaaattttatcccatttacgaatataccaaaattcagagttgaaaaatctcctttttataaaattgttctaacattttgtcactgatttttatagaattcgacgcaattagaattaaacgattttaaaattagacactctgtccgtgccctcgtcgtcgtcgtcggccaatgaccccggcgccgaccgtggctcccccagtgatttggtgcgtcccaacgagcgcaatgagtacgacgtggcggagggactttccgccgcttgtttccgtgttgtcatggtaaacggagacggctttatagccccgatttgttacgcttgactcgcttttcaaggacttttaccaccgtggctttatgcacgtgccccagtccatttctgtggccgaacttcgcgaggtttgccatttgtatgggaagggccctaaaaatggcattttttgtttgattgagtatcctcactcactcaggaattaccctattgtcctaaaactaagatttttgactagcatcatgagtattcgatggaaaatttgattcggaggataattttcttggcattttgccgctgtcgcaataattacacttttttgcttccttaggcatgtgactatctgttggtgccgttcaatgtacacaatgtgaagtgccaagacctgcgcggtttgctgcacgagctgagcaatgagggggcccgggcacaattcgttgtgtatctggaggacatcattctgccacaattggtcatcagtgccgaggcaagttgtccgtgtccaactccgaggggtcaatatgtctccatgccatgctcaaagaaatttcagaggatgcctagaaatatgaagtcctttttctttccatagttagactcggttagttttttgtaaattttgacccagaaatacctaaccatttgagcagttttgggcatgtttccgagattaacgaaatgaggagggcgaattcaagtctttgttttttggtgtcaaaatctacgacgaaacgaagggcttttttgctccttggtccaaaatttttctcaaaaatttttcgtatcacgggagaaaaaaagaacacatttttcgcatatttatattcaataaatggggccatttttattaaaatttttaatattttaaagagttaaggagtccggtgctgcgtgccgattagcaaattttatatgattttaggaaatgtgttttgaaattgatgcaattcactcccccctcccccttggacattcacctgcccattgcaacaactttttacgtactttttctttcctttcagcgtggtgagcgtgagtgtcacattgtggtgttgctggacgaggacgtggtcgactgggacgaggagtacccgccacagatgggcgaagacgtgacccaagtggtgtacaggtaaacgccgagcgcggggcaccacccaatttgttattttactacactcgtgattatggattttcatttcgcaaaaaaaatccctgcatttgtagcactttccgattgcaccccaaaaaaccgtaaactttacatgaaaattttactaaaataaaatttttcgtgaaaaatggttatgaaccgaaaagtcatgtatttttggcactatgaaacaacaaattattaaaaaaaacattttttttattacgatattacagtacgccgctctacaaattcttcaaatatgccgaaaaccgcgatgtggccaagcgcgtgatgaaggaccgcgagctgaagaagatccggcttggcatcgaaggcgtaaaattttgttaaaacaaaaaaattcccgcgaaaactcttttttcccttgctgtaatacagtacccgacgcacaaggagaaaatcaagcggcgcttcaaccgttccgaagttgtttacaactatgtgcagcgtccatgtacgttttctggacggtgtaaaaattatttttgaattgttgcacttttttattggtgcatattttca

SEQ ID NO: 11418 - DNA, 1392 bp, Heterodera glycines
atgttattttcctgaatttttcgttgaaaaaatatttttctccaattttttgaattttcggtgggaaaaaaataaacaaattaattgactcttaacacggagactgaacttgttaataaattatgattttttatttcccaaaaaagtgacgggtctgtatttttccccttaaattttacattttttacaattcgctttttttaaattgcccctcccctccctttgccaatgtcagtcctccactgctcctgggagaaggaggaggcgcgttcccgccacgtggactttgcctgcccaattgtgaagagcaagtccaacccgagtttggcttccgccgcctccgaccctttgccgcaggtgccattttcagaggagacaattttttttgaaatctgtgccgttttcttacaattttcaaaaaagtgatttatcgcttttaaaagtaaattcaacaaagcatttgagtgctttttaagcctgcgccgttgcaaaacaacatcaacaatgggtgggcggcggagaatggtgccggcgaacattcggccaatttccagcaacggccgacgaatgacaacgacgggagcagcggaaatgagaatgaggccgttcaccacccaccaccgccctcctcctcctcacagcaccaccaccattcccaacaaccgttgttcctcaatgtcggctcggcaccacccaactacggtcacaacggcaacagtaacaacattggcacaacgccgcagcaactaccgtaccatttgatcaataatggggcaggcggcacacagacgacggtgagtgtgctgaagtgatggggaccgggacaccactggaacgacgcggattttccgggatatataaaagcgaattccaccggaatttttaacaaattaaaggagccggtggggtataattcccccccccccctccaattttgagttaggattcagccaattatgctgtttcttgcatttttaagcgtcaaccattgcgctctccgcccgcaaacgtgcagaattcggcagcggatgattgaggcttaatggtttctgatgatatttttcaatttccactcttctgtctcattttgttcctttgacgcatttattttctatgcattcgtaaattgaaatttgtcataaatgaagcaaaagccattgaaggcatgttccgcgtattgatgggccaataattaagcataataatactggatggttgactaattagccgaataattaaacataatggaatggaatgcgctcgcagatcacccggaacagaacgcaggagaaaacaattttctattttatggtaatccttcagaattgcggtcccgacgaaaaattaattaaaaaattttttttttagttttttctagggtgaaaaatgtgc

SEQ ID NO: 11419 - DNA, 1052 bp, Heterodera glycines
cgccctagaaaaaactaaaataaaattttttaattaatttttcgtcgggaccgcaattctgaaggattacctattttatttcatactttgtttacactttttgaaataaagtgagagtgatcattttgtgacttttgaaaacaaaaaaaatcaaaaaatggaagggggagcaaagcacgctattaccattgttcgatctggtgcgtgatatgaatcactatttcccattttggtatcttttccgtatgtatttaaatgcatttgtaattgaaacttatcaaaagaaaaagcatggataaaatgaattttcttttcgaaaaaataataaagtaaaatacgtacaggttaaatgtttaagaaattaagattaagcagaagattgatcatcggcacttttctccgtttttcgtttaatcgctttcactttcttcctcgaattttccgttgaatgctccccattcgccatttcgtccaacccaaccttccaaatctgatcatccgccgaattccaatggaaagactaaatcaataaccaaaatcactgccagcgtagtggaccgattagagtacgctacactcccccgtgtcgtctctcttcccccgaaaaaaaggagttaattttttaacaaaaaaactaaaaatttctaggaaaaaatagaaaaattttaatagccaatttgcgtcgctgatgggggcggctactgggccccataaaagcaaaccctgaccagcataaaccggtacccatcattttatacattaattcgtgaatttaaaaaaattgaaaaattttatgtttggcttgaatctggctggatccatgcttggatttcgtaggtcagtacccaggccatttttggcaaccgggattttatccagaaatccaggaccatgccttttttaaaatgcacaatgttcatgacatatgttaagttttcgcaataattttgctgtccgaagatttgatcaaacaaaaaaagatatttttacaaaaaaaaaattatttttaactaattaaacggacgaagatgatttaaaaatatctcccgacc

SEQ ID NO: 11420 - DNA, 1874 bp, Heterodera glycines
  unsure (1)..(1874): unsure at all n locations
agcagatttgattgaaaataactgctaaattctggatccgacaataaaaaagtgcccttccggctcaccaatggcgtgccgtccagacgggcacgtgaaatgcgaacaaatgttgctgtttcatgattggcacattcaaacgcgccaaatgtgccgggtgtggcgagtgccaaaagcactgcaacaaatggcaccagcgcaatcggtgccggaggggacaaatgccgaggacgacggactggtgccgatgatgtgggtggtagtggtgccgaacacgacaatgttctgttgttggcacgacgcattttcccggattgagagaaattattcggcgcgacctttcgagggcataaaattgtcgatgaatttaattagacaagaatttcggggataaaatgggtacaagaataccatgggatttgaaaacggaaaattcgctggccgcggcacgtcaaatgagagaaatagtaggcaaaaaaaaaggagggattgatctgacttgcactaggggttgtcccaaacgaagcatcattatcactaataatggatgcgcgaatttatgtgtcaagggaaaaccctcctcccggaaaatggggtcgagtaaaactctatactgtaacatctgtacagtattattgaccagttctggttggtctacacttcaatgaagggtaaacccctgcctgaatcgggaacatcccgatttattgagtcccaatcccgattctcgacataaatcccgaatccatgtcatagtgccggaggcttaaaactcgcctcgcacattcacaaacgaatgttgtgcaaacggttttccgtaatgggataagacggtggaaggggaaggaagaggaggaggaggcgaaggaatgggaacacagcacaaccagagcaaaggaagacggaggatgatgatggtatggctgtgaccgcaacggaatggaaggggggggggaagaatttgggtcataaacccccgaggggttctcatgcccaacggggcgggagggggtgggggaggaggtgtttcgcagcagtaagtggataataccgccttcggaagacactttgtgtgttatagagagatgctcatccgactatctcgaatttacaccgctattttggcgggatttacgcgaaacttcgtaaaaaactggcacatttgccctaaggccacatgattttcgagtgtcgagaatgggtgggtcaagaggcgggagacaatgaattagctagcattatattatgatcattattgcctccttcatgatttacgctcttgaaagcaccaaactagatacaaaaacgtgatgcgtgttactctcttctttttactattgtcccacgcaaccctctatcttattggctaatttatattcttattaataatatattatttaaataagttacttgtataatatcaactttacaatttaataaaaccgaaacaatgtataaatatgtttataagatatatattttcgttcatcacttataccaaaattaactatattaattagattcattaaatgtatatttaatttttttcatttctcgaacaatacacaaggagctgtgcactctaacagtggcgtgaacacaaaataaaatcaacaatttaaaataacatattaacagtagtcaaaactcccataaatatgcgtcaaatcgcaattctgatttttttaaaccatttattattgtataggaattaattttgtgttatttttttaaaatctttactcctgntcctaattgattaaaacactaaaattagtcacaagtcattggaacaccaaaacgtgttcagttgtcccgatacggcaataaaaaattctatttggaagattttaaattttccgtttttatactcc

SEQ ID NO: 11421 - DNA, 1820 bp, Heterodera glycines
  unsure (1)..(1820): unsure at all n locations
tgtagctgcactttcttgcactgctttgggtccaattcaaaattcaaaaatttttntaatagactgaaatntaaaaaataaataaattcgtgcttttcgcatttttccatcccgatcaaaaagacaaggaaaattttgaaaatcattcccttgcagaattttctgtttcattctcgagacgtgtccaattaggtgaaaagtcaaattttcaacggcacaaattaaattaaattacttttattcgtttttatgtataaaaaatccacgtccaaaaaaggtaagcaaaacaaatgtgtatataacacagagaagtgcgcaatttgatcaaacatgagaagtacacacaatagacgggggacgtgtgccacaaaattggccgtacaaaagttgtgaaaaaatcgcgggaatttttgagaaattttaaggcttatgttagccaaagagatccggatttcagctgttgaaactcccaaaacttcccacaaaagttcacaacaaaatgagatggtcaaacggtaagagaatacagtaggaacaataagtatatgtaaaacaaatttaattttgtatttacgttacggtatcaccgacccctccgactgtggaatgggcaattattaatttacacacaaaaaacattgggctcataatttaaatgcctctaacacgaggcttacaactagcagcaatagcttttgtgaacatagcggtgccaaaataattcagaaaattttttcaaagtacgacccctgcggcgttccattttttgtcctcagtccacaaaaccataataaacaaaaagcttctgtaaaaacaatactttatatgtgatcgataggcggggcgacacagaaaattaactctttttaaaataaatattccaatacaataaaattttgttgcagcacaaaacagaacaaaacataaacccataaacggggaggaggggaagcatggcgacggcatatttaacgaacaaacaaaaaaatgatggcattttatgagaagtgagaggggcgggcatttatatgtgtaaaatgtggggtgatcaattttgttgttgtttttgtacgagcagttcagcagaagcacacatatatttatatagagaggaaggaaagtaggcagctttttgaggtaaaaatgtgtagtcgtcaattgaaatggtcggatgatgatgatcagcgtccaaaatcgtgagaagaaatgatccgatcagatcagcagagagtgcagtcagagcaggccgatcagtcgcaaattctccttgacgatgatgtccgtgacggcgtcaaagacgaacctgagcaagggggtgggaaatgtggacgatttgggaaataatctgttgcaataaaacacaaatgaaataaaaataaagagtgaaattgggccgggccaagaaaccgagacttttctctggccaaaacccagcagcaggattaagcatatggctactgtttttagattgtgggtcgagaaatgttcgaaatgaaaaaaatggcattttttgtacgaaatgccagtggtccatctgtttgcaacggtagaatatgggaaaagcatgaaagtgctgaattccttgtgtaacaatcccacaaaatatgtcggactaatattcgagttttaagcaaaagcatttcactcggctgaaactaaagcgagagaatggtcgtatttgacagcaagagacagagacccgaaattgttattattacgtctttccaaaatcccccccctttcataatataagggataggatagataaaaagcggaaaagcaaagacagagcgttcacaaacagacagacatttaattaa

SEQ ID NO: 11422 - DNA, 1876 bp, Heterodera glycines
ggcatcattatcatcatcattagcaacaaaatgccaacaacaatgaacaatcgtcatcagcggcaccaataaaaaagcgagaagcatgcattcaaaacagcaggccacactggcgcaggttctccttcacaatgatgtcggtgaccgcgtcgaacacaaacctgatgtgttggtgtcggtggcgcaggtgaagtgcgtgtagatttccttctgcccgtccttccgcttgttcaacgactcgaactggtactgaatgtaggtggccgcctcctcgtaagtgtttgagcctgggggtgaaacaacaaataaataaaaatccagacgaattaccctattttttaattataaaataagaaggacaaattttttgaattctataaaaattttttgcttaattttatttacaaagagttttccccgagtccctacattttttgcttaaatttgacccaaaaatcgttcaaactgagcattcttgagtttaaatgtctgctaatgagttcactgaaatgccgcctaattaattgcaaatctgaagtctcttttttcttttctttttttttgctcttcgagctaaaacttttttcttcagttttattgttcgaaagttcagcgcgggaagaaaacctaggtattttttaaactaattttggttgaaaaaggaaattttggtgcttgatgcctgtctcaccggtgtattcggggaagcacagcgtgagcggtgacctgcgaattttctcctcaaacaggtccttcttgttcaggaacaaaatgatggacgtgttcagaaaccatttgttgttgcagatggagtcgaacaacttcatgctttcaatcatccgattcttggcgggacaaaaaggagtcaaaaaaaatttaaaaaatttccaaaaaatttgctaccatttcgtcatcctccgccaacaccatgtcatattcggagagtgccacacagaaaatgatcgccgtgacgccctcaaagcagtgaatccacttcttccgctcacttctctgccctccgacgtcgaacattctgccaaaaaaggaggcatttattttttatggcgacaaaatttttgaaacaatttagggctataattttggatatgtttaaaaaatccattccaggcccgtaaccatgggagattggttggtaattacttgtccgaaccgtggactgaaaagcctataaaaatagggggtgaaacagcgaaaaatttacgtcgatcgtcgaaatggaaagttttttcacatttaaaatttcccaatagaattaattgacaatagacaattttcctacagcgaaccgtatttagaatacaatgaaatttgttagaaaaatggaaaatttacagtccattgtaaaatgaatgcaaggaatcaaaatgaaaaaaccacgatttaaaaataaaattttgcgcccacttgaaattgagatccttataagtgaaatgcgtctccacaatgcccgtcgttttgacccgtgtgcggagtacgtcgtcctgcgtcggcacatagccgggctgtgcaacccggtccaacgagttcaagtagtaggcagccgagtcgttcagttggtactcacgcgagcgctcaaagcactcctggacgcctgtgtcggcccacaaatgtttcatcacggaggccaactccaatggcagttcacctgtgtgtgtttatttaatgaatatgttgttggcggaaaaaatttgccattttggtgtttacacttttataggttaggggttgacaaaaaatctgttagattagggatgaaaaacccaaatggaggagaggacaatttgcaacaaaaagaaaaaatttgaagctaataagaattatatacacattttaaaaattacttatcatgaaaata

SEQ ID NO: 11423 - DNA, 1947 bp, Heterodera glycines
  unsure (1)..(1947): unsure at all n locations
ggatgccaaagaaaaaagttatagcgaaaacctataaaggggngaaaancngcncacaganaaccgacaagnacctttaaaacgnccatnngncgncngaaanngnngaaanaancccnaaaacnngggananccnnnnnnancnccactcttanaaggcnnagaanccaaagggncgaaaancngcgagnngccaaggggaaagaagcgcaacagcaaacggccgaacnngcngagcaggaaggggccgangancagaaaaaggcgcagcaaaaggacccancccgcgcnncggcncccaaacggagggaangggccaagaaangggagncaaagggnaannaccnaannaggaannaagcacacagnaannaaacnaanaaannnccaggganacggnacgnnagncaccanaaacaanngaagaaggcnnngngnggccaaaaaaagagcggcaaaannggacccacggagaannnngnccnnnncagcaacaaaccggannccncgcccgacacnnngaagcagnnnnnggnaaaaccaannnnaaaaggcnaccgnanccnaannannnanagnnggcncnncacaannngnncaaattggccgaagcgcgcaagaattgtttgttcgtcgttttggagctgttttcggacgggcacaaaaagacgcaaatgccgaaagtgatcagcaattcgttagatgttttcccactgatcggcgcgcaactgatcaaaatgagcggtgatcaattggtgacagacgattgggttgccaaagagacgcaaacgttgggcgtgtgcactgcgcgggtgggtgaaaaaacatttgggcatttttgtaaattccgattttaaatattaccatttcagtcctctgactctgaaaagatcccttctgctgctgaccaacttttatggcccggtcatttgccgtgtccttgtgccaaaaaattcggcggcaaatgcccaaacggcgaccatttttgggggtgtgagcaatgcggacagactttaaaatttgcgaaacagaagaatgacgacatggaacagaaagtgagaaagtgccgtcagcatataagcgccaaatgaaccgaaaattatcacaaaatttggccgttttaaatttataatggccaattgaaatggccgtttctttcgtttttgaatcgcttttatgccattcactttcatttgatcatttgcccccctccaacaggctccgatcagtcatttgttctgcgactgcggtggcactcgtgtcgatcacttgactttccgttgcgccttttttgctgaccatggcgaccaattccatgcgtttacatcactcgattttctgaacagagaattggagcggcagagcacaaaggacatagtgaagaaccttttgctgctgggcaaaacgggcaacggcaaatcgacactgatcaacgcgatgcatttttatgcccaatttgacacatttgaagacgcattacaggtgagtagtgattgctgattattgcaatacaatgatatagaaaaacaaagttatgctagggctatcaattttatgtaaatacatattttttcctggctttttagtaggaaaaacactttgtttttttgggtttgcgaacggaaattttttggaaatcctcaaaaaaaatcaaaaattttggcaaattttcgcacatattttcatttttttaatgttttagtatttttgaaaatttagtgatttttttttttgaaatgtacacttgagatataccaaaaagtaattttttaagtgctaaaatgtgattctaagctatttaggttatttttgtggcattttgtgccctaccgtatatgctctaattatagcccagtctctattaatcccgcagtctcaattatcccccagtctacgaggtgtttttgaaaataatccctctatcataatcccccagtctctaattat

SEQ ID NO: 11424 - DNA, 975 bp, Heterodera glycines
gacacgcgtggcaccgaaatggacaaccaaaacatggccaacacgttcggctttctccgtggctatgatgcgttgcacggcgtcggcattgtgctgaaagagaacgacaaccgtgccgacgcttccttcaattactgcatcaacggccttctgagcaatctgcacaaaaatgtggcacaggtgtgcttttggcacaaagaccgaaactttaaattttcgagttacgcatttttggttcaaaaccggcttaaatactagtacaaggaacccattgaaagtcatcaatgtttcaataaaaaatttcattttagagcaaaaatttgaaaaatgcctgcttcttagtcgattttgtttaaaatgatcaatttttatgatttatttctcttttgccggcggcaacaatcccaccccttccctcttttttcatgtaccttttctcaattttgcagaacatcgtttttctgatcacccattcgtcgggctcgggaaaaacaattgccctgttgcgcaggctgctgaaaccaattgaagaaaaggccggcgtaagtatttaatgttcttacggctgctgtttttaaatgcccatggagctacggcaagatttttgatggacttttaccaaaaacagtaaaattacactatttttgtcacagcaattactcattatccggcttcatcccttgttatccaggtgaaaattccattgaacgaaagcaacgtgttctcctttgacaatgccccgtttgaagcgctttgtttgatcaaagcgatgggtgtcgaatatgacgtggaggaaatggaagaattatccagaaaatggaccaaatcagtgcagcaattcaaacggttgttgaagcatttggccactgtgaagccccatttgactcgggaaacgttgtcggtgtatgccgcgcgttgtgccattgccgacattatgccaatcattgcatcaaacggggagcaaattcaagtgaa

SEQ ID NO: 11425 - DNA, 2314 bp, Heterodera glycines
  unsure (1)..(2314): unsure at all n locations
tgcaatacgacgggaggcgaaattcccancnggaagctcagatggtgcaaggcgtttagaaacagagacagatnacagaaaggcgctttttgttttggtcgtggattgttgatggtgaaccgggtgaaaattgcaaggtgtgaaattttgggagacgcttccgaattttttacacctcgaaaattgntgcttcttctgacatgcattttttcttagagaattttctataaaatttttttttttgcttttttcttgaacaatttctaagttagtagatttttttaatcaaaatttttcggcggggggtggggacgatgcgtgtccagacatttgcggcccgacttttgcggccccgacatttgcggctatgtctaaaatcgggttcaaatctgagttttttcaatccctaatagcctaaataacattaattaaatgataggaagagattgtgtcggataattaaatcaaaattcaactttgagtccgattttggacataggcgcaaatgtcggggctccgaacgattaggggggaatgatacggggaggggaacaagctgatcccgatatgcacaacaccagtctaaaacaaccaaaagaactgagaaaattatgataaaggcgaaaaattaaaattgtaaatttcaagcattgcaaatgcagctataaagagcatatgatcgtggacactgaacaagtcgtgaaaaagaatgttgtggccgactcggctttgttggcacggatcagcgaaaagcgcaaggaactgagcacgaaagaggcattcaaacagcaactgattgaggaacgcgacttttgcttcaaagaggcgggtgtcatcaaagggggagagagtgcgggaaaacacgggctttatttagctaaattttaagattttcactggtaccccctccaagacctacctcactaaataaaattcatcgcgaaatttttctgaaaatccacaaaattttacaattttttgtggaaaacaaaaatggtatgaaaaaaaggtcgtcgacctccctcaaaacgtaatcctaggagtatccctgtccaacccccttctataccgaatactttttttaaaatttttcggaaaattatttcagccggccaaatggttctcctttctgaagtcgtcggctatgaaagcatacaacgacaacatggagagatacatcgaattagcaattcaagacgcagagctgagagagacttccaacgaaggccaatcgaactacgaggagcaaaaaaagaggaccgacgggacccgagtcggttcatcagtttagggcagaaaaagcatggacgaacctcacatctggcataaaaaaatagttgcagggttttgttttagggaaaaaaagttttcctgaagagatgatgaaaaaattaaaaattcaaacaatttctttttgaatatcacaccgttttaaacaactttggcatttttcctccggctttaccacattttttgtaggcaaattagtgacgaaatatcaataccatacaattttttcagaaattgttggagttttaccgcaaagagcgcgacatgttcacagagggactggagaaggcttccgtcaacgtggaggagttcaaatttccgaccgaaaatgttgaacaaatttttgacggacttttcgcattggaaatcaccggcaaacaaatgaaggccaattacgaaactacgaaggaggcgcagcgagagcatcagaagcaatccaatgccgaagcaatgcgcgcacaaaatttggtcaaggcaaagccaacgaaatgccaaagtggtgggttggcgtggcgagagtcttgaggccggatttatagttgtgcccgagactgtttgtactttcatttaattctcgaagaagtttgcagtgccgttcaatgaattatttaatttgctattttattttaattgctttcatcatttagcgtacaaccaaaaggcgattcagtgctatttggacgaaatgactgagaaaggccaacaacagttgggccagggttggaaagcggacggaagtgccgagtgggtggataaaataaaatttgcgaaatatttttattgtttttccagggcatcgtccaatgttgacatgactgatggaggggaaagcgaaggtgagaaaaagggggcattggtaaattaaaatgcaaatggcacagagaatgtgtgccgtaagaaatcggaaaacggactcaaagaattccttaacttaaaactagggtaggtcgggactgggaattttgggcaaagccgggaccgagacatttcgagttgaaaaaccgggactttttggctgggaaaa

SEQ ID NO: 11426 - DNA, 3054 bp, Heterodera glycines
  unsure (1)..(3054): unsure at all n locations
ctcgcatggctgccactgggtggcctaatttttcattttatacntcagcttctcttcatattcattcacanncaaataattaactcccatggctggccaacttgatggcattacttttcattttntattacntctcattaagtcttattgctgccgccacttttattttcctcgtcgttgtaattaatttcttatttataactcgcncagccggagggaatgaaaattattattcttgacggttgctgtttgaaaaaatttcctatttgtttcagattttgttttttatagatttgtcatctgctgctgacagaaatcctcaagagtcggcatgtttacgcattggaaaatttgggaatgtttgatcgacaacatagtggtacagcttaaatattcgtgaaaattcagggattttcgtgtaaaagttcttttttaatttatcaagtaaattaatttgaatactattttaaaaattagaaaaataaatggaaatgttttttacaaattttcgggaatcataaatggtaaattttaaaaattgcagttaaattcatcaataaatgaattgtttttcataaaagtaaaagctaacagaattctgaaattaaaaaaatttaaatctcattaaagacaccaacaccgatttggagtgcaattttgctcatttttcaacactgagtaaaaagtaaaaatgattttttaatgtcttttagttcatttttttatgcttttctgctttcatttttgcattattttttttcttctttcaaacgaataattttttagttagttttagtattttaaggtgaaattaatttaaataaataattgaataattaattaaaattactttggtcagatcaaacaattttttctgaggtgcattattctcttcatcagcagcaaatcttgaataattgaattgcattttttggttattctgcagaaattcactgacaatgcttctccatttgacgatataatcctaaataataatcattaattaattacaccatttagacattttaattggcagccacctgttccatgcctatccgttcctcaaccagtgccatttccccagtttcgtctcgcccactctccggcatccaaatccaccaagttttcggcttcaatggaacgatgccaaagtctcccggcacaaaatcgtccgttttgtacatgccattgaactggttcaacttggagaagcccatctttgccataaattccatgtccaaacggcgctttggctcccaattgtccatgggatgtttgttgttgaacaacattcggtagagcagcaaaccgacgaatcacaccaagtctttccccaatgttgtgcttctgttatcctgaattttatttaatttatgaatatttatttgatttggataattaaatgggttatgatttgttctgggctcataaacagcacatctttcagccaattcatctgctttttttgtctctattctgatgggagtgtcctttcccttgggtctttgaccttttccaccatttcgttaaattcaattttcaaatttcccgctaattgttcgtcgtcaaatcaaattcattttggcgaatcaccgaaaaatgatcaaatgtcaaaatgccatcaaaaattggctcattagaattctgctgcttttttatggaccaattttgtgaggtcaaaacggcaaaaatcaaattcagtgcaatttttgcgattgttttcgatgacactttgtgataaaagccgtgataagccacaacagcggccaaatattcgttgagagggcatttgaactgtggcgttttgtccacccaattcattttccaaatttatttttggtttaataattttcttttcaattgcttctaccgattttttaggcgctgatttttagaaaaatatttttgagttaaaattattacaaaattctcaacttaaatatgccattttatttgtttgcccttactaattcgtcatggattaagttggatgatgcaaatcttaacaactaattttgcaatttcaaacaattcatttttttatttttaatcattaaaataaaaaaaatgcaaaaaccataagattattttccataagaatgattttcaagataataatgaagaaattcataaaacaccaattaaattacgaatttaattattgtttgggcgctaacataagattattttccattatgatcttattctgcacaattcatgatgatggagtttttttgggtacttttcgttatgcgtacacagggccaaattttaaaaaaatgcaacaaaggagcgacgtttgccttcgcacataaaaagctaaacaatgatgaatataaattaataaacattagtaaataaaataaatttaattaaaaacataattaatttttacatgtttctgttttggtagcaccgcaggtggccggccacgcattgttagagacggaggcgagcattaattaatgttaattgcactctcattagcgataataatggcagttcattacatggcctatttccaaggacatccttggaaatacaaaggactatttcctcccaatcccacaacccaatttaaatacttgaatactgatttaaatcattgatttcacttcaaaggcaatgaagctacttctggatgagcttgtgccaatttgtgctgtaccaaatttgccggaagcagccaaattgcttggcaaaaacaagccaatgatgaaggcgaaatgcttaaacaatgccactaattgggcaaattcggagctaaaacagttttgttgaaatgcataattaggtttttaattaatctatttgattaatttttcaggtggacatttgacgaacagtgatcaaagcacggacattttgttcgaattggatggtgccgaaaacttttttcgcgaaaacatttaatgctaatgccaaaattgcacacggcaccggttgtcgcttgtcatctgcaatggccgtgtatttggcccgaggacataccgtaactgaggcagtacagtatgcgaagagttttgttgaataacatattggctactgttgagc

SEQ ID NO: 11427 - DNA, 1076 bp, Heterodera glycines
ttaagaagtgatcgatcaatttgaattgcggtgttggataattaatttgacgtttataaaactgttctttttgttgcggtgatcactaattgtattatatatatatgtgtgtatatatgcctctaggataaattaagagatttctgaaattccaggctcattcttttgggtcggggtcgttttcgtacgagcccaagtttttggctataacttttaaaaaattaatttgactaaaaatttatttcaaaaaatcactaaaaaacattcgctattcctcgattttgaatgtttaaaattcattgttcgcaattttttattttcgtactaagattccggcaatagtcagaagtttgtttcccccattttttttagaaaaaaacataaattgaaaagcactgtaaatgcccgaaatgctaaagctaagatttgacatgacataatactttttaaaaattgacgattgaggtgctactaaattgttaacatatcttttatttcagcagaaaaccacaaaatatcataatggcataacacaaatccaaattgatcagtccaatggaaaaaggataatttttatgtgcgcatcaataattccataattcaaattgatcggatcacttctccacaattcatccatttattcacttctactgctgctgatcacttgggccgggaatttcgtcgagaagtctaaaaatagttaaatacaataaatttgaaatttttgaaaatcgctgacccgtcaccgacgtgatcatcactataaatttcaatgtcaattctgttccactgataataatgatgccaataaatcgcctcctcttcctcttcccattttgtccatttgctttcgtctcgcgcaattggacaacggaccaacagaaaacagtcgtgatagtcagcagttcttttcaatgccaattgttcacgggtcaattcattggttagcgcaaatggcacaacggcgtcagcgaaagacggcggaaatcgaatgacaatgatgaaattgacgggagatgaagcattggaaaaatgcctaaaaatggggggacaaatgaaagtgccaaataaatcaa

SEQ ID NO: 11428 - DNA, 5040 bp, Heterodera glycines
taggataaattaagagtttttttgaaattccaggttcattcttttgggtcggggtcgttttgttccgagcccaagtttttggctataacttttaaaaaattaatttgactttaaaaaatttttttaaaaaaatcactaaaaaacatctcgctattcctcgatttttgcatgattttaaaattcattgttcgcaattttttattttcgaaactaagtgttcggtaatagtcagaagtttgtttcccccattttttttagaaaaaacataaattgaaaagcactgtaaatgcccgaaatgctaaagctaagatttgacatgacataatactttttaaaaaattgacgattgaggtgctactaaattgttaacatatcttttatttcagcagaaaaccacaaaatatcataatggcataacacaaatccaaattgatcagtccaatggaaaaaggacaatttttatgagcacatcaataatttacttaattcaaattgatcggatcacttctccacaattcatccatttattcacttctactgctgctgatcacttgggccgggagtttcatcaagaagactaaaaaatagttaaatacaataaatttggtggaatttttaaaaatcgctgacccgtcaccgacgtgatcatcactataaatttcaatgtcaattctgttccactggtaataatgatgccaataaatcgcctcctcttcctcttcccattttgtccatttgctttcgtctcgcgcaattggacaacggaccaacagaaaacagtcgtgaaagtcagcagttcttttcaatgccaattgttcacaggtcaattcattggtcagcgcaaatggcacaacggaggaagcaaaaggcaaaggaaatcgaatgacaatgatgaaattgacgggagatgaagcattggcaaatgcctaaaaatggggggacaattgaaagtgccaaataaatcaattcaaaatcaccgctttgaagtcttcaatgtcctccgatgccaaaaacgcatcattcatgtccaacggacttctcaacacctttggcacattgttatgaagcggagtgaaaagccatttggccaacgcttgcccattcgatgccatggcattgtcatcggccggaaattcggggaagagatcggcagtggcataaaatgtgacaatgcgtaacaacggacattcgttgagaaatgacgggacgatttgtcgcaaacgatggaaacttgtggtagacaattccaagccatgaatgttttgtccgagcattggccaaatgttgcgaaaaatggagtccaaaatgcgatcactcgtcgcatcgaatggcttcgaatccgacgactttctttggcaacggctttagcggaattggcatcaatttccaatcagaattgaaaatttccatttcatttgatgcgccatgctcttcaaatttgcgcccaatttccatgaagttcaacgtccattttcgagttttgaagtgttcatcgatgtaatagtcaaaacggtggctgatcagtgcaattccgaggccaagttgtgacggctcaagcaaatcgaagacacaaagccaacagtcagcagaaataaaactaaaaaattaaattaaattttcaatttggaaatttattttttatttttacattttattttttggttttttgagacggtcccaataaatccaaagaatggcacaaccgccgacaaacattggcacaccgaagagactaaaaaatgagatggaaaagagtaaatgttgagaagaaatgcgaaaaacgtacagaatcatttttgaagacattttcagggagaaaaagtcggagagagagagagacgaaaacaaataaatggcgaatgaataataatggaaggtagaggaagagcagcaaccacttttatacgaatttattggttcatttgtacggttttccattttctaaatttttagtaattatataacgctctctcccctcccccattttcttccattcactcacttttccttaaaaaacatgaattttactacgcaaatggtgtggcggggggttgggacagcaaattgatcggtctcttctcaacaattcatttcattcacttctgctgctgatcacttgggccgggagttgaatcaagaagcctaaaaattgaaaaagcaatgaccttgaataggaggcattcattcacttaccaatcgccgatgtaattctcagtataaatacgaatgtcaattatgttccattgatcatcaatttgccagttaatcgcttccttttcccattttgtccatttgctttcgtctcgcgcaattggacaacggatcagcagaaaatggcaagcaccgctttaaatgatgcaattttcgacgtccaattctcatcataatctatgtacaacgagaatttgtacatctttggcacattgttttgaagtggagtgaaaagccatttggccaccgcttgtccattcgaagcattggcattgtcattggccggaaattcggtgaagaaaccgccataatagaaggagacaaagcaaagtgatggacattcattaagcaatgacgggacgaattgacgcaaacggcggaaaaaggtggtgttaattgggcaatttgtggcaaaaagttgggcaaaacggtggagaaaagcgatgacattttggtcgatgtatctgtaaaattaaggaatcgttttacaaacaaaaaacattcatttcattcacttcattgaaatggaatcgccaaatttacttgatctcgatgcattcgaatccgatgactttgcgtggcatttgaatttgcggaattggcaaaagtttccaatagtgattgaaaatattcatttccttggtgccatcctttccatttttgctatgaattcgaataagtgccaatgtccatttgcgagttttgaagtgttcgtccacataatagtcaaatcggtggctgatcatcgcaattccaaggccaagttgacgcgggggaagcaattcgaagacacaaagtgatagccaaattaattggacagaatgaggctaggcttataaattgtataattttgcaaaaatatccaaatgagtaagcggcttttgtccttcgtttggattcttttatttgaataaatttgatattattaaaaaattttctgcgcatttgccatgatgaagaaagggaaattatttgatttggtgaaggcttttttagttcatataaatgtatattttgcatggaattttagagttgagcgggaccgggaattttgggcaaaaccgggacctaatcggattgaaaaaccgggaatttcccggtcccggtcaaaaccgggaccttggtactcagttgttcgtattttggtcccggtcaactatagttcattttcttctttgtttgtgataatggataactgagtcccgattaaaaatggacacttcagtaccttggattttttggaaatctttcaggaaatcgttaaatttatcctaatgatttacacagacaaaggttgattgatcattccaacaacaaaaaaggaacatttttcatgagcacgtcaacaattaaatcattcaaattgatcggtctcttctcaacaattcatttcattcacttctgctgctgatcacttgcgccgggaatttcatcgagaagcctaaaaatagaaacacattaaatcctaaataatttattcattcactgacccgtcgccgaccttatcgccaaaaacttcaatgtaaatttcgttccactgatcagaatcttcccaatcaatcgcttccttctcccattttgtccatttgctttcgtctcgcgcaattggacaacggaccaacacaaaacagtcgtgatagtcagcagttcttttcaatgccaattgttcacgggtcaattcgttgatcagcgcaaatggcacagcagaggaagcaaaagaaaaccaaaagacgacaatgaaattggcaggagatgaagcattggcaaaagtctgaaaggtggaaaaattgatgaagaaataaacgcatttttcggtttggggagggcggcacaaaaaatcaaagatggcattttacagtttagatggtccgttggatgcccaataaatcgtgaaaatgtcaaataaatctattattagtaatcaccgctttgaaggcttcaatcctcgacaccaaaattgcagcatccgtgtccaaatagcatttgagcacttttggcacattgttttgaagcggagtgaaaagccatttggccaacgcttgtccatccgatgccgcggcactgtcatcggccggaaattcggtgaagagataaccgtcataaaaaatgacaaaacgaagtgatggacattcgttaagaactgatggcgccatttgtcgcaaatgatggaaatgtgtggcggtaatttcaatgctatgaatttttttcccgagcactggccaaatgttgcgcaaaatgagtttcgagatgcaattgcgatcactgtccgtgttgatgcacaaaatgatttgacaagcggcaaaaagaggacgaaaatggtgaagaaaagtgatgacatttcggtccatgaaactgaaaatgaatgggagatgttgcctaaaaacttttacatttggccatatcttacaagatgttgatccgtttgaatccgatgattttttttggcaacggtttttgcggaattggcaatggaattcctccatcggaactgacaatttccatttgcttggtgccattttctccaattttgcctccaaattgaacagttccgaatgtccatttgcgcgttttgaaatgttcgtccacgtaaaagtcgaatcggtggctgatcattgaaatgccaaggccaagttgcgaaggcttaagcaaatcgaagacacaaagccaacaatcggcggagatgaaactgaaaaaagggaaaacaaaattgaaattggcattttaattttaaattttacattgcttttgccagtttttcctccgcttcttttcggcggtctgacatctaggagggcaaattaacaagacagtttttgacacttttcagtt

SEQ ID NO: 11429 - DNA, 1246 bp, Heterodera glycines
aaagtattggtataacagtttgtttcattcagtgcctttgacattttcgtgcgctttgtcggagaggcacacccagcgttgcgcttaaagaaactgatcgaacttaagcgatttgatgacgcattggcattcgcaaagtcatacaaccttccggcagatgtaatttaatttaacgcttttttattcttctaatttacatgtttcagtcggtgtacatcgaacttttgttatattatcaagagcaaattcaaaacggaaaggacggcacttatgaggaggaaacgtttaaagaactgttgcagactctgcggatgctaagcgatcacaatactgtaaatttttcttttgtgaactataattgtgtggtttatttttaattttacaggctgctgaccattgtgtagcaattctgaactttgtgaaccgatacgaacacatcaagacgattctggacttcgcaaaggcactcaagataacgggtgctaaattttgacgagtttgtacaatattcctttgcttacagatgagtacacacaaaaggaaattgcccgttttcgttatgaattggcctcctatcgcatgctcttcgaggcccatggtccaagctttgaacgcgactccccatggcctcaatttctgtcgagtggcagtcacaaggagttttttgacgcattttgcgaggccggccaaatgacgcaagcccggcttttgctctcccgctattccaacattgggcaggagttgcaagacgaaaaatcaatgaaaagattgctcacggttttcaaatctactcttataggcatgtgcctctttcaaattttttaaaatttgctttccgttcagaaaaaccgcatatcagtggagcaatcagtgaatttgtggaaattgagttggttccgctgcttttaacctcaaacaatgcgctcaacacgaagatcatctgctccactttctgcgatttcttcgtcgacatttcccttcttctcgaacgacttgagccaaagagtttccctgacgcatcgcttcattttgccgagactttcgaccgcgccatttctttgcttcgcgcagactgtcgtacttcggagaaacacgtcttatttgtctgactttgaattaaatgatcgaaatctcaggtcacttttctgcacattctccgacaattgggcgcgagtgaagagaatggtggcctcctttggcatttgaaacggctcattcgaaactgagaaaactctgcaaatccaca

SEQ ID NO: 11430 - DNA, 3112 bp, Heterodera glycines
  unsure (1)..(3112): unsure at all n locations
gaaaactttgcaaaaatccacacggttttatcaatgtccgatgtcatattctgaattcttggtctgtcttattgtgagaatggtaacaatcattgtttgattgcttttttgttcagaatcatgatgtcaactccatctgccaccgaattatggaccgaatcaggacgacgtcatcagtgcgtgaaattgctgaacaatttgtctttccatacgttgaagagaatggtcttgacaggaacaaagtgctctacgactacataaaggtgtttgttgtcagctcgaatttgctgattaatccgaaaatgttcagcaaattgcgagttcatactattcttccacggctgctggccaggcgcacacttgggatttgctgtgtttgcaaataaccgagctgatcactgatgccaatgttcggtgtcgggcaatcatcgaaattgcgagtggcgctgtgccgccttggtccccacagctttcgaaggtggtcagcggagtcgttgctcagggagacaaaatcgacccgcaactgtacgtcgtttccattcttggatttattttcatttggttttctcctaggataagttcattgcgcaagcagtgcctttacgccgatttgggacaaatcttcatccgatacgaaattttgttgagcaatcgctcgcgcgtaattggcggtgccgggctgcgctcgttgttgcagtacatcttcaaagtcagccgcagggacatggcctccaagttgcaggatgcgttcagagtgcgcaaaatttgacaccctttttccatccttccatacaatttaaggtggttgagctgtacgaggagctccaaacgaagtcactgttttccgccgtcgactgctattaccttttcgctgttgtccttatcaaacaaatgacagatgaaaatgacgtgagcaactttgatgggcgtgtacatcctcaaatatggctgtattcagatgaaatctctcaccgatctgttccaactgatcaaatcttcccaagaggcggagtctgtggcgcagaaactgaccaatcatttgaagtgtcttcttaccccgaccaaaattaaggtctttttttgactcagatgcttgcaattagcaataattagtaattccgctactatcattcgtcccatttgaggctgtcgtcccgcaacgtttggtttggttggcgtgtttgctttgtgtagccgagagatatttgccgccttcgtctgcagtgaagctgattcgcgacgcacgagcaatccgcaaactccaaatagaccaccaaattgtaaaataatttttaatcatttgcaacattttcctaatcccaacaacaagtttgatgattttgatttagctctttggcttttcaacattccgtgaaaaagaccaatgcgtcgtttatctgaggaaattcattgaagcgccaaatgccaagtccattgtcgaagtgcactcttttggcactttgttatgccttgatatcaacgaaatatgtaaagcaattatcggcgtgcacatcaagaatggactccccgaggcagcactaaacgtgctcaagtacgacaaatccctttttatgacttttcacggccgatttttttaggtattttacttcggcagtccattcgccggcaaaggcacatttggtcattgcgttggacacatgcacttttgtgtgttggaaactcaccgagtcggtcagagaggagcccgcaaatgccgacattattgcgttgactggaagcattgttcgtgccttccaatcagttctgccaaaattgatcgattggtcggtcggtcttggcgagaaccgatacttcgagtctttttcaaaggtattttaatgtgaccaattcgacttgttgcatttaatccgataacccctgcagatttctcgatacatcggcttcttcaatttggtgctcaaccaatgtgctgcaaatgatgacgtgccgaagagttcggaatcggaccctgccatcggagacatttcttgcgcgtccataaagagcatttccgaaggcactaaatggttttgctttcttacaagtagcatacgtttgttatttctttttcaagttccaacagactttacgtgaccaaagcgcggactggtgtccttttgccacacctcgagggcaccttgtacaatacgatttcagttgttaaggcagtgtgtgtcgtggcttcttccgtggtcgagtcgcctgtcgatgcgtacggattgacacttgaattgtcaaatctcaaattttttcctttttcagtagacagcgtgaggaattccatgaacaaatgcgcgagtcttggaactgtttgtttaacaaccatctgtcaggcggacacattttgctggaaattcaagctcgcaaattggccgacactcttggtaccagcaaattcgtataaacccataaaaagctgataccaaatataatttagactgttttgcctcaactcggggctctgttctgattggaatcgaacgacaagtcttggaattatgcaagaaaatatttggttttcccgtcgctgatgtccaattagccgcccatttgttgctcagtttgccgcttgacgaaatgcgcaaggtgagggcatttttgctcatttacgcgtatttattttaggtgtctatttatttctattaccaattccgttttgacagaatctccatgaacttcgacgatgggctcagtcacggaagaatgttcgttacacgttgaacctaatttgtgtgtcattgttcgtgctcactgttgcggaccaagacatgaacctcatcaaacaagtcgcggtccgtctcctttttcccatttattaatagaaactaaatcccaaattttaaagatttggcacgagaccacccaatggcagaagcgtttgatcaaacagaatgtgaacatgggtactaagcagctgaagcgcgacaacgtttacgagctaattggcgattttgcaaaagcgctgcttccctcctcatttctttacggctattgcaaagaggcgaattgcgcaccttcgtccattttggtcaattatgctgttgaactgtgcaaattgtcctcttcttaaagaaaacgatgcgaantcgttttgaactttgcattgaaacag

SEQ ID NO: 11431 - DNA, 1387 bp, Heterodera glycines
tcttccgacttcttcatcagcttcagcacttcatacccgacagagttttgacaacaaaaaattgtcatctgctattcacgccaaagttgaaatttttttaaagtgcttttattttatttctctaactttagtctgccgttgatgaaattttgggcgaacgtcagggcgacaccacacttttgcacacaacacatttgtttgacgcaaactgccaaatctgcaaggaagaacaggcgaaaaagttggcaatgcgcaagcgtgccgaagaactcgagtccaggctggacgaacgggtcagagagggccaactggagggggtggagcagacggcaatgaaagtttttttccagataaaactcaagcaacagcagcaaggcatgccctatttcccgaacctggacccatccgttcgtaccgaaaactgggacccgtccattatctctgcgttgtccggttcctcctcggtgatgcccacctcgcggcaccatcgcacggcggcaagcggtagaaaatgtgatgtgccaacaatggtcggggaattttttcttggcagatttcgatccgcctctgtcttccgcgaccggttgcgacaccaccccactgatggactcggcagcaaatgctccagtcagcaacagcggctatgaacatgacccattggggttgaacaatgtccaggtagtgtagtaattattcaaatcgccctaatggcttttttgagagacttaaaaatcattcattatctctaaggaattgcatcgttttttaattgattaatcgctccaacaggttggtgatccgctgattgacgatgagcaacagcagcgccacccggaaacgaacattgacgaagatgaggacgtacttcgatttgatggaggcgcttttgacgacaatgactacggagaagaggaaggaatgacggagtttaatgccgatgacaacaataacatgggcaaggaaaataatgcttccaatgcttgtgagttttatggggcgtggcagaggtgtcaaattatttttaatgcgtagttagttttaaacaatccttcatccaagtttcgtcttttttacatttgtaaatatgatgccattttcagcacccgttcattctgatgtgcttcaacaaccgctggcacttcagcaggactttggcactcctccgatgtccggtgtttccaacggaggctttgacaaagctgatgacaatgccagccaacacaggagcggtggtgtttctgcccatcgtcgcactaccggcgacgcgacggaccgtcattttcagcgcgttgtggtgggattcccctccacttatctttaagaaaaatactgctattgtataaaagaaatagcaataaaaaataattgttaaaaaaaattttcagcc

SEQ ID NO: 11432 - DNA, 3222 bp, Heterodera glycines
  unsure (1)..(3222): unsure at all n locations
tgcttccatgcttgtgagttttaaggggcgtggcagaccgcgccaattatttttaatgcgtagttagttttaaacaatccttcatccaagtttcgtcttttttacatttgtaaatatgatgccattttcagcacccgttcattctgatgtgcttcaacaaccgctggcacttcagcaggactttggcactcctccgatgtccggtgtttccaacggaggctttgacaaagctgatgacaatgccagccaacacaggagcgctggtgtttctggccatcgtcgcgctaccggcgacgcgacggaccgtcattttcagcgcgttgtggtgggattcccctccacttatctttaagaaaaatactgctatagtataaaagaaataacaataaaaaataattgtttaaaaaaaattttcagccccgaccgccacaaacgccgccaccgcaacggatgccaagtagaccagtctctgtcggtgctgctggcactgttttgccgcgcccatcggatgcgatgtcagaagtgcacgacatgccgcaacaacatctcttcaatgagcccgaacagcagcaaccattggacccgtggaagacgtaaaccatgactattccttttattaggtcgtttcaaaaaatataaattctcgcacttttcttgacataattggtgtaattctatggcctaataggtcggtattttgatcacataatttgaaaattcatttcttcaaattttattaattttttggaactttactaaagtactattttaagccaaacttaatttaaattatatttatgtaggacattattaaaaagaacgacccaataaatgacaaactcatttccagtccaatcgcatttacctttactttatgttttgtttagcgagtctttgttggtgtggcgtggactgtttgtgttcagcaaacaaggcttctttaactgtacatgcacagctgtgagcggcggtcttgccgtgttcaaggcgagccgtgagatgatggcaccatcgtcggaaaacggcagcggtgacggaggaggaggacgtattcatcttatcggactgtcggattcgcgtggtgtttgggaatacgttatgcaactgagggaaagctggaacaaaatggtgtgtctactggtcatcaacagaccggagggtaaatatttctcttccttttaagtttttctaattttaaacagctaatcaattgtgcttttttgtagaggaacaagatttcctcaactacatggactgcttcgcgttctacaaccagggcacgcaggtgggcgtgctggactttgccgaccacccgaccatcaaagacggctatgtgttcacgctgagcccgggcgaaccgttgccatgtgagagttttttttaatagcaacttattactgactatgagaatccccttttccgcaacacattgtttaatggtaaaatgccgtctgtgaatgttatgtctttcagctgtgctgttgccgttggacggtgtcggattgcccgagtggacacagcacaacgggtgcattatgctgatgattgtccgccggatggaccacgaggataagcagtggaagcgccaacggatgggcatgggcgttggggacgaaagttggcgacgtcagcagcagcaacacccccaaatgatgccgatggacattccgctgacgccgattggccgcgggggaggcggcgaacgcatggcacatctgctcagcgaccccaggttggactatgagcttaccactcggatgggctctcggctgtaccgcttctcgcgcctctacaaatccatgccaatgattttcaaccgaatcttttctgaaattaacgtggacaacagtgggaacgatgagaatgcgaaagtgtagtagagggggagagagatgggattataccgaaaagagtgtttttctaaaaaatataaatttttcttggcatattggatgggtggtccctcttttctctctccctcgtcgctctctctttgtgccatattccggtttcttttttttaaactgtctttttcttgctttatattttacacattcagctacaaactctatttttgagaagaattaaaaaattctatcaatttgctttatttgttttcattcatttttctgttggtctctccgattttttgccgatcttctttttttgctgccgttttcatttttaattctgatgcgggatttttgtattgtcttttccatattctaatattattagcaattctttttgctaaatcttaccagtacctcccccccccccctgtgtcttcttttcacacagctcacatttgcctacgcattgttgaatctgcattttaataaatttctttggcactggcacttggggaaaaccaaattttgtacaaaatttaaaaattccttttacatccatcggttgactattttttggatacctcactaaaaatgtattcgagaaagtgaattttcacttttggtgtaattatgtgtgtggtgtcttatcgttcttgcgcatctccacaacccacaccatccaacgagccccgtcccattgtgtgttatgtgtccatgaaaaggtattgcaatgagccgttctaatccatttttctcccctttaagccgccgttttcgaccggacgacatcgattttgccgccaatgttgagccgacagatgcaccaattgttggacccgtcggtccccgctccttcggcaggcgacaaatgcaaatgttcgatccatgtgggaacacgcctcaccaacggcaccattctgcacaggtggttgcataaacatttacaaagtgccaccgcaaaaagtcggcattccgactttcccatccttaattagcattgtttactctaccttttgctttcagtctcgtccgatagtgtccccggtgatgttttccgagatcagtccaattggcccaccatcgatgtcgtcacgcttacagcagcgttaccatcctcaacagcgcagttccgatccaatcattggcggtgctggccccagcggttttggtggcacaactgaatcactagtgccgcatttccaagcagcacattcaccggcggcattgaggcagcggttccctccgtctgccggcagctttaacagcccatcaatttcgtcggtattttctgcagttgaaccgaaacggatggacagtccggctgcttntcatcatcatacatcgctgccttccgtctttttgacggcat

SEQ ID NO: 11433 - DNA, 938 bp, Heterodera glycines
cttttggcgtgggtttttttgttttagcacatattttcttccctgagaaattttgaatttttacaattccttttttttgactatcaaattccaggcaaaatattcccgttttgcatgattttttcaatttaaggtaaatttgattttagcaaagaaaattccgaaaataattacatctttgagagcgaaaaaaatttacgtcaaaaagcgttataatgttttttattagctttatgctaacgaaattgataaaaaataagactgttttgaaaaattcacttatttttaagcagttgttctgtaaatattttgcttataaaattcgtaatttattttatttcttgagcaaatttttgttttttaaaattgatttattttagaaagaaatgaatttaaaaatttttaatagttttaaattccctaactttagaatgttttcaaccttcttttcgtcttttttcacgatttttcacccttatttacggtcttaagttggacttttttcaccctttaaatccgatccctaatcataaggtgaacatgtctgatgataattttacacctttagagttgaaaaataaacatggaagaaaacaaccatagaaccgcggttcaaatggcatacaaatttcgtttaatcgattatgactctcaaggacaaataacgcctattaaactccaaagagttttaaaaaatggcacgcaacagctttttaatttggagacgtgtcgtttaattgttaatcagttcgatgagcaacgttgcggttacatcggtcttgccaaatttccagcgctatgggatgtatgatataaaaaatgacaaaataagcaaaaatattattttaaaataaacagaaaaaattttttaatataaaccaaatgttttataattattgtcccaaaagtgactccattgaaacataaatttaaaatga

SEQ ID NO: 11434 - DNA, 3728 bp, Heterodera glycines
tttttttaaaaatatgttttattttttcaaggctatagttttactacccccgtttttcaacattctgctacaccatttcgatcgaactaaatctggtatttttttttgcttaaaaaatacatccttcaaaaggacgaatttacttcgatgattttattcatcttggcatatctctaaagcgtcttacgccacccttccgtaatgctgacacggaccgtgacgggcgcgtaaatatacgtaagcaaaattttatctcatttttaggtgccaactcgttaatttttagtaataacataaaatttttcctccaattttttttttgcactaaataaaaatctaaatcagtttgcatctaaataaaatatttttcaacgaattatttaattttgtaaatctttgaagatttcgaggatttcatcttaatggtcttgaccgctgaagtttgatttctctacacaacccaatataaatagggatgatttgattaaaaataccacttattctatttatctgtataaaattcttaattttaaaatcaaaaaaacaattgcaaatatataaaaatatatttatgatatttaatacttatatggcaaatcatacacttgctaattcaatgtttacaccctcgtacccattaagcaaaaaaaaatgagcggattaaaaagattccaaattgttccatcctctcaaaaaagagtgaccgaagattttccaacgaatccaaaagatcttcgtgccattattcaatttaactcccctggcctattctatgtccgtgccagaattgccgatcttcagttttccctatacaaggtttcgggtcgtctattctagccaacattataaagtagcacggatttaggcctgtcctttgaagaattttggcacattttgtaagaaaaagcttgacgaggagatgtattgtgccagttgtgcccaccatgctaacaaggcaatccgcagtatttacttgagattggagctccgcgactgtgaagatccggagatttgccagactgttactgtcttttccaccgtagcggaacattacctgggcctcaaggttgaacgatttgccaaaatggtagaagagcagcctgaacagctcgaagcgttgcttaaatctaagattgagcgtactgtcaccgccaaacttagtataaaggttcacaaatttactacggatataaatattatctttttgaatttttaaggcaaagggtgagctcaagacgatggactggattgttctgtccatacagcatgagaacggggaaaacgagggagatgatgagacggctcctgatgaacaaaagaaaactgacattaataatgaagatggagaaataatcgagattgagaacactagcgtgcattcgacactcttaggcccaccgcttaagaaacgtgtaaaaaagaactgagtcgaatcaatcggcttcgtctctacggccaattctttgtagtagtctttggcctagtcgatgttaacccggataaatatttagaaagggaaagagagagagaccattttgttattatcagtgattatatgttttcttcgtacaattcacccaaaatagtttttccaagcgttcacagttgaaacgacaatgaaaaagggacaatccgaaacggctatcattcgttcatcatcatcggcaacagcgcgcaatgacaatacggtggcagcctcaaccttggatggcaatgccaaacggcaacgtcgtaatagttgggacttcaagacgatggcccattttgaggagaagcgccctaaaggggaggaggatggacatagaaaggtgaagcagcctcagcagccagcacccttgtttgagcaaaaacaacactacgtgcaccgagtggagcggttcgcactgcagcgccatgtgaccgagtttgtgctgaacggaaaacacgatgagccggaagaggcgcttctccgcgccttcgagcatatcatcgctcgtgcaatccgaaacgcagaggattcccatcagcaaactgacgatggaagaggcacatcagcgggcgacagtgcacatcgtcaacggcgtgtcacaagacttggagttttacttaatggtagaggtgagatttaccgtcagcgttattcgctcttttgttaatgtaaaagttttctttgcaaaacaccaggtctaaccgacccgattgtgctgcccattcgtcctccggagcaaaacacggcagaagtgttgatggctgagctggacaaacttggccagtcggatggcgatgaggatgtgcatggtggagggatcagcaaacgttctttgttgctcagcgagccaattgaagtggtcgtcacatgtatagcacctccggttggtgcggcgccacgtttttaccaataccagcattggggttatgacgaccggcagctgatccgtgtgatgaatcaggacgacaacttttgttattccatgcacttgttgccactcgtgcgtacacggatcaggaatttttaaaggcaacttcgcgacgacaagcccgaacaggggaggatgatagtcttcaatgggatacggtgccagctgagattgcacaacgggtgataacgagaaaagacttttgtgctggctacgaagcactaaaccgtctggtgtccaaccgggagcggatgaacgcagcagtgacggagctaatgcaagctgcaggaattccagctgaccaagagtcgtatgggatggagcatatcgaccaaattcagcagttttgggttggttgttggtgttagaatgagtgctaaacggtagttttttaaaccaaacaggaccaaaactacgctggcatatacagaattgtgctgtttgaggatcactccgaagagttgcctcgcccaatttggaagggtccaatgggacgccgcctctgtgtgtcactgtttttgtcggatgggcattattatggtatcaaaaagatacattgctttttcaaattgggtcgaaaatattgcgtggactgtgaatgtgtttacacccgtgacactaagcacacaatttcatgcaagagtcgctgcccacaatgtgctaaaggttggtatttgtgtttgttgcgccagcagatggccaatcgttttttttgaattttggttttatgccctttatttccttcttgatccagttggcccccagtatccatgcgttaggcagcaaggcgtgtgccttcattgtacccgatgtaatcgctttttcttctcccgatcatgctttgacggtcaccggggcagtcagacatgcaatttgttgaagcgctgcactatttgcaaccgaaccttccagcaggaccccaagcgtcctcataaatgctacagcactttttgtacacgttgtaaggtattgcattttcgccatatcagattggaaataaacaaatcaaaattaatgtgattaggtgtaccatgagaaggatgctggttgctttatcaagaaggttgtggtaccgaatgaaaagcaacagtaccgcatcgtgtgctatgacacagaaacgagattggacccattggaagaggcagggcagcagcgtcataaagtaaaccaactttcagttcgtgttacttgcactgagtgctgtgattctgaacgtggggtgcggacaaattgccaaatttgtatttcggagtatggaacaatggaacgaataaaggattggtatgctgttcattaaattttccgccatacattgctgtgtcattaacagga

SEQ ID NO: 11435 - DNA, 4435 bp, Heterodera glycines
atcaaatagttaatataatgaaaaatacagtgaagtatgtgaggttaacagaaaggaaaacaaatatttttgcattttactcatcgtcgtttttccgttttcaaaatttaaatttgtttcttaacaaattcccaattttttcgcaatttctccatcaatttttgcgtttgttttcactccgtatttctcccaaattgcttcctttattttgtcaaattgttcaattatttctctcttttcaagcgttgaaaagtgctgtgactgtgctgaaattagaaagtgccgacttttttggaaaaaatagtattattttttgctgaaaattttagattttccttggtggtaccactccccagcagcacagacctagcctctcacccaaattttccaaaaaatattgctaaattttcaaaaaatcgattttttttaatgaaaatctcctaaaaatggctcaaaattcggttctagtcggttttatgcgtcccatggatgaccgaccatccccagtttcttaggccataacttttttcttacttggtcaatcaatacccatattcttggtaccaagcgaaagataaaagtctcgagattttataaatgcaagaaaagagcaaatactggcattaaaaaagaaattacaatgaaaaaataccaaattcaacttttccgagtataattttttgtctattgcctttagctaaaaataaagttatacaaaagcttctatagaccttaagcttttgtttaataccaagaatataggtattgaccaagtaagaaaaaagttatggcctaagaaactgggtatggtcattcatgggacgcataatctgtcatgggacgcataatatgtcatgggacgcataaaaccgactagaaccaaggttttttgggaaagtgtcaaatatgcacgaaatgccaaaattgcaaatatgcatataaatcgcgaaatatgcacaaatatgcaaaatatgaatatgtaatacggcctagaaattttgatgccctatatatgagtgtcaattgatgacggaatgccaacctgacatcggcacattcaaatgaagtttggttgagaaaggtgtcgatggggtccaacggaaaacgatgagaacgatcattccaaagttcggaagaatcgacaaattgacggaacggaccagcaggccactaaaatagatttaataatgaaagacagaaaaaaaagttggaaaaaacgactaaccattttgacctgttctggttcgatgccgtaagaacaaaaagggaggtattccaacacactgagtttatttttggtgaagaaacaaaacaaagtaagagacggacatatcgaagctaaggggggggggaatcgaaacattacagacagaaagatggacctgaatttggaatttgagacacgacgggcaaaatcatcgacactaaatgaaaaatgaaatgacagttaggagagaatgtatcactcaagacgaagcaagtcagtgaccggttgatccttcagaggaaacatgaacttagccctcggctgaatgctggcaaaaatctcatctacgcaatcctaaaacacaaagtaggcgacggacgaaatcactacaaacaaaaaacgaactttgattttcgaacccgaacactttttatgtaagacacggtggaattccacggttggttgggggaagaaggaatcgaagccatgatgacctgacaaaacaggcattttgtgtttcagaaagggaatttgctgttacaatgccatgaaaactttggcattaccagtcattggggaagtgatcgaagagcgatagagacgaaaataaagtgcaattttcccgagttttgagagcagagaacgcgcgacttgtggctgctgtttcatacgcttcagctcactaaaaagaaagcatttaattttgatctgcatttctttctgacttttcgatcgtttccaaattacgtccgaaaacagttaaatccaattcattttcctctttttcctccgtctcatcagcagctccggaaccacttattataacagacaaaaacaggataatacacaaaaaataacgaaaagagaatgaatccatggattctgaaacagtgcaacgatcatcaagtaaagttaaaggatgttagaataaaaacttaaaaaaacaagttgggcgtcgtccgccggtgtcagactgtaccgataccgaccgtccaaagaataccaaaatggagaaagaaaaagaaaatcaaagggaaaggaaactcctcggcagagtgtaaattgtgaaattgaaaatgtttataacggcacaatttggctttcaattgttaattaatttcatttaaattatgagaaacgagaggtcagtctctgttcttcttctgaaggtgggtgacgttttatcagtgatcgcatcccgtcaaagtgaatttgctcatcgttggcttccgtcgttggaacatcgctgccgaagtgcgaaaggaatgaggaggaggagaaggaccagcagcagcacagacattccgagggctggcaaaagaaacggatgaagtgacggaaacgatgacggcggaggcattttattggcggtggtcaaatgggttgggttgccattctctccggtagctgtcgattggtcattttgcgttccgtccatcccaaacaaatcggcagagaatgaatactcacaacggtggccatgaaagccggaagaacagctaaatgagcggacaattagcacaaccccactccgtcttcgctgttttttcaaaacattgataaatgataacacaccgacacattggcacgtggtcactgccccccgtcaacagataacagccgccaccattgaagcagtaattctacggcaaaagactcgcataaatcattttgcagaagaaggaccaactgaccttatcaaagtgcgaagggcaggacaaagcgttgggggccaatgtcctaatcagactgattaatctaatcaactcttgggtgtattgtcattcactaattaccaatttgtgtccaattccctcgtcgtttcctctcccgctatttcagcattttctgtctctgtttcggtcgtaaacgaagtgattgtcctccaacttttagtcaccgtctggagcagtgccggaggcattgaacggggatttgctgttaatggcggggaaagagagaagcgcaaccctcctaaataagaaacaaattccatcggtcggtgccaaattgaaatcagaggaaagaaaccgaaaactgaccattgttggggttgttaaaatcgacgaatgtccggtgaataatggcggctgagaaaaaagaggggacacggacgaagccgaggaaggcgaggaacggcacgagggacgcaccgatcgaagagacaatggcgaaatggccgatgttgggaagaatcggatttgattggtctgtaagaaaacggagaaggattagctgggacaaacaaacaaatggcacgatttatggacaatctccccgaaattcctactcatttccttttgtatcgaggaaatgaattcaggaaaagaggcggagagagccgagaaagggccaattaattattccaattggtgcagcgagcgatcctttgcggtgggtgggcatttgagaatgaaccaaccacacacacagcaacaccggcaacaatgaccgtaaagggaatggggcgatggagggccatccgagggggggggggtttatgaggcgttcaattctgtttggattggagtgaattgtgtggactgagtgggagaggcggaggggggggggggaatgggaaccaagggaagcgatgccatttgccgtcagcgattgtctctttgggaatgaatgatcatcgaatggtttgatgaatctcgaaaagtaatagtcattttgtaattcatatttttctactcttatgagctcaaataaagaaaaattaaatgatcaactgcgaaaatcagtgaaaagatcaaaagtggtaaatgtccttcattaacaatggcaatggccaatgttctgctgcttcgatggtcggcctttcattcattcattcaaattcagtcgcctcccctttatttattttttgtacaaaaggccacaaagaaagagagagaagagagagagagagagtaatttgcttttgcttctctccgcgccttttctgctttttgtccgtttgtccgcttcttcttcattcccacttgctttgctcacttgcaatattaggctgtgtccgacaaaattgtgcaacaggtgcagccaatgaatgaatgaatgaatgaatgaatggtggtgaagtgagaacaaaaaaatgagaggaaaaagtgggagaaggaagagagagggatggggtggggagaaaaggaagggaactgattagggaaaagcccaatcaaaggggggggggatgggagcgggggggggctgacgatttacagattg

SEQ ID NO: 11436 - DNA, 1190 bp, Heterodera glycines
gggaggatgtcgttttacagattgcgagtgttaggttcaacagattgagaatcgggcaccctcccctccgccctcctttcccccctccccctcaacattttctcctcctctctttcctctgccattggccggcctcgcctccggcgctatgctccgatgcgcagggacaaacattggatgagaaggaagagaaggctcaaggaaattgagcggtgcaattcgttagagaattaatcccttttagaaggatcaaaaaggaagcgtaaaaaattgccgcgagtggcaaaaacaacgacaaaagtcggggaggaagtgttaaatgtttgttggtcatcagtcagagggaatgaatgacctttgcgatgtttgccaattgcgtccaatttgtcatgggatacaaatgaaatcgaatttcgataagccaaaataatcaatggctgcgcagaaaaagggagcgcttccgtttccgtacgcagccgaactggggacacggcaaacgcgaccaaacaactccgtcaacagcaccaccaatccgagtctgaacagttgcgtttccaaaggccagcggtaaagaatgccgtggcgcatttaacgtgtcgcgtcattggcgccattggccgaaactcatcagaggcgactgttgacaacggattggctaatcattaagtaatgattgatattgtaaagtaacggcaatcagataagcggtataggactgaaaaaatcaggaccgggatataccgtgacccgcaaagccgggaacggaaacgggacctggattttcaatcggaccaaccgggaactaaaataattttaaaaattgattatataattactcaaataaacttgtgcaaataaattaaaaatcttcaatattttgcaaaaattaaatcaaattatttcatccaaaaaaactaaataaattaaggaaatcagagccaagagattcagcagatgttggatctgtgaaccgatgagaagatggaagacgttttagcagttttactgtttggatattgagttaggtatgtaatgagttttcgctacgcttccattctcatcatttagtcccgaccctaccttaaacggggtctgaactggctcacaaacagtgaaattcacagtaattttgtttcatgcaattgggtaattatgatcgatcatcagtatttaaagccccttgattggca

SEQ ID NO: 11437 - DNA, 1708 bp, Heterodera glycines
  unsure (1)..(1708): unsure at all n locations
ttccaacaattgaaaattgcagttttattttaaaccccttttacccattcctctctttgtcgctttgggctacatttgttgggtatttttcgattttgggcctatacctcaaaattaaaaaaagaacaaagactgggggggggggggtgggattaaatgcataattctttacaatgctcgcgccaatgaaacttgaaccttcagcgcgcgctctttcttgacctatttaaaaaagttgaggtgtaggcacaaaaccggaaagttgccaaattcggtactattcggttatgtggtcacacccttccacatttaaaaaaagaaaaaaatgtttctcatttatgcaaatccctttggcatgaagactgaaacggcgtggcgatgatcctttctgacattttggctcaaattgcgacttttatgccacctaaaaattgttgggcgctatcactggcgaatattttttgttattttatagaattatgaggtatgaccagggcggccaagtgtccttatttgtaagatttgtccttatttggaggtgccaactcttagaaattaaaaatgtccttatttgtaagatttgtccttattttggcacgacctccttgctttgtgcttattcatggatttgaaaataaaaatgcaaaaatttaatattttttaattacttattgttttttattgaagcgaatatttgaattaattcctttttgtaaaaaatttcatttttctttagtgtaaattcgttaattttaaatgcccaaaatgcccccaaaacgtaaaaataatctcttttaaaatggtcaaaatttttatttttcctccgacggcgcctatcggcaccgtcgggccccaaaaacttattttttcataaaaatgggctcaaaatctcaaaattggtcatttttttggtgaaattctgttaacaaatttcattttaatttgaaaaaattttcccggtggcgccgataggcgccaccggaaaccaaaatcccaatttttcttaaaaaaattagtttaaaatctctaaatttggtctttttttatacaaaatctgttaacaaatcacatacaaaatttcaaaaattttcccggcggcgcctatcggcaccgccgggcccccccattcccaaaagttttttggaaaaagcacgccgcaaaaacattattaatttttaaattttgaataaaatttttcaaaatgctgatttacaaaattttcagttgacaggccttcgtttttatgctaataaaatgttgttttaagtcgttttttcatgtttttattgcgtttccttcgcgctactatcagttttagaaaaaatcttatttttggggtccgaatcttagttttagcctcatctgtccttattttgaaaataaaaacttggccgccctgattatatggaattattttcttgcttaaaaaattgtttttttccttcgactgtagctctccgggcattgttcgtaagaaaagttttggccgtcaataaaatcaccaacaaaagtgccgtttcgccctggccaattgacaaaaataagcgctttctggatcttttaagcgcaaattaaaagtgttgccgcaactgttcccgggtccgagtcattggtgcaataagttctcctcaccccctagcattgttttcacccangagaaattattcatttgtttctataaatgtgtataaaaagcgtaattttcgtt

SEQ ID NO: 11438 - DNA, 3436 bp, Heterodera glycines
aatagggaaaatatcgtaaatatgtcatatatttaatcaaattctagcttcacatttgcaaacgaaatacatacatttctcaagattttttgaaatttttcattttgttgtcagcgaagatttttcggaagcatacaaaatcattaaaaatttcgcaacatttgggaaaaaaatctattcttataaggtgatgtttttataaaatttgcaaaacactgatccttagtgtgtacttttcgattttgtttttcattaaatttgctgataataaaagagtatttcatgtgattagtggcaatccatggtgacataaaacctgaataattttatgtatgtcaaaaaaatggttgaagaggaagctctgaaattgattgattatgacggtaacactatcataccggtggggcttttcggaaaaacgacaccagaaaccaaaatcccaatttttcttaaaaaaattagtttaaaatctctaaatttggtctttttttatacaaaatctgttaacaaatcacataaaaaatttcaaaaattttcccggcggcgcctatcggcaccgccggccccccaattcccaaagttttttggaaaaagcacgccgcaaaaacattattaatttttaaattttgaataaaatttttcaaaatgctgatttacaaaattttcagttgacaggccttcgtttttatgctaataaaatgttgttttaagtcgttttttcatgtttttattgcgtttccttcgcgctactatcagttttagaaaaaatcttatttttggggtccgaatcttagttttagcctcatctgtccttattttgaaaataaaaacttgaccgccctgggtatgaccgcttaaccgaaaagtaccccaaattctttacataacacccatggtgttttccccctgctgaagttaaattaattaaaatttttagcgttcattttaaaattcaaaacttccaaccaattctcttttcgtcaaaatgctttctccattctcctacgacccgttctatcgccgttcgttgttgcctatggccacggttggcaacgtcctttcgcccttccgccagttggagcgcgaactcgaccacttctttgacgggatgcagcccatggtgggggcttattcgacaatttgccaaaatttcaaattcgtttatcatttttgttttagcttcgtgaccacgccgctcagctgaacgtcacggacaagggcgaactcacttacaaagtgagaaggcacagaaattcaccgcttttcgtggctaattttcaattccatgaaattttcaggtcgatgtcagcggcttccgccccgaggagatcaacgtggaggtgattggtaatgaaatcatcgtcaatggggaacatcgcgagcagaacgacagtgagttttgccattgttcgagtaattttatcggggttttggattttggtgagacaaatttcagggcttgagtgttaatggattcatttaaaatgcttttcggaaccatatttagccaatttaggcttacatttagcgaatcagagaaatatcgagaaacttctttcaatttggaaaatttatgtccgtatttctgccatttatggccttatttttgcaaacccttgattttttacgtcccaaaatacctttgaatggatttttcgaaacgcaaaaatattttttttcgggtcgggcatattccgaagttatgattgatttaaatgcaataaatgtctagtcataatgctgtttttcgatgattcgttgccccctccacctcaggcgaatcggtccaccgtcagttctcgcgccgtgtgctcatcccggagggcatccaaaaggagagcatcaagtgcgagctggacggcggtcgcttgtgcatctgcggaatgaaaacggctggcgaaggcggacgtaccatcccaattgagatgaagaagaaggcggccgtggaacatcagccgcaagtggagaagaaatagagggggacaaatggagacgacggaccgatcgatccattaatatgggtctcctcctttggacattttaaattattttcaacaataaagcgttttttctattccattgaaatggcgaagataatattagcaaaaaatgcacttaacggtttcggtttcttaaaaaattcgggcactgttcaaattcgaaacatttgcaaaaccgcacctcgcgaaaatttactgaaccggttggcttttaaatcccaaaaaattagtgtaggcggaaaaaattagtgaatccaaaagcaaagtaatttataaccatttaacacacattaattagccaaaaatcccaaatttactgaagcgtaaagccaatttatttgcgttcaaatacaaaacaggaaaaaaagtgtcattcgcgtccatttgagtgattgtggccctaaagagggccgtttgggatagttttttccgtccgatcaccaccgctttcatcatctcctgctcattttgacgaggtgtacttcgtcaccgccttggtcccctcggacacggcatgcttggccaactcgccgggcagaatcagtcggacagccgtctgaatttcgcgcgatgagatggtggaccgcttgttgtaatgggccaatcgcgaggcttccgccgcaatgcgctcgaacacgtcattgacaaaccttaaaaatgggaaaattgagaatcttgggacggaaaaacgccaaattgggccttacgagttcatgatggacatcgctttggaggaaatgccggtgtccgggtggacctgcttgagcacacggtagatgtacacctggaaagccgggttaaatttataatttcattttgttaagccattggaaaactaaaacagaaaaccctaaaaaattcagaaaaaaacctaccgagtaagactccttgcgggcctttctccgctttttgtctcccgtgcgcaccgccttggtcgacttgaccgccttcttcgctcctttgccggatggttttggaggcattttgtcgtcgaaatgtggagaggcgaaggttttgttgaagagagctggtgaatcgattcgtttgctttctaatgaaagtggggaatggggcacagtgagcccttttatgtcgctaaagtggagggaacgcccatcccattgacagacaatgcaaatccccggtgggagcagagaaaaatggacgagagagagtgtgtgagagagaaagtaagacggcgtcactttttgaaatggatttttttcaacacgaaaggagtctccgcgtgcctgcacattttagccgccattttttcttagcataaatagcgcccacggtcattctattcctcacttttcttcttttgctcatttgaatttgctcatccatccaactaccaagcaaaaatgtccggtcgcggaaaaggaggaaagggacttggaaagggaggcgcgaagcgccataataaagtgagt

SEQ ID NO: 11439 - DNA, 763 bp, Heterodera glycines
  unsure (1)..(763): unsure at all n locations
ctctagagtcttttttgcaattccgaatcgattcccccccccctaatcttgtgcctttccctcaatgtttcgtcttcgtacgcttctcagactcgcaaatattttcttctgtttattcgcgttgattcgacaaaaaatagcacagaatggcatttgtccactgggctttgtctggggaggacgtaagtgacaaacaaatggttgggatcggatgaaattcttacaaagggactgatcagtccctaagagacagaataaacgtcgatttcggatcaccaaaattgaactttcgcaatttgttcttatccgattccccgcttcttcagagtgcggcctcggcgtcgtttgtcctccgtcattgccgccttttcacgtgcgtttgttttcaccgttataaattcaactttccaacagtttcggttccaatttcggcttttcctccccattttgccattgttttgccattgttttttgatcgtttttctcctgctgttggtatctttgatcttctccctctcccgctttttcagtgtctacgtagttcgtgctgtcgtgaccagcgcccgttgttcgcgcgtctcggccccatcgtttatccgcaagatttgttgggcggcgctttcggtggcggctttttccccggcggcacttatggcgggcgattcaatttgaacagtcttttgaaggtgagctgcttcgacaacgcgtcaanctgctttctctacgaaacggaatgtttccagcccatttatcagctgtgtat

SEQ ID NO: 11440 - DNA, 1840 bp, Heterodera glycines
  unsure (1)..(1840): unsure at all n locations
acttttcccctcgccctctccgctgctcaaatgcacggccattgccattccccggccaatttggtgcccccgcttcttcccctctttcccacgcttttcctcctcttcttcggcacttcccttcccccttccttcgcccaatttaatttttgccgtgataatttcgcccgttgtccgttgtacttcagttactgcttcgtctccgcttatcagtggtgcatgtcgacgcactgtcgtcgcacatgcggtttctgctcgtcaaccggtttcggcacttctccttttgttcagcaacaacagccgaacgttttgcagcccattgtacaaccgatcattcaaccgattcttcgcttaacaccctttggcaacaattttggtggcactttccccaataatttcggcggcactttccccaataatttcggcagcacttttcccgtcggcggtagcacatcattttcaaattttcctggccagccaaacattcctacgatttttcccaacaattttcaatttggatttaacggcggatttggcagataaaaaaacattggacattcattcgttgtcaatttgttattgtaaaatatgaatttcatttaaaaatgcaaataatttttaatgtttttttcttccaatccgttgaattttaaatttgctcactcagaagagaatctttgtgtaccaagctgtgtaagcctccgtctgaaaagatgtttcggcgcgcactttgagtgtcatcgagtggaagccggacagttcaaattgacgctcaaactgaacaaaactttaaatttgcccatctttggttggttaattgaggctaaaagggtactcatttggcagagatcacttgctgattgaaaagccattccttagtttgggcaaaagcatcacaaatattccttcttccattgagtccccgtaagttctccccccccccaattgtccctttttctccactcacttctctgatgtccaaattgctcccggcaccgaatgagcgtttcaagaatctgttgtgaatggcttcgacgtgatgggacacttcccatccaattggactcactgtttgaggtggaaaatcaatttgccgtccttgaagaagccctgctccatcatcgaccatccttcaatcatttgtccatttgtccgttgaatgatcacccccccccaccccccgatttaccttcgctgctcgtcgtcagatatgccacgtgcaccccgcgggtcccttcgggtggcatttttcactggcataaaagccgtaatcaccttaagctaatgtgtgtaagcgaaatggcatttattaagctgtaattgtttgcttacttcggatgacatttcgggccgagtccaagtaagtgtgccttgggtttttgaatttgtcggcttttaaaaatcataaaccaacgtaatgttcattgtccgtgctccaaatttcgggattggattgatggccaagtcaattaaatttggtggcggcaattctttgaagtttccgctgctgcggtccatttgccaaaggccgatgaagtcttggaccggcttcaggtcccagggaagcatgttcatgttgtaccctgtgcaaaaaacggaccataaaataactagcggaaaggtatggcgtaaaaatggacacggtcaatgctttatccctaacccctcccacccgaaccataagccaggggacacgaaaagtgcccttctcttacgatcttcataacgggagcaaacaggcggaacaatgacgagaaaggagaacaaaagcagaagggagaaggagtgctgacgagaagaggaagagcaacanaaagcatccttaattgactgaaatcaa

SEQ ID NO: 11441 - DNA, 1409 bp, Heterodera glycines
ttcgggtccgggattcgcaatggtcaaaatgaacgtacagattcgtactcaccgaccctgaaaactcttagaaacatattttcagtgacttttaaaaagttaaatgtttatttcaaaaaagaggtcctaccatccgtagtataccttttgattttccaaagcctaaaacatttttactttttgataaaattcaaaattgaccacttttcatatagcgcaggaaattgttataaatttcgccatttttaattctgtaaaatcttaagaaaatgaaaaattttgggtgaaatatcggattcggaattcggagaaatcaggccgggataggattacagggattgaaatcacggttttatagggatactgaattatatttttaagccgtcattcatcctaaaattttcaatctcgaatagctttactaagaactttttcatttgcggaattcattaaaaaattttcagaaaaagtattaattgacaacaattgcaattgccaaccaactttctcaaaatgtcctcctcgacaaatgaccccgtgtcggagtttctcgcccgtgaacaatcggcgctcgccgacctcggcgatgactttgtcgctgctgtgcccccacctcagaccaacaacggtttcatatacattggaattaattgagtctttttgagcaaaacaatgcgaaattaaattgggaagagattttcttgaataaaggcctcccaaatgatttttctgtttaattcattttcagatggaattctgctgaccaatggtggctcagattttggatccattgcaaatttagactcatttgacgcaaatgaacccaaattgccggtcaacggagtaaacggttcgttttgacctatttttttctttttgactatttactatgaaaggaaagggggaaaatggtattaaaataacaaaatacgtaatcatttcgtgaaaagatattttttctcactttatctaaattaagccagtgatttacaataatttgtgaaatttgttccccattttaaggatcgttgcgcggaagtccgtccttttcccattcgcgcagccaaagccaacaactcgaagaggagccggagaaaattcgaaaatggcgcgaagaacaaaaggagaaaattgcggagaaaggcattgtttgaattgccatttttaaggataaataattatttaaataaataagtgcttaaaaaagaaaatttgattcattttaagacaaaattgaggagcagaagaaggaggaattacgagagcaggccaaaaaggagttggagcagttctacgcccagcgaaagaacgaattggaggaacggaaaaagatgaatcggtaaaaaaagggagcacttgcaattagaggaaggatttggtaaaggacagaaaagaggggattgtgacgg

SEQ ID NO: 11442 - DNA, 3345 bp, Heterodera glycines
  unsure (1)..(3345): unsure at all n locations
ctcacttatgttgcccgatcaatccgctgccacacgccttctgaattgcaccttagatcaggaagtgtgtcactcaaatgcaccattttgccgggccgtcttttaggttgccatagttgtagaaccggggggagattcaattacacctgcacttcctcccggggagagtcctttgcaagtgttgaatgtgccgatgggacagaatgggtgacccggtgtacgcccaaaggacacccaaactccgttgttctttcgtggtcccatcccaaggtagagactaagtgccgagtcgattgcttttccgcaaatacaatttgcgcttttccaatcagtggggtctttaccacatgccacattcgcggtgaccgttggcctggcctggctcttcatttttttgttagtcattcgctattgccctatgttctgccccgctgtttgttgtttaccacgaattggcacgggggtggaaaggcaaggtgatgataggccaccgagaaatcggacagaaagggtccgcagctcaagaggccgtaattgggcccgcacgatgtgacccagcttaattgccttatttgccccccccttttttctttcactttctttttcagttacttttaattttttaattgatttttcttttctcttaaaaataggcaaatttcctttacaattctgaatactctccccaaaatgatgaacaacaatgcgatacccagtgttccgcggccatacatggtggcctcgtatccaaccgatggatacgtcatcgctggtccacccacaaatggacagttcttaatggcaccggcctttccgggtgcccccttttcgcaccaaggccagccggccacgtcgccacccggcccccgatttggtgtccccggccccctgccgatctgctgcgcgccgccacacccggtgccgttgatgccttccgcatgtccaccgaccggccagcctgaacctcgccatccgaacattgctccgactccacaaaatgatcaccgtctcatttggaccttctcggagttgctgcgtgtggcgaatgttcagcgaaatctgatggagcgtatggtggtgttgctgactgccaacaaaatcgggcagcaagttaagggggccgctaacaagggtggggaaaacgtttgcgtaaccgcaccaaggggggtacgggtgctaagggcggttcgggggcctcccgccctaaggctaatcaagggcaggcactggcgcccggcccatcttgttttcagggaccacaggtgcagatcggtccggttggtctggttgaaatgccgtcgctggccagctccaaaccccgaagcagtggccccacccccgccagtgcccccaacagcgcaagaaaatgaaggggcagttgcgtcgtccctatctgcttgagccgtgcggcggggggaatctgtctacgacagtatcaaaatgtttggcaaaattttttggtattagcaacaaatatttttggggattaatttatgcaataattttggcaaaaatatttcttgggggattaattggttcatcttttgtcacgttctctaggttatcataaacaactaatctgggccaggcccgtcccatcttcccctctcgcattaatctcacaggaacaccatcgcaactaaattggcacggcacgtgcaaggttttggcctcctccctttcttcatctgttgcactttgctctcctccgattggctgctttgcctactacagtgccttcaccccgatgtgcccgcccaactctcgccactcgccccgatgtgcccgcccaactctcgccactacttaagaacgaacggacgatgcaaaaagcactgcttttcactttttgctgataccaacgactcaacaaaccatcgcttttcctgtgtcttttgctccaaaaataaacgaattttccgaatttcngcccctttttttgtgcttttccattgctaatttgggactccgcgcagcggttcccctattcatttgcttttccgcgggcttttgcccacttgtggcccttttgtgcctattcgcctatagtttgcctttcctcaggcattttccctgggcccccttgtgcccatttgcatttccctttgcctttgggtttgttcccttgtgcctccttggctttcgtcggcatttgtcccttgtggccctttcgagcccatttgccgtttgttgcttttccctcggcaattgcccacttgcggctattttgtgccgacttgccttccgtcggccactgtccgcccttttttggcccgtctgtgcccctttgattttctcggccatttttccccctttttttggcccctttgctttccctcggtggtccctttggtggttcacccatttttcttttcacgtggcagcaaaataccactttgttggccacaaatatttttattttttttatagatgcttagtcgcgttcaaatagacgatgaaagtactcggcgctatatataacttcactaatcgatcttgggtcattgacgacgttaataattcttaaaagtggagccatctggttgccgataattgtgttttctattaaatttggtgcataaatgtatagctgacttacaccacccgtcaaagctggcatataaatcgcctcttccgcgtgaaatataaaaacgagcacatagacgagttgttttgacaaatctatgtgggagacggcagagaatagatagacaataaatttttggtcaatgctatcatattgaaattgagcatcctcattggctaatctctcttttgtttgtggtcctttttcagcttccggcacttctttattttcaatatccttacgtttaaaatgttcaccagtgcttcattaagcctatccaccattccgctacaacccttttctgatttatcattatattcctcgagaattgatgtatatttggtttttgcatgtctggcaattccctttgcgacgtcggctgatttctttgcttgtttcatgtcattatttgccacatgctataatgttgtgtttttagatttctctacttcttgaaaagatttaagttcatttcgagatgtttgaatttgggttcccatatctgccattttgtcaaaccatatttttatatcaggctcttctaaaatttgaggatttgtttcccgtagtgtgtttatttgggtttggatggaaatcgagatattattgatctgattgaaatgtctttctacgtatctaccggcgcgttctgcggccctctttgctacatcggtttttgagtctttggtttcttcaagccctggcttctctctttccacgttgttttttgattttgtaatgatgtctgaatgcttcgt

SEQ ID NO: 11443 - DNA, 544 bp, Heterodera glycines
ccccccccacttcccctcctcccctcctcccctctctactgattttctttaactactaatgctcactctctttctccctgctattagaagcttttagtcccctcctcctttttccctctatcttattttcttttttttctttctcctccacccccccccccgctctctctctctctcgctctcctctcctctctgactctacctctctctctctctccccccgcctctttcgctctttctcccccgccctctctctctctctctccctctctctctctctccccgcctctctctctctccccgcctctctctgtcgatggcctggctcgttcggtggcgcccgtcctgtcacagtactgaaaagaaaatgggaacaaattagacacaaaatgaacacgaacggagggaaaagcgggccaactataccattttactagtcatggaacaatgaaattttgggttttcgggcccgaaattggtcaaactgtacgctgtatatgttattggcacttccgagaaggctcaaaatcaatttttggattct

SEQ ID NO: 11444 - DNA, 3766 bp, Heterodera glycines
atctctccctctattactctctctctctcacacacactttattttccccattctcattcattgggcggttgctctttcttctgctgctgttcttccttcctcacttatcctcctcctgctccttctcctcctcctcttcttgctccacatttcccatttcctcctcccgctcccatacaatcgattcctcctttctcatttcttcgctttttcctacccattcaaaccaaacatttattttatctttcttttcatacatataataatgctatataaaaaataaaaaaattttttaaattatttaatatacttttttaatttaaatgcccaagcattagcacatcagattatcaatttgtaaatttacataattatttatttaaatgaaatttctaactacatataattgtctacattcttttttcacaaaggcgttttacttttttaatttaataaaaaattatatgtatcatgtaaattaccattttttaattgaataattttaaataatttattttcgatataaattttgaaaaaatgatttctgctaatggtggcagcgccgccaaagtattaaaatgtctgatgtgtggccagtcggagtcacgcagcacgtttatggcacatattgcagaacatttgtaagagcataataattaataatgactaattactgtacccgaaaatacagtaacccattttttaattgaaatttgtaggaattatcgacctcaccaatgtgccgaatgcgatttccgatcagtgactgctgaacaaatggctgaccatgaagcaactactgaacatgttggacagttatacgtacgtttaattggttcaaccattaatactaatatgcaaattgattttccaattaattatgcatcatttgtattaattaggcatcgcgcaatccctacttggaccggctgtgccgttttgtgtacaacgactgcgattttggggacaaaaatgggggtctcgagaaagttttgatgcgcaaattggtcagcacagcggacgaggagcagcagatcatccgccaagcggttggcacaatgatgaaagccgaagaatggtgggatccatttttgtaaatttatatctttataatgtcttggttacggtacctttgcctttaggttactgtatgaaacaaattttaatttttttttttgactgccaattaaattacaattaaatttagcctaggcctagcaaactaagattaggcctaagcctatgcacgagttgccttttgtacgcgttgtcatgacactgaattgggtgctcaattcttatacatttttgtgccggatttagtgccaaagtgaacagtgccattgagtccgcaactgttggcggtgatcaacgcgttggacaaactgtacaacaatggcttcaacaacagcagcaccaccaccattttgatgctgccgaccaccagcaacaacagcaacaacaattctatgtacagtcaacatcatctaccgtaaccggcaacaaccgtaacagcaacaacaacagcagcaaccaatcccagcagcagcagcaacgtgtgtccagtgacgagttgaagctggaacaactgttgatggacactgttggggttggaggcggagcagttctcggtgcggtggccaatgtttcagcggctggcggtggtgccggtgttgtggcacaacaattccaccaggcatggcatggagaagagatattttccttttcttctgaacttggcatagaattgtgccatctaaacctgtttttgtttcttgcaaaaaaaacatttctaagtttttaatttaaacttgtttttaatgtgcaatttcaaaattctcacctaatccgaagctgggctaatagaaaatttcataaaaaatattttaacgatttatttaaacatagaaagtttcagaagaatctgcgttaatttgccatttaaaaaatcaaataaataaatatttttgaattttgtcattaattttgctttaagaaatttttttctaaacctccccttttatgtatatgcaaaaagtaccggaaaaatttttttataaattattgtgcaatttgagaaatcaaattccttaattgccccaattttatcttaaaatagattttgaattttcatcatttgacgcggatttaggcgaactttttgggggatgacattggcgctgcggatgaacaacagcaggacaaatcgccatcagcaaatgcgtgcagttcaatgcttcaacaatttatcacacaacatcaacaaccacaacagcaggcggtgagtgatcggaactgtgccgtggcattggcatttgttgatatcaattgatcattagtgatcaggatttaacaggtggcagtctggtgacagtattttcttgaaataaatttgctggatagacagactataagccagcagtctaatcaaaattttaacaatttttaatttttttttatgaatgattgctttcagtaattttataaaaatttatttttagaattatttaaattttttgttgtgcataaaaattttttcataatattttaatttttaatgaaggctccagtaattttttaaaatttatatttaaaatttatttaatttttgttttaggcgtggaaaagattttcataacttttatttaattaattaaattatcaatttgtttaaatattttatcatttacataatatttttataaaagtttttaaatatttagaaaaaaaatttccacgaaagacatttcttttaaacaaattttttaaaatttaattaataattttcaactgaaaatttgtttaaagttgatgacacaacactttgacggggttgtcgagcagtacatccatggccagcagcagccaccgccgccgacggcgccgcttcaattggccaacggtgaagcacatggagaacaacagccaaagacagtgaaggggcacaagccgtgcaagcaggtgttcgagaatgtgcaggtggggaaaatggaaaaaaaaagttaattaaaaaataaaaagtgaaatattatttaattttaattttaacatttgaaaaaaaatgaaaatattttttcatttcaataattgaaaagaatattaattaaaatggtaaaatttaaaagaatttttaaatcaaaaaaagtatatattaaagcataaaacattttgataactattaagaaaaaataataataagcataatacctaaaatgaaattaaaatagaaaaaaaaaatttgctaaaataattaattaaaatcaaaatatattatagtaaactaaactttttcaataaaacaaaataaatattttacagtgtttgaagtgtcgtcaatgggtgaaaggacgtggcatatgccttttgtatcacatgaatacaaggtgagagaatcacatccttttttggagaatttggcattttgtatttatagaattataaaaatttatcagattttttgaataaaaattttattattttttaaatttcctcatcgaggatgagacttgttccggcatttttcacgtttggattggatttttatattccaagctatgaaaaatgccatttttcagccatttttttctctagaaatttgacattttcttcccgccaaatttggcattcctttttttaagatttttttatagtgggaatttggcattttctcaatttagaccttccatttttagatattatttttcgtgggaatttggcactttcttttctaccaaatttggcattcccatttttcaaccaaatttgg

SEQ ID NO: 11445 - DNA, 1406 bp, Heterodera glycines
tctagagtcggtgaacaaatttaaaattttaaaaatttaaagggggtcttttaaaactttgtttaagtgggcaaagtttccgtcatcaccgcagcttatataaaattttgttttgctgtgcacatttcccaccccaccacactttgcctcgacatttcaatattatgtccaccaaatttttaaataagctgaatgtgtgtgtttataagcaatgaaaaaaaagaaaaattgtgtgggaggggtgacgaattttgatcaaaaaatgtgaagtgatcggagaggggaaaaagtgattggatccaatggaatgaatgaatgatgtgttgggaaaggtcgctgttaaatcacgcgctaattccgatcgaaaaacattgagtgatcggaaatggaacaaacaaaaaatggatacggaaggagtctgatcaaaaaatgttgcaatcggaaacgaaaaaccgaatttttgttggggggaaagtgtgagggtggaaattaggaattttgatcgggcaaattagggagtgatcagagagactaaaaattattcaatgaaaaatgaaggagggtaatttgtgatccaaccaacccaaagaattttgatcaaatctttgagcaatcggagtgatcggacacggaaggacagaaaaccagataccgacgatggatggatgaaggaggaagcctgatcaaaaatgttgcattttacttgatcagcaacagattcccaacccatggagttgtgatcaaaaaaaaactgtgaatgatcggagagggggaaaatgggttggacaatgaaaattgataaatataaatgccactgatcaaaaattttatgtgatcggagaaggaaacaaaatgaaaaaggaggaaaaattaaatttaaattaggaaatgcatttttgagtgatcaaaaaaaggaacaaacaacgaaaaagatggagatttcaatcaaatacaaatattttagtcattgaatgaactgatcacttcgaagaatttgaaggcggaaggaattcttatagaaaattgtgcatatttattgctaattagagagaggaattggtccgaatgatcggtaatgagttgaatgttccttcataaagtactgatcaaattgacataaatcaggggaaattttaaattcaggttctgactgatcggaaatttttgcaatttgcaatcaatttgaaaggaacggaaaaatgttgatcaaatcgagattttaatcagtggatggaggtgatttaagtaagcatttaagtaaacaaaaacaaaatcggattctgactaaggccttaatccagatccagatcgccaattttttgatccacccggacccaaaaaaacacctgggatttcaatcaaaaaaatccgatttgaattgatatgtaaaagtgatcaagaatttg

SEQ ID NO: 11446 - DNA, 2275 bp, Heterodera glycines
caaaaaaaaaattaataacaaatttttttttgatagaaattcattatcagcgtcatcatcatcaggacaaggcaaacaaacagctgagtcgtcagcaaaaaaaagagatgtttttttcttcaatctttgtaaaaatgaaaggacaaaataaagaaaaaatgttttttttaaatttagtaagaaaaatgattattaaaaaatattgaaaattggaatgcgaaagagtaaatcataaacccaaggcttcaaaatctgggagctggaatgtgaggcttaaaaatttcagaactatcggatattgtcccaaaattttggtaaatgaatcaagagccttaaaaaaagaaagaaatctaaatcggaatttcaaggttctcaaagtttcggaaattaggttatgaggtaaaaaacaaacaaatttaaaacccaaaaaatttccgtatttaatgggaataaaatcgacaaaatctcgaaatatttatgtctttaatctcattaagtttgtaagaaaacgatgcttttattgaaaatttgagtttcttttttttaaatttcgagtcgacattttacctttttcggtattttgtcgtttttttttttaatcggacatttttcccccatttagtgaaaagaaaatcaaaattgcttcctcgttttttaaataaataacattcattaaaaaatattaatgtcagcagataattttgtccgacaacaatttgcggtaaaacgacggacggtttttgtccctttctcatcaacaacaaacaaacaaataaatatgtaatgatgaataatgacaaaacaattaggtaattagatgaacaacgggttcgctaaacatggaaaatttaaacaataccaattaggtgttaataaattaaatagcgcgctaattgatttgtgcgttaattagcacaaaaaggcacaattaattggtcgctcaaactttcaggtgaaataacacaaaaaaatgtggtggcaatctttgacgaatttgtacaaaaattttgcacaaatctgcgaaatggatagtgggtaattagggggtaattcaaatcgtgagtgtgccctgcggcaagtaattaacaaattaccgcctttaattacgtaataaaaataacataacaatttttattaccttagacaagagaaggcttgaaggggttgaaaaaacaaagaaagagataagttaacatttaattgaattttcttgggattaaaggacaataaattggaaaaaggacatttgaacacagatatgttaaatcaataaatatattttttaatttagagtaatttaactattaaattgatttgcacaagttttaaataaacaaatatatttttgagtaatttaaaatgttaaattaatttgcattaatttaaaactcatatagttaaatttaaaattaattaaaaaaaatatattggtgtaaaactgtgtttttgtggataaatggacttttaagaaaagggaaaaaattatttgttttccaaaaaaatgaaaatgtaatacgacggacacaaaagggcatcattcatcatccatttcatcagcaaaaatgaaaaaatgtgttatttgtttttaaatgtctctccacaaaaagggcggcgggcggcccagacagacgacgaaagcttgggaaaacaataaaaacaatgtaaaaattgggaaaaaacaaaataaatacccaaaagttattattattaaaaggaggaattaaaatttcaaaaaaaaaagttttgagggggttgggttttttaattttaaaatgatgggcgaaatgaacagattttttaattgtaatttatttttaatttaaataaaaaatatcgagagaggggtggggcattttggtgccatgggcgccgccattggaaagggggccccgtccttgaaaatggaacaatttctttcaagaatgtccttaggaaaggggccccgtccttggcaataaggacgttcacgtgaaagaaatcctgtccttggaaacggagtaccttttcatgtttttttctgcgtcttttttaagatgtgtttttttttttttggaattttctagtagcaaaaaaatgagtttgaaaagtttcgttttttttttaaattttgtacgcaaattgcaatgtcaccttgggaaaaaggggcctcccgtccttggggcactgatttgaaacgccccttttaagcctaggcttatccgtccttggagaattcactaaattatttgctatgtgcataccgtatttgctctttttatcccccgcggggggatta

SEQ ID NO: 11447 - DNA, 1683 bp, Heterodera glycines
tggagttctgaactttattacatatacaacagttgccctcctgttagcatcagcggacgacccctcgtcgtacgtttttctgtttttcattttgaactttcggctggttaaggtgttgatgatttcagacaacatgctccaaacggtgagtatttttttgagccttttgtgaatgcccttaaaaacggaagtttccttcgacaggacactgtagtcgaggacacttcacgctcattcataacggacatcactcagaagagtcagaagtccgccgtattgggagcccttaagaaaatcaagaatggttacatcggcggggctcggtaagaaggcattttgaaatttaaagtttataaaaattaagtgttgtgatgggaaatatttcggacttttcatccaccacatccgtcagcaaattggaattccaagacggaagtgttgaacagttgttcacaaccaacggagaagctcagccaagaagccttcctcgtgaaaccccttatgaatcaggtgcaaaacagcgattgcaactgatttaattattatatgtcaaataagggacccctcgaggaactttgagacggtcggattcagtgagaggacgttggttcaaacagtttaacactgtacaagcggcttccatgcggtattattataagataccggtcggcatggggatccggccgggactcctggtcccggttttatttggaacaagcactgggattccgtcccgtttttttccaaatcccggccttccaaaaacccggtctctgtttattatcataataggttgattttggtatttattgcgttttttagccatcgttcgattgttttggacagcaatgatgctggttgtttgttcatatttagcccttcgatatttccgctttagacttgctgaaactacgcttggccaatgcgacagtgaaaaaaataatggagccgactgtggaggaggaagaagcggttggtttatcataagtgaaatggggttggattcggccgggttgagtcgacctccccgaacgggtggaacttgtcgggttcagtccccccttcctccgtgatcgttcgtttcactatcattcttacaatcagcctcagcatactcatctcctctcttcttaccacaccgactccatcggggagaacagcaaggaaaggtctgaactgaccgatgattgacggaatcggacccaacttacgacagattgcaacacagtcaattagaagagatggaagttgcggaccttatcacaatgctagccgaaactacactgctagatgaacaagcgagcataattcattttctgtggttgaaactcggccctaacttcgacacgaagttggccaacatcggcggagttacggttcgcatactcattgaggaggtgtacatcaaagcatgcgaatcgcgcgattggtcctgggctcgtcttacggccggactgcttaaaaaacagttggacgagttggaaaaagcaggtgggaaatttgctaatggcagcgaatgttgattaatccgtcggcagaattgtcggcaatttatttctataaaacataaagactccaatggattactatcgtttgatcaaagagtttaagtgactcatttgctggttcgtcagaagcaaataaccgtcggaatgccatccaaaaatgaagaagcgataacat

SEQ ID NO: 11448 - DNA, 3309 bp, Heterodera glycines
  unsure (1)..(3309): unsure at all n locations
aaaaacaaggaagagctgtgcaaatttcacccgtgtanncagcgaaggtctgacaaactcttaaaatttctttgcatatcttttcattctcacagatccgaattcgtttattctggctcaggtccctttcatgtgtttcaatcactgagttttgttttgctccttccgttttcaggagttgattgtctcactcggttcgttggtccgcactgatccgcgattgtttgtcgaaatgttccgtttgcgtatcggtctgataattcaggttcatgactgaataaaattgcgcgtttggcattgttgtgttaaatcgctttttgatctttcaggtgctagcgagtgaactcgccaggttaaggaatctcaacgctgaagctgccagccaacatttgctctcggtcagcccatttgaactcaaatccatgctcctttcgctgttgagtgggcggctgcttgaagaatcggctgggcccggaacggaaaacgaattcggcgtcaaagggttgcgaacgggaattggcagcttcagaaaacaaattgaggagagaaaagtgcgattaaagctgatgtatatagagcagtcactttttgataattaagtcgatgcgcgaaagggcaaagtcaatgcgtgccagactgagaagcagcgaaaatttggtcggcaagaaaatggcttcttcgtccgcctcaaagttgtcgtttgcctctttgactgctcccacagtggcaaacgccgaagaaagtccgtcggacagtgaagattcgttggccggtgaagagtttcagttcggcatttggctcagacaccgacgcatcgacggagcactgaacagagtgccgtccaatttttatgcggttgtcctcgcacagacagcggatttatttctcaatggaacaactttagaacctttgggataccgtccgaatgtttccacatggaatttcgattgatgggattgttctcagttatggactgacccaagaaatgacccgaaacgaaataaaatttgcattacaggtaaacacaacaatgaaaaaacactgttaaaaataatattcattgtcaggtcgaacaagtattgaaccaggtgggatggatgttttatgaatactgaccaatttatgggtaccatttgttgacttttgaagattgctgagccagaataccgagaactgattgtcgaagtgctgactctgctgggcaagttgaggcttctgctgatggccgaccctcaaatccccgacggtcgtccgtttgaagtcgaatacgtgctacagcatgcaaatcgggtctttgtggagcacaatgtacaatttcatttgcttcagtaaccactttttgcccactggtcattttaatgtttagttcaaaaatcaatcactttaggcagaaatgggcacaattgtgttagagtgctgtggcagtgggatcggatgtgacggtgcccgtggaatttgcaggcatttttacgacacagcaccggcaggcgaatttggcaccgttcattatataattcgtgctgcgatggatattttcgccccttcctagtcacactgcttgtttcatagatttattctgttttcgtaaacaaattgcatctttagccgataaacatttactattgagtcaatcaattttcgaactttatttggtaataaaatccacaaaagacaaaagtggttcgtcgttttgtttcacttagcacattcattgatgagtgtttttctgaactccgtcagaaggctgtccgtcatcagctcagccatgaaatttcttaggtttttgttctttggtacaattggcacattgttttgttcagacaacaagaagcgattgacatcgaccgggagctgttcacctcgtgcggtttcagcgtggaccaactgatggaattggctgggttggcctgtgcccaggcaatcggtgaaacgttcgaaaagggtaccttgaccgataaattaaatttacttggtcacctaaaaagtgcctttccttttttcagggaacgttctcattttgtcagggcctgggaataatggcggcgatggactcgtttgtgcgagacacttgaagcattttgttcgtttttatgttatttgttagggcatttcttttttgggcaatggtaatgaaaatgttaatcaaagacggacggagaattaatttcccatttgaaagggttaattttaagaaatttaagggattttcgccttcgattctctgtccaaaaccatcacaaaatgatctgatgcaacgattgatggtcaatgcttttgataaatgacgaatcagggctgcacgaaaacaattttttaagaaaatgaaacgaaaaataataatttttcacgaaaaaaacgaactaaaaatttactaaaacgaaaagatttcgtgcagctctggtgacgacgaactgatgtaaaattatttcagcttcaattggaatgcctcggcattcccttcgtcgaatcattccctgaccccaattctattgagaagttcaacttcctcgttgacgcaatcttcggttttagctttcgtcccccaattcgggagccattcaacaaaattttgaagcaaatggaaagtgtccaaaatcgtgtcccaattgtgtcaattgatattccttcgggtaaatttgaacaaccgacggatttgtttttaataaaaggtcaacccaaaggttgggacgtggagaaagggcccccggatgaaaagagcggtttgcccattctgagccctttggcactcatttcactgactgccccgaaacaatgcgcacaattttttaaaggagaatatcattttttgggaggccgttttgtgccacctgcgtaaacttttaacaattttttcttgtgaaattgaacatttaagcttggtacagaaattcggacttgaaaatatgccaccatatgaaggatcttcccaatttatgcgtcttaattgttaaataaattgattatatatttttattctaatgcagataaaaattgtaattaatcaataaaatgaataacaacaatcaatgcttatatctcatcatttcattcttaacagcattgttcataataaaaaagaatagaattaatggctgacgaaattagaattttagcgaaatgaccgctgaaattcagcagcgtcattaccctcacttctgtaattttgatgatcttcttcaccagctgaacgtcataaccaaagaaagtttagaaccctctgaagcagtgcaagtgaggtattttggtgagtatttattgttcgtatncacaatgcattttaggaaggtccatttaaacagcacccgctga

SEQ ID NO: 11449 - DNA, 1531 bp, Heterodera glycines
  unsure (1)..(1531): unsure at all n locations
ttgcggggcccggcccggtttgacattgcggacactgccggagaccaggcggactataagcagaagttgctgcaaatcggtcaaacgtacaatgacgaattacgcaaatacgaggaggtgactaaaaaagctctggtcttaaaaattcatttcaatttggctcttgtcgtttaacatgtcaaggcttgcaacgagtttacgcaacatgtcatctcactgttgcgggacatggccacggttcgaccgataaacaatgatgaagtaagaaacagctcaattcctgacccaattgcctttccattttcgatgcaccgaatggttgggatcatccaaaagaaattctccaccatccaagtgcagctgaagcaaagtacttgcgaaaatgtgatggtgcttcggtcgcgttttcttgacgcgaggtaattccattgttaagtttttgaatttaaatggacaacattgcagaagaaagcgtcggaacttcagcaaacaggcgacggaagtgctcaatgaatacttttactcccacctgagcaacccctacccaagcgaagaagtcaaggaggaattggcacggaaatgccaaatcaccgtgtcgcaggtgtccaattggttcggcaacaaacgcattcgctataaaaagaacatcgccaaggcacaggaggaggcgagcatgtacgcgcagaagaaggcacagcgtaagtggcctcgaaaaggcggattaaaatacattgcggtgaaacaacactatgtcccggctaattagctgcgactcagctaacatttcaatatattgcaagactatatgcaaccgcatgtcgcgaaaaaaaccataaaaaatattgataaatttagttgaatagcccattatttgtttctcaacccaatctgtctttcttttcagtgacccttttgcttattgtcgatgtttaaaaacgaagcagtggcgttaaattttaaaaaagaacaatgtcgtgactttgtcattaatttctcacatttcacttcttcagcttctccctacggcgttttgtccggcacttccgctggggccgttgccgtagcggccaattcgatgctgagtccgtacgcgagtatgctccacgccggccagaatgatctgcagcaccaagtgatcgccagtgggttcgacttggcatcttctgggtacaacccgcagttagtaagtttcccggatttggccgaagttgggactttattgtcaacattggcaaatttcagtttcaaatgggttacctcccatcacaacagacgtcgacttcgtcaccaagacaatgacgaagaatgtaactgaaagcaataaactcgaagtttcaatgaacacataaaatgaccacatgcagttttaatgccattttaaatcgtcgtaaagagggggcggaggagaattcgcttctttttctttacatttaacaaaaactgataaaagtttaaaaggaaggggaagaatttttttcaanaaattgtaagagatattcttacaattaactaattcacttagatttctaaa

SEQ ID NO: 11450 - DNA, 4663 bp, Heterodera glycines
  unsure (1)..(4663): unsure at all n locations
agagtcatatcgtgccacaacagaatccaaccgacactgacgctcctttttataccactgaaaaagtgttgaatggcaattcgtacaaaaggagtcacactaatggcacattattcacgtacgtgtgaaattcataattttaaattaaaatgcttgctattttattaaaacttttaaaaaaattttacgcaaatattaaagattgtttgtactgtaatccataaaaaaatatcaaattaaagtttttttgtaccgtaatccgtaaaaaatcaaattaaaagatttaaaaaatgccttataaatcagtttctggtgcgaaacggtgatctgttggattcgctcaaacaattccacaaatgccatcgctgttcgatttgatgggggcagaaccgaattaaattgttgattattgcctcttaaatttagttaatttttaaatttaattattttcggagtaattaacacctacctaattgtcagaatgatgacaaattcggcaagcgattgcttgtccggtgcatcaaaagccggattatcttctggaaattggttccgctccatattgatggaacgcgcaaaaatgcaaggacctgtcaggaataagtttaaataatatttaattaaaaaaaattaaattcatttgtttttttcctgacaagaatttttgcttttaaaaaattatttatctcaatctgatttggcttaattttttacttttttgaataaaatttgtcattttacactcctaaatgggttttttaaagcctaaagcctagctattttggcggttttagagcctaaaaattggtgttctagtgaagaattgtttcattttttggagcatattaaaccatctattaaattaatgatgtaacccataaaatatttaaaaaataattaacaaaaaatgtaaaaagctgcagtaaaatgccaaaatttgaataaaaattcaaaattcagtacgtatgaggtaggaataaaaagctcaaatattgaaaaaaaaaattcgtcgttagtgccgcacataaattcataaaaaatttgagatttcttttatgagttcattanattanatttttgcattcactgtgaagaaaatgtatcattttttggagcatgttaaggcatctgttaattaaagcacgtaaccttataaatgtttaaaacattaaaaaataattaacaactaaatcgttaaaagctacaataaaatgccaaagctataatgaaaattcaaaaattcaatacgtgctatgaggaaggactaaaaaactcaaatattcaaaaaaataatagttaaggccgcacataatcatttgtaaaaacgaaatctagtttataattaatagggagagataaattaatttaatatttttttaatattatcaccattatgttccgatgctgacactgatccgccgccaaagttgaaagaatcgggcaacagatgaaaggaaattgccgccgaacgtggtgagaaggcgaagaagcacaaaaaggacagcacaaataggaggaacgggagagccttatggaggagaaaaaaagtgatttgatcagatcagtggaatgatcgtaaatgttgaaaaagtgatcagaaaatggtgatcaaattcacgccaaaattaaccaaaagtccttgataaaagattttttgaaatcgttgaaaattatgaaaacggaaaactaaaattttcgttaagaaaagctcaattaattattctttcccaaaaaaaaattcaattaacaaaaaaataatgagaaatgaaatgaataaaattattatttaaatattgaataaaataattgtataaattatttattaataaaattgaaaaaatattcataattatggtaaccttaaacagatttggcagtgaagcacttgtcttcaccaaatggaacaacaaccgtttggtggccacttccacacaatggagcagttgcattttgtagatgagaactgcttgctggtctgtgcaaaatttaactcattttattatttgaaattttaaaaataggccaaaattttttttattttttattttattggcattgccaccacaaagttttcagtaaattatttgtgaaaattttaaattgttagagttccatttgcataaatgttctccaaaatattaaaatcttaattgtgcgcccaaaattcagagattttttttttgtaaaaaacattccgccaaatccagggatatccatagcattttcttgttttttaattttgccgaaatgcctgattctgccgatgcacatccaaaatgctccgttgccaccatcatttgctgatttgctgatgccatactgcagccacctgttcctggttcagctaatgcccatgggtaattattatttgtcactaattgcggttcattatttgttgttgacgatgacgtcatcatttcatgaccattaatggtacaaatttggtggtaaacggatgttcggtttgattgaccagcagcagcttgttgttgctctccactaatgtttgttccaccacaagcattaatattcatgttgttgttgatgccatcattatcatctcgactattcaactggggttgagaatggttttaaatttagacaaaattttcaatggtatcatattttattacggtagtttaaatattaaaattattgaaaaatggactaagtattcgaatctaaatcataatgaagtccttccatatgggataacaaaccctaatttggtgccgtcgctcagatttcggcgttggcgaacgcgaatacatggcaatttgtcagcaaaacattatttaaatatatataatttgtgaacaacactaaacattttttaaataaataaataaaaatgattaaaaaaagtaacgaatcaataattatttttaaattttaatgtaaaaattgtaaaccaattaaataaaatttaaatttaaattttccattttgaatttcacaaataaaagtgcacagatttggggttggtggatgagtttagtgcgaacaatggacacttttgaatatttcctgctggtcaacccgccgcgttgcgttaggcgatgacattccgccccccaaattggtggctgatgacgacggggcaacagcaggcggccggccgatcagtgtccgatcaaaaccccaggcggaccaaccggtatgaacgacgacgacaacgccgacgacaaaacaataaatggcggaggaatggtggtgatctgatcacaattcaaaatgtgtgtgtggatctcgactgctgatcaaaatgaaaaagggaagggatgtgacaggatttcaacaaaatgaaagggttggtgggattttagggaattatgagccaccggcttagttataaaagttttgaaattttattttattatttgtatgataaatttaagttttttatacaaaaacgataaatgaaaagcatattggaattccgaaaaaattatgagttatgaaaattgttttttcaaatgtagataagatttttattttcttaagagataacatattacataattttttctaatttttaatatttgctgggtaagaaaaaattatatatattgtgtcgaaggtttattcgcaaatttgaagatacgaaatccattaacaatttagcacatttacccaaaaaaaaagagaaaaaaatgtcacattgatggcaaatatataattttgatttttttacttttaccaaaattattttgacaataaatattttaaatttatgaaaacatgaatttggggctcaatcacggcaatctatattcataataaatccatttggtgcgcaaacgctgtgttgaactgctaaccaatcccataaatgtcaatcagtcaatgttttgtgacctaattaatcccatttgaacatatatttgctgcaacttgcgctccgtcgagaaatggtccatttttatttaatatttaataataataatagaatatttaattataaataaatttaagaaaaattgccgatttgtggcacaataagatgaagaatttaaattagttcttactttatatgttcaaatatgttttcttaaatttacaagtgttttataaagatttgtttagttttattaatagggcctgaaaaaacataaaatcggaaaatatgcacataaaaggtgaaaaacacgcacaagaattttctaaatgagaacaattttttccaaaatttcttaaaattcattgaaatttgaagttaaaaacctgaaaaatagcaaaaatggtatgaataatttttttttgtttgaaaaaaatacaaataaagcctattatttattaatttaaagaaaaccgagtaaaaattcgaaagtttcactttttgtatgagttcccaaaacggaaaagtaccggcacatcacgcattaattaatgggtccgattgacttcataaattgattgattaattgaccaaaattaaaatgctttgtttactttaaaaaatgacaacagaaaaaataaggatgatatagtcgaatcgaataaaaatcccgaaaattgaaaataatcacaaaatgctaagcccaactaaaaatcccgaaaaaggtttaaagaaaaaatcacaacaatccaattcatcaatcacaatatcatgcaagcttttttaatcatccgatttgnaaaatatcatcaagtatatgaataa

SEQ ID NO: 11451 - DNA, 2518 bp, Heterodera glycines
gataattttttaaaaattccaaatcttttcacaacccgatagctaatctaggtagcgaagctcaagaagcgcgaagcgctttatcccagctaaatagccgacggttcacgcacccgctagttactatatatgttatattgacaaggagtttcgtttgcaaaaacaaaatctcccggccgaaggccgggagcgccctgaaagtgatggaagggtcttacaactttttgaggagaatccgggaaaactatagaaaaaaattcagcgcggacgactgagtccctgggaccgatttctcactttttcttgcgtttgaaggcccctaactttttttctaaaacccgaataaaaaaattcccgctgtgagggcactccgcagaagtgtcctctataatccagtattttttattttttgatcagaccaaatcccggacctgtacagacacggagactcagttaatttttttttcccacttcagtaccaggcgaataactcattaggctttgatctgagcggtgggtcgccagcgggactattgtagagcttgaaaagctcgatttttccaaattttaaaatttcaaaaattttcaatatttttcgagctaggcctaaaaaacggttttcgggtttttgaattttaggattttttaacgaattttcccataaaaacggagaccacttccaaaacatagtttttcgagctctatcgattggtgatatttttgaaaaaatttcgattttttcccggaaatagaaaaaatttttggcctgagcgggacatttgagtcccgggcccataactcgtcaggggttggttttagcgaacaattgccttagaacatttttgtagcgcattttaaatgctatcgaatggtgtactataagtctggaaaatttcaaaatttttcgagctaggccccctagaaattttcaaatttttttttgtgtgccaaaatgggggtgaaaattttttttctggggtattttgaggtgctgaatacgaatataatgtttattttaagttttggaaattttagaattttttaaaaattcgaaaatatttttcaattttttgacccttgggattttgggctaatatttgaaaattcataactcaatgaaggactggtcaatttaagtgaattaaagctttaaaaatggagaaaaatcaggagaattttatgggttttatttggattttctagcataaatatgaaaaaagttattccagaaattctggaaattttcgatttttcagaaaaaaattcataactcggttctgaaaaatcactctggaaaaataatatactagaaaaaatcgcaattttttgctctattatataaattttatttcatatttttatcacttttttaagaattgttataaaaataaaagtgattttgggattcgggaccaaaggggtgagcataggatttttgagtgaaaaaattttttcgacaaaaattttccaaaaacatgtcattagggctatttgaggctgctgatcactaatctgacatcagatttcagctatgtcatcgttaagccctcagaatccccgtgtgattggggattctgggcataattttttttgggtggggcaagttcgaagccggacggtgtacattatttttctttatattttgggttatttttcaatgcttttattaatttaaatgttttgcttttattaataattaaaaattttttaattttaaattaagttattttatgattaatgttttttttaattaaatatttatttgtttttcaattaaataattcatttgcattttcaattagaatttgtcaaaaaataattttttaatttaaataaatattcaatcatcgtatttccaagttttttctcttataatcactgttgtcccgggtatttgcttatataaaaatatccatatttccctctttggctttttttgtgattttttttcagctggttgtgtacataataactttttgaatggacattttccctttttgaccgacttcaactcggcctcaaattggcacttctttcgccatgtttcgagcttttggtggacaaacattttgatggcaacaaaaaagtgaattgttttttaggggttttattgttttttatggattttctgccaaaaacgggcctccaatttcaaacgttttttgtctaaaaaccactgaaaataaaaactttttttcaaattctgtttttttgtttgtaaaagtgcgctttttaggaattttgctttttttacaattttaattcttaacattttcagcattttccctttttgatcgcactcaactcggcctcaaattggcacttctttcgctacgtttcgatcctttggtgaacaaacatttcgatggaaaaaaatgaattgtttttacatacttcaaatgtgcaatggttggtttttgagaggataatacaataatttacaaaattagcttggtttcgcaaagcatacgcaaagattggtggtcacaaatttttagaaatttttttattacggcat

SEQ ID NO: 11452 - DNA, 2290 bp, Heterodera glycines
gttgaattttcaggcgtaatttcccatcatttagtaaagtttttttaattttggaagtggtaaattaaaaaaattaaaataattaattaagccaagattaaagttatggaaatgaaacttgtgattaattcgcttgaatttttaaaatgttctttaaatttaaaatgttcgtaataaataatatttttattattttttgatattctttcggcataactaatttttttttaatatgtcatctatgtttttttatttcaggttttacttacaaatgaccctcagcagttaattaagccggaaatcagttgtattccgcaaaagcgctgcatgaaaatgagagatgttgatgacctattagagaagagaacaagtggttgaaaagcagcttcagccattagcataatgtcacattaatactaattaatgcataaatttgactattcaaatgtttattaaaagtactgataactatggaaaccctaaataaatcgaaatgaggcgaacctaaaaaattataaaagaatttttgcattaaaaaaatattttatcgaaaaaaaaaaatatttttttgggaattcaatcacccataaacctaaagtgaggctcaccaaactcttaagggacgccaaaaagaagagaattataagtcgttacgaaacgagccaaaaattcataatgatggcgatttcgggaggtaataagaaatggaaaaggaagaattgacattgaacgaagcaaaagtattttaaaaaatttaattagttttttcatatttttgcaaaatattaattgcttaaatttgctacgtttttcactttttggcgatggctccttcgattgcattcggtccacaagatgcgcacgttgcggcaaatattgaaaacttttcgaatccgtgcgtatgcggtaccattaggctcagttcggcgagctgagtaaaacggtactgaatacgcgcagaaccgttcactttaagacaaatagcaagtgtcaaaaattttttttgaaaaattcagtggtcaccgaagtttacgctttcggcatttgtcgaagagtgaacggttctgcgcgtataaggcaccgttttactcagctcagcgagctgaatctaatggtaccgcaaacgcacggttttggcgactttaggacaaattttttgttgtctttgtgccaaaaaggggccttcattttcaaatgatttttgcctaaaaccaaattcaggccattttttaggttctttgctttttttttgcaattttatattttaatattttcagcaactgcgcacaatgcttggatggacattcttccctcttttgaccatgctcaactcggcctcaaattggcattactttcgccacgtttcgaacttttggtggacaagtatttcgatgacaaaagcaaaatgacggtggaccagaaatcgcaaaggcaattttgaatgcggtaagtttttaaagttttctcggttccaaaaatggcccgaaaattaaaaaaaatcaaaatttataattttattgttgatttttttgtttgtgtcagttttttttttattaaatttactgcaaacattgcaacatcaaagaatggtcatgctgtaatgatacgaacataaaaaccagttttgaaaattttgaattttcgattttttgttagaatccaagtcgggggttcggaattggccaaaacatgtatcattgtcgggatcagcgaccccgaaaaccccgtaagacatttttttactgggccttacatttatatttttccattatagtcataaatttcttagtttggcaattacatggcataaaaatttttttttagaaattttataaaagtttgcttttgtgtaaaattcgctcagagcttcggtcaaaaaatcttgtccacccttattgcttccctttccgctaaattattatttttcataattttagttggtctgcagcgatgtttggatggacattttcccactttttgaccgtcctcaacccggcctcaaattgacactgatttcgccccgttttgatgttttagtgtacaaacattttgatgtcaaaggcgaattttttccaaattttggtaagtcttttgttagtttctttttttttgtaaaagtgattggtttttttgttacttaaaataatagtgtttttatggaatttaggggcaccaaagctttctcgatttcaaaaaatggctgaaaattattttttttttcaaaattaactaattcattttgattttttgtgttaaagtgccggcttttttaagggatttttggtcatgt

SEQ ID NO: 11453 - DNA, 1687 bp, Heterodera glycines
  unsure (1)..(1687): unsure at all n locations
gagagaagcccaaaaagacatttctctcccaataattttcgatatagggactagagcaatttataaaaacataaaagcacatacatattttggcattttggcacataaaaaaatgtctcacatatttcggggtttggcacatattttggtattttgagaaaatctgtaagaaaaatacaagaaaattgaaaaatacattccttaaaatccaccttcttgtcctattttaaaacattttcaaaattttttttatttacttcgaatagtgaaagtggtaaaaacccaactcgtactggtaccccgactcgtactaagattcctaactcgtactgtgcaacaaaaaacgaaaaaaaaacacaaaatcactcaaaaatttttataaagttgtttttaatttgttaaaaaatcgaaaaaagcaagcaaatgatgaaaagctcgaacaatttaattgaattcatataattcatagattttcatgcatttttgcggtttttaataaaaatgaacaacctaaaaattaatatattattctttctcatgattcttcgatgcatacttatactttcacagaaaaatttgttctgttttttcattctataaaaaataacagcattttttcaataatagatgatctatggcgagcttttgtttctaaaattatattagatataggatttaaaatgaattaaattaataaaaagattatgtgtaataaataatacattgtttgtctgttcatgcattcatcagacattcatagttagtattctttttatttatttttgtgtatttaaattaatatttaaatatttattcaactttttgacctcatatccttttatgtcatttatgtaaaaataatattttcatattatgcgttttaggttttgatattgcgaatgctcctttatgtatagagaaatacattttttaatatttttttgtcaaaatgtgataatttcttattttctctaaatatgatgaaataaggttttaaaaattagagcaaattgtatattttctagggtgtggcttcggagttttcattagtgtaattcttgacataaaatcaattttatttttttaaattttcttgtcttctttccctacattgagagagaatgcaacgaaattcaaatgttttttatcagtaaaaataaaaattttatttttcaataatatgataaaataactaaattgtttatatttgtttatcattcacattcaagcttttatttttgtattattcattaaatatttgtattttacaaaattattttatctacttaagagttttattgttcagtagaacatgaataaattagtagattaaccttttttatttttcattaaatatttactataatgaattcttttgtattgatatatttccattaataatccattatttttattaaaaatttattaaactatttttaatgattttagtttttctgtttttttttagttttttttcctaatttattttttacgattanattttttcataagagttattcggctctccttacggagcgaattattttttctaatagaatatctaaaaaatacgaaaatgaagtttattcgtatgctataaaattcatttatttttatttaaatcattcaaaaataaaaatgtcngaactctgngattccgactgccgatcaattgatcagcagaatt

SEQ ID NO: 11454 - DNA, 2775 bp, Heterodera glycines
caaaaagaaaattcaaaatatgtttaatttttcactcgaacccccattcttaccagtgcttgtttttcccggttgccctaccgggaccgggaaatagtttttgaaaatccgggacctcggaggaccgggaattcccgccacggtcccgtcctaccctacatgaaatgtgttgatttgcgattttgcgggagaatgagattttttggaatttttagcacataaaaattccatccctagtaattagaaatgttttgaaattctaacgctctgcgaaaaacccagtaataagtataatgtgatttgagggaaaatcaaattttgcttcggggattgtaagcacagtgtcagatgaatgcgatggtgaaaaagtttatcaaatgaaacaaatcataattaaattttattcttttgcgacataaaatttgccagtcatattagtaatttaaaagtaaactcaaaaataaacaatttttaaaaactcttctatttcaatgtttgtctctcgcccgcgccggtcacaattcgttgtgtctgaaaactttcaaaaacaaaaattaatcgtttaaatattaaaaatatatatttatatataaatatatatctatgtatatacagtgcagcatcacgaaggattttgacaacttcgacgtgtccttttcgtgcagcaatatcaattgccgtgtctccttaatttaatttgaaatcagtgaaaaaaaaaaatatttaaattcttgcaacatttttgatatggaaatttttttaaatgcatacttcataagctggggaattcagttcaaaaaaaaccgtgtttgaatgagaatatttgtagggataatttgccgagagtaaaaaaaagagggagaatttttgacgcctcaatttacggcctgctgttgccagtccatatgtttaaattgtgcatattgttaagtattcctccacagtcctatgggctgcggcgccactctcaaaaaaattagtaaaacgaaacattttatttattttttctaaatttttatagtcaaatctaaaaaaattcagaaaatcaaattttcacagaaagggaggggaatagtagtgatggtcccattttcaaccccacgcgatttgtggggctttattaaagggtgaggcactaatggagggttgcgggaaaaatttattacttaccctttttgtccgcttggtcagctcgtgccccggccttcaacaatcgctgtacgatgtctttcaagcccaaattcgatgcccacattaacgcggtgacgccggccgggtcgccatgatgcacattggcaccattgttgatgagaagatcaactatgtacaacagccagaatgaaaattgcaattcgtaacgggtgaggggggggaaggaaagttggcaaaatatttgtcaaaaaatggattcacaaattttatttatcactaatttgagtttgagctatatatttctaattattatttattatatgggaaaaatttgtagaaaatttttaaagaaatcattttacatattgaaattcaaaaattttttattagattttgcgccaaaacccactatttatcaattaaaaagctgaaaaaagcggactcgctcaaaattttcttgcatagaaaaaagttcttaaggaaaaacttcaaaatttcaactttttcgcaattttcatgtataacttttttggtaattgtctaatcgcgaagcaatcgcttagaaaaagcttctaaacacattaatcttttgaatgataccaaaaattttggatttggatgacaaagaaaaaagttatagaaagttataggcccaaacgtgggggctgaactgaggtaaaccggcaaaatagtgcaggatatcaaacggagaagaggacaaaagtcgccgctaaacgtcgccgggatataaaattatttttaaaaaatcaaaaaatttgttactcaatatttaattattatttattttttgcgtcgacgtctttgttagggaaaaaacccaactcgtactgtttttcgacaaaaaaatagtcataacttttgtaaagttgaccaaattaaacattctttgtatcattctatagctattaacgttctttatctacctaccaagtttcaaaaaatttgatcaagtttgtaaaaaattttttacgatttttggctataacttttttgaaaagcaataaaattttcttgcattcagcagttcgattagagaacgttaatagctatcgaacggcaccaagaattggtcgattttaacaaaagttatgacgatttttttgtcgaaaaagtacgagttgggtttcgtctctttgttagttatgcaccacaaaaaaatgaaaaatttctcaaaaattcttctccaaatttatttatttattttcttgacaagaatttctattttaaaaatttttatctcaatactaatttggcctaattttttttttttactttttttgttaaaattttaccattttacaaccctaaatttgaaatttttagcaaccttttaaccatttttagtaactattttgggggttttttagaaactaaaaactaattattttggcagtttttagcaactataaatcccatccctagtaaagatgaaagatgtgaccagtgtccagccgggcattgttgtcacatgcggccatcagtggtgagatgccaaattgcggcgcgcccacgtcgatgttggccccgtgtttgaccaaagcttggcatacttcaaagtgtccatccatggcgccaacccaaaggggcgaaacaactgaaaat

SEQ ID NO: 11455 - DNA, 3734 bp, Heterodera glycines
atttgttaaggtgaactttgcgcgctatttgctcacccacggtgcaaacgttggacgcttggacaacaccggtggatttttgtcaaatttctgaattttttgtccaataatttattgttcccgtttcaggaagcgttttcgcactgatgctagctgccgaatctggtagtttggagatgtgccgtctgttgatcgaggaatgggcagctgaagtcaaccagcaagcaatcgatggcacgacacctttgatgggcgcgagcagtgaaggacgcctgaacgttggtgggttgaataaattggaaaatcgataacatactacctgactctcttcattttcagtgatttatctcatcgatcatggcgctgaagtccaacacacagacgccgaaggatacaactcgctgatgcacgcggtgaagaacgggaagactgaagtggcacgacatttgctgaccaatggcgcaagcactgaccaagtgggcaccgatggtgggcacaacttcattcttttgatgaatcattacacaatttcccctccatttctaaggcaaacgggcacgggacttggccgaagaaggaggacttgccgaaatgatggacatttttcgcactaccacggcagccgaacgaacggaggcggaccattgaggggtgaaaatgatttttttaaatttttcactgacataaattaaaaaattcattttcagatagcaaaacgacgaccaacagcagcagcagatgacaatgagagggaattgcggctcacaaacaatcggacggatctgatttatattcgatcattttcatgtatgatgtattgcaaatgtattatcgccatgtatattttgatttgcttgtcacgctcggatatttgctgctctgattgtacatattgtattattgtgcctaacaacattaaatactcgataaataaattgtttgtccatcaattcttggtcattttggttttcttttatcgaagaaattacagcgagttctccagtagagttcattcgcatcctcataatttacaagggttgccagtattgcattcagttgctgaattgcgtccgcaaaatgaaaagatcaaaaaaagggcggcaccatctatagtactaccttaaattcttcaaatattatttggatattataaaaaattatatgaaattttttcgtaaacttttatttattaaaaagaaagttattttatttaaaaattttgaactttctttaagtaatgaataaaatgatagttttctacaaaaatctttaaaaaaatttgaaagagatcaacataaggaagaattgaacctttgaaagaagtaaatgaagccaagagactaaacactaagcaacacaagtaataaaatatctcgttttaaaaataaatattaattcaatttttaataaaactttctttcttccaactttgctaatattttgagccagaaccccattcttactattttcggacccggttggacccggacctaccttgacccagtcgggtacccggacccggcctatattttagtcggaatgattattgtaataaacaattttggtattgattaaaactggtgatttcatctttattgattcagattttgtgaacttatttcaaaattttggattggcagatcatttggagtaaatcaaaagattttatatataatatttagaagaaagtgacaaatcactcagaaaacgtttatttaaattttgaaaaataaatgttctgacgataaagccgggactgtgctcaaaatcagaaataatatgaaaaaatatgtcaaaatatgcaagatcttaaaaacaatgcgataagcgaaaaggaattgaagcatgcgttatctcgaaaagccaaaacatgatgccaaaagtacgatcaatcatcagaaaatataacaattttctttgcaagttcaatcaatacatagccagcagcagcggaacagagggcacaaaaagcgataagtgaggcacaaatgatcagagacaaagtgccgacaaagccatggaacatcaaaagtgccatcgcaaacattgacaaagtgagcacagtcaaactgacgacattcatcacgagaaaagggaaaggcaattgtcggctcaggggattgccaactgcaaaaacgcagcagcaaatggacgacgaactgagcccaatgcacgcaaaaagcagccatttgaacacggacaaaatgacgacactgaaaaaagggacggacataacggaaattaccaacaacttttaaaaaacggctcccaattatttgctttttttattgtccacgatcgctgtaatcatttgttagaaaataatattttgcaaaattttggagcatcgtttttgactttgattttgggcctttagtggtgccaatagcggagaaaatttttaaaaattatggtatttctaataaattttgaccaaacacgtaagtttttagcagaattttgtaaatctagaaaaaaccacactcaaaaataaacacgaaaaactgacaattattgtggatttttaggctgaaatttaaggaattttgtgcccgacgttgtcgaaaagcgctgtctgaaaatttttttctaattttcttgtttttaacaaatattgtcaaaaatgatcattttcacgaaagaaaatcatcattccactaaagaaattaatgacccttaaaagaaagaaaaatgcttcaaaatcagtatatttaggagttctgtttaaaaccgtgtctttttggcccatttcatgccaaaaattgcatgccctcttatgccccttttttgaagaccggcgctcccgttttggactttcgagattggcattcccggtaattaccctaaatcagcatccgtttttgcttgcagctgatcgtaaacattttgtccagcaattgcactgctgttagtggtgttcgtcctgctgtcattgttctgatccgcttctgttccattatgggcttccatttcgattttctgtgtaaaatcactcattttcttttaatttctgatcattataaatcattcattattcatttacctgcactttgagattctgatcagtgtgatcaagctgaaagtgaaaagactcggttgtggcgttggtgcgcgaaacagtcggcgtgggcataacaatgagaagaaggccaacaaaagcaataagaaatgcgagaaattgcattttagaatttcaaaaatagtatttacaataaagtaaaagttaggatttattttatttttattaatttttgtacgaatatttaaataaaaatgtttggctgaataaattggcagtaaaaataatggtttattataatggtgaaatcgcagatgtgtgaactgatgagaaaatgttgagatcattcagcagattaactggtgcgggcgaatgcgattcatttgcatatgtaaggcaaagtaaacgttaaatcagggttcggatcgaaaatttttcaaaatcaggccatcgggcccaaaaaatcagattgtggggtcaaaaatcagaacattttgcaaaattgcttcaaatcagttatttttacaattaatttaatcaaaaatcattaaatattatatttttcgcctccaattatcatctttaaaaattttgggaggaaattagcaaatcataaattttagtgcattcgggataaaaaaaatcagatttttaagaattttttgcggcgtatttttccaaaaaacttttgggaaatgggcgaggggggagggtc

SEQ ID NO: 11456 - DNA, 1416 bp, Heterodera glycines
catttgcgcatatttccaaaatcggattcaaacttaatttttttaaagccctgataacataaacagcatttaaattaagaaatcgtattcatcttaagttttaatctgattttcaacataggcgaaaatctggggtaatcgataggaatgtcaaaataaaaaagagaaaaaaaattacatttgtttttgctgatttttgaaaataaaaattttttgcattaggatcgatttctaatgaaaaataatgaattgggcattaatcctcttgaaacaaaaggccggcacaagagcaacaaccacagcaacagatcagagccgaactgccaatgaatgccaaaacaccgacaaacccggaaaacaccaaaaatgccatcacaataatagacaaaacgccaacaatgaaaaacgctggcagcacccacttcgtgatgctaattttcttgccttttgccacaaaaaagcacgtgactgacacaaaaattgcaataattgtgaacaaaactccgccaatgatgggccaaatgaggctgaaacatacataaatcattaaaatcattaaggatattgaatttggtgagggatatttaaatatgggaaaatgggcacgaaaaggcaaatttggtgattttaatggaaattgtcgacgatgagataacctacctctcagcaggctttgcatctgccttcttctgatcagtcccgtcattcgccttcttctgatcagtcccgtcattcgccttcttctgatcagtcccgtcattcgccttcttctgatcagtcccatcatttttctccacatcaaattgctgatcaatctgctgaccatcttgcgttccagtaaaattgacgatggttgcggtggtgtgatttgccgattcatccggcacagccaatgagaagaggaggaggacaaagaaagtaatttgattgattgttcccattatataatccgactatctttgaggcatttatttttaacaattttttaattattcatcttatttgaataaaaaaatagggatgagatttaaaaaattgaaataaataattatttttagtaagcaaaaatatttaatatttttttttttgttcaattgtagacggaatattcagtttcaaaaaatatcttttgttcgaagataatttattttctcttagcaaaaccctgctacggaatcagcgactgaattagataatggcagattttttaaaaatttttgcacaatttacatatcatattacattaaaatcttcaaaaagttttttttaattttagcccaaaatttcattgacatttttggcgcaaaattactaaaaagcacaatttttttttttatggcgattaaatttttaaataaaagtggagaaaaaaaataagggctgaagaataaaggtcttcggttcccttttccggaa

SEQ ID NO: 11457 - DNA, 1442 bp, Heterodera glycines
tatttttcatattttggcattttggtccatattttatgtccatattttggcatttttcaaaaaaacctctattagaacggcccccagcagctaaattagcctttttgagcccaaaacccgaaaaatttttcaattgaataaatttaaattttcttaaaaattaataaattatgtcaaaaataagcaaaaaagcgaaaatttcgcttttgttgttgattttgcgctaaaaaaattaataaattttggcttttatgttttttttcttttaaaatgattgcacgtaattgccgaaaaaattcgagaccaatttccgaatgttgaccgactaattgcaaaacgaaagccgtctttgtcaaagcgccttaccgagtcaaaaaatctggaaatgtatctcatatgcaatttcaaccaataaatttgaagaaattttacattcaattttgaaaaatttatgtccatattttgacatttttgccattttatgtccatattttgcgatttttggtccatattttatggccatatttcgcgattttatatccatatttttaccagccctactaatgatcaattaattatttaaatttttaatctattaattagatttgttgaccataattataatttgattattattttaatatttcccaaacaaattgcatttttgtgagagaaatacagtgccagaaaaattcttgactcaaacctgaaaaactatcttatagttcatttaaaaacttgaaataattcatgcttgcacaacttttggtgctgatcaaaaaagtctcttacaccaacttaatcagatcactccttcctagtgaccgggacacccaaaatacactgaaaatcgggaaattttcgaaattcctagggggttgggaaattttttctagagaaaatgggcaaggccactggaaagagcacaaaattctctactgatttgaattttgaataatggggctacgacttttacataaaaagatatacttggttgaatatttgatcaccataaaaatgatcaatttttgatcagcgccataactttttctagaagcatccaaattaaacaatcttggcatcttttgatagccctgagtgtcctctatttgcctttaaaatttcaaaaaatttggttgtgtttcaaaaaagttgcggcttgtaaatttcataaaattgatttggtaaacctttttgaccacaacttctttgaaactcaacgaaatttttttgtattttacaggaaaatagaagacacccagggctatcaaaacttaccaagaatgtttaattgggtgcttctataaaaagttatgttgcatgaaatttatcaaaatataacatggtcgtgtctttttttgtggtcgtgtaaactgaaatagagccaaatataattataattatggtaacaaatctaagaaatagattaaaaatttaaataa

SEQ ID NO: 11458 - DNA, 2557 bp, Heterodera glycines
agagaaatttggcaaaatataacaaatttttggccatggggaaacattgacggcacggacacatttttagaatatgtatcaatctaaaacaattgccatagcaccgtcccatgggaaacttttcataaattgggcttctcggaattaagtgaaagcccccgaaagaattgggaataaaacaaaatgccaatctcagctgaaaaatggcaatcccagccagttgaaagtgccaatctcggctgaaaagccaatttcttccggctgaaagtgccaattccggctgaaaatggcaatcccaaaccctgagaaaaatttagaatcccactaaaaaattcgttaaaaatttaaatatcttaaaatagaaaaaaatgcttagaaattttccgggcatttgtctccattccgaacccctgggagtcgaaaaatatggcctaaggcatgacgatgaaaattcccggcactttgaagcgatcagcgcgggacacaagtgccgatgaagatgatggtggcggtgattttgacggcagcagcaacgagactgagtcggacagcgctcagtttggaagccaattgaaaagggacggcgccgccggagggataagcattggcacttttcttggcaacatttcggcatcggcacgcgctcaactgcacaacattgtaaacaatgcgagcatgaccaagaaagagatgagcgaagcattggacacatgggcacaagcacagggccaactgttcaatgtgagagaccgcgggggggggagggtgatcagaaaaggtggataattgaaaaggaaaagtgatcagaaaaggtgaagcatttgactgatcagaaataaaagtgatcagaaaaggtgaatcattttgtgatcagcagaaggaaaagcgatcataaatatgaagcattggactgatcagaaataaaagtgatcagaaaaggtgaagcattaactaaaagaaggtgaagcgatcaagtgaaaaattgactgatcagaaggcaaagtgatcagaaaaagatgaagcattgactgatcagaaggaaaagtgatcagaaaaggtgaagcatttgactgatcagaaataaaagtgatcagaaaaggtgaagcattgactataagaaggtgaagcgatcaggtgaagcattgactgatcagaacgaaaagtgatcagaaaaaggtgaaggattgactgatctgaaggaaaatgatcagaaaaagataaagcatcgactgatcaaagcgaaaagtggacagaaaaatgaagcattaactgacagtcatgggaatttgttaaaatgttgaatgaaatccattgcccctcggtgatcagactgtttaccttggcctgaaagcggcttatgagtcggcacggcaacaattggaccaacggcacgcggcacagatgcaaaaccaaacacaggtaatgaatgagttgatcatttaacaaccaaaatgccagattttttgaaacttttcttgtccccgaccggcaatcaccgaaagtctcatccccgaaaggtgtcggggatttaacccaaattaagaaaatcgttgactaatttttgatttggattaaataaagattaatttcattgatcagttacattttttttttggcattttaggcggtgcgcgaggcggacgccaaaattcaaacgattgccaagtgaattaaaaaatagaaaaaacgtaaacttttatgccattttcagcaaccaattcattacattagcggaggagaagcaacaaatggtggtgggttttcggacgaatttttctgagaaatttttcatgaaattttggagattttaaacattttatagggggatgatctagaaattatgatgaaattctgatttttgtcatttggaaagttttgaggagtttatacattttagattttcttgggcttagaagggaaagaggggtgccaaatttcgaattttcacactaaaatttatggcatttcatcggatatgccatttttaaatcagaatgcccaaatttgttgaacatcattcttccaggaacaaatggcaaaattcccagcggatgtgcagcaaacactgctccaatttgcgccctatccgtacaacaaaaagtgatgccgaaaaacgaaatggcacagaaaaagatggcatttttggcattttgtcgaaaaaatatgccaaaacaaaacaaattttgacaccccattttcatacttgattgttttttattggttatggaataaaaaacattgctccataaaatttgcaaaaacaaaaaaaattgggcaataaccccgaggataaagcggctggcacggcacgaagcggctgacacaaaaatgtcagtcagtcagtatatctattgcaaatgtgccttccggcgccgcttcttccctccccctcccggccgtccattcgtcacgaaactttgcgccaacatgaaacgaaatgccaatgactgactgagtgccagtgccaatggcattccacccactacatgaagaatccccccgagggctgctgccaacaaaacttcacaaaaaagaacatcacccgccccctcccccg

SEQ ID NO: 11459 - DNA, 1885 bp, Heterodera glycines
  unsure (1)..(1885): unsure at all n locations
cccgccccctcccccgcctgttttggcacttttgtctttctgagggcacggnacggnttttttcggnttggccgccgcccacccgcctaatttattcttggccttgctcgccacccccactccattcttggcacaaatccccacaatttgctcatttttatatcttgtcgatgagccgggggcacagaaagcgcaacagccaaatcaatttaattgacggaacttttgttttgccataaaaatgttgcgcaaaactatcggcagaattaattacgggttactgtagtccagaggcaaaaggcgtacagtagaatttgacattatttcaatgctgcccatcgctttgcttctgcaatcaagctaattgtgtttaatgaattgagtgactctcatttggccattctataggattatttggcattttccttttttaaattgttttcatgacgattgttttttcaattttgaatatttataatttttttattttcatttgcctattcgtttttttaacaattttattatttgagaaaactttatccgaactccgaattcaccaaaataatttatctccgagaatgggagctggttatttatattcttgaagttttactcctcctatgaaaatttaatttatgagagcgtccttgaaaataaggacagcacagtattcccatggaaacgttcacgtgcccaatcaataattggcagagtccggaacagggccggatcctgtcagggtttttccgaactcctgatcccgaaatccggctctactttgaaaaattgacgacctggatcagaaaaaataggatttttaatccataaaatcctgtacggatgcaaattcccgagttctggtcctggtcccgaattttacataatttcgggctctaataatacattttggatcactattcaggggatttgtgctgaattggattttgtatttgtccaacacctaaatctgaaaaattggatttaaagacaaattctgaaaatcgggatttaaggactttcaaggacaattttttcggcttaattcactgccgtgcccattccatcaagtgcctgtgaccatgaaaagcatgtcaattgcgttcagaggtcgaatggcggaggaggacagcggggggaagaagaaaaagtcggacgaagtcagtctgatgaggaaaaagtcgtgccaagaacaacaacaattggctgctgctgatcagcaacaacaacaacaacaggacgagaaggagggaccgttccgatcggtgagcaaaaagtgatcggagaaatgtgtccaatattttgtgggtcaatcactccgatcgggtgtgctttggaaaagtgattggaaaaatttattaaatcgttttaatggactccgatcgtagagtgaaagttttcggaaaaatgcctaatgggatttttaaaagtgatcaatatgctatcggtttaaccaattagcgattttccaaagtgatcgtaacagttaaatgcagttcttgcagccaatcgcttaaattagccaagtgatcgggaaaaactgttcaatttatgtgagactattccaatcaatgtttctgatcactgatcgattccaatcgatattgaatcattgggtctaagcctaattgatcaggcaaaagaaaatcgagaaatttatctcgagtctagttgtttgagcatcactcggttcactaattgttctgcttaagtgccttcatttgtaccgtaagccgttggcggtgagttaaattattatcattgttactgtaatccgatggagaaaagtcattatgatcaacaaaaaggtgaatgcactttgtctggcctttctgttcatctactcttttctgggcggcttcatcttcctccattttgaggagccaaa

SEQ ID NO: 11460 - DNA, 2469 bp, Heterodera glycines
  unsure (1)..(2469): unsure at all n locations
aattttaaactcagaaaattgccaataaaggtccaactgattggccatttcccagcacttatctggcgcgaagaataattaattctttttcaaatggccatttgggtcagcggaaaatgttgctgaaatctgagtattaaatgaccatttgggaaaatgggttttagtttatcccaaaagcacttaaatttccattaatagaatttaaaatggaaaaattttttagtttcgaaaattataaaatttaggttaaattctttaacggatttgagcaaaattatttaagatttaaaactcgaacaaattttcccacctctttcaaattcattaaattagaaaaattaattgcacttttgggttttcaattaatttgttttaagtttattttaaaataataataatattttccatttttgctggactcatttgccagtactgttttttaaattcgtcataaatgccaatatggatttattggtggttttctgccactgaatggagaagggcatttgttcaaatttttctggcatcaaatatttttttctaaatattggcatgaccatgaatttattttttcaattttaaataataaaaagatattttattttgaaaatttagttagatctacatttttaattataaatcatttaaatggaagaacagcggcgtccaatctgcgactattttgccataattggatatgatccggccagtggactgaaggttcttcaaaataggggctgggatttctttaattttccattggcattttaaacaaaaagtcaatgagttttttgcccacggaaaatttttaaccgaaaaaaaagaaaatcaaattaaatgtcaattttttattggatttttggataggaaattgacgaaattgttgataaattttgaatttttcaatttattaactatttttttaatgagttggggaagcgttttgttgagaaaaatgattatcaaacagacgctcaagcaaattttctgatgaaatttaccattttatatgtaccaaaaggcccattttaggagggattaaatttaatccgggtaagccgaatgtgggccgggtgcttattttcctctcacagaccgggcccatgtcgggtccggctaatgtaagtcggttgagctgttggcaagccggatttttgttccaaaaaatgccggcccgaacaccggtgcccagtacaatatctccatttaaagaaaaaatggtgggttaacccctatttcattccagcaagagcgcattgccgaatttggcgacccatccttggccacctgcagcaccagcagtgggccgccggtgcgcaagtcgccactggacgccacttatgagccaaaagtgattgcgcatttcccgacggaacgcccggggcgcccatttgcgccagaaatagcatcggtacaaaaatggggggaaacccggctttagaaaaattttaaaaaattccaaagagcctcagccaaggatttacgagtaaaaatgtattttttggatgggacaggtgacaaattaaattttattcgtcctaaatttcttaatggactactccttaacgggatcgcaaatgcatattttaaaataattaaaactctgtccttttagcggcctttgaggcataataatttttgggccaattttgccataatttattttaaaaaaaccaaataaatttgatttttctaaataaaattcatttaatatgtacctaattaaattatagctcgcattgccccagggcattcggcttcgaacagaacggaatgtgccccgggagccttttttccactcatttgtggtcattcgcgaaggtgtgtggccatttgagtgaataaattataccgcaaaatgccattaaaataatgaacaacacaaattttagatggttctcggatttacgggtgctcattgattntctttgaggtttatctaattaattttanaanatgtgaaatttgtttttttttttttttttgcttttttaggagctttcttccatcgaactccgacagcaaatgtatgaaaaaaggaatattgaaatatataatatattcaattaaaaatgtccttacaaattaggcattattggacatttatggctcaatttaaatttttttaaaaattaaaaatacattaacaattttttgggctgacaataaaataatcatacattaataaaggggcgagggtcaaccaaaatttttgcgaagggcatctcaacgccgaatttgacaacttcaattttttttttttgattttgtccaaaaaataatcaatttttgcgattatgagccaatttttttttaaccaaccggccacacctcgatgctaggggtccaccattttgggggcctttgcgggcgatggagaggggggggggaggggggaggttctgtttcagtcttaaaaaagacaatataaggatcccccagggtaggtatcaaaaattatgaaaa

SEQ ID NO: 11461 - DNA, 1694 bp, Heterodera glycines
tctttaaaaatttgcaaataaattttctaaaaatttggtaaatctaaggcaaacaattcggcaccaccagtggtggcacacattcggccataaatgccggcgactgttcggcggatgcacggcgcgaacatgaacatgtcacctattacaagaacccaaagagtccgctgttcatctccaaatgcttggccatcattacaccggtttgggcgggcaaaagaaaaagagatttgacaaacaaaaatgccaagagatttgctgaacaatatgatgataatttgattggcaacgatgataaatctcgactaaaattcccgagaattatagttttttgtaggagtgggggtaaaagatttacataattcgtccaaagtactccttgatcattatccaaaatttaatgactaatcctgagaaatttttgttttttggctacaaaaaagagaattggaattattcttaattgctctaagtctggtcataaacaagaatatttggctaggcgcctgaatgtagggctctgcgagagtctcgactctcgtatttattgggcttccttgtctcttaaaatttttcgggttttttgacttaaatttttttgtaaattttaatttaaatattttctcatcccgttggttgatcagattcctgtcatttattcatccgagaatttgttgcacaatttgtgggcactgatcagcgagaaatttccgctcagagaatactcagtggaggacctgcttcattggatgttacacgaagtaataatcatcataaatgatgattaagaaatttaaaaaaaaattgcgaaattttttaaatctaataattgactaaaaaaatttcaaaaatttttggctctcaaattttactggccccattttatctaaatttggaccttcgtataaaaaatgtatttttacatttatacccaacggcacaaaaaaatcaataaatctgctaaaattgtgccattcccatccactcttcctttttcagctttatttgccggcacccgcctgttctgcacagctatgcttctccaacttccatttgttgctccgtgtgccgtccgtggacgaaatgccattctttgactatcccattgaaacacttttcgcgcacattggtgttgaccaatttgtcaaactgttgaccagcttcatgttggagcagcagattttgctcatctccaaaagtaagggaggactaatgattattaattttatattttggcccaattttggaagttggccaataatttatgctaattaagccataacacaataatcggttaattgtaagattccaaaatgaaaaagtttttcaagaaaaatgagcaagtttttttggaaatttaaccaattttgccacaaaattcattaatacttcgaatttttcccggcggcgcctaacggcaccgcggacccaccattttacatatttttaaaatttgccactttttagaatttacgaaaaagtatattagtccttgagtgcccttgaaaatcgtgtccttcctttatgtaacagatcccaaattctaaattttgtgcatttgtacagtcaggcccatttctatccttgaatagccaacaatgttcttgaataaccaatgggataaaaatggaaataaaatttgaattttgaagaatttccaacctagggcttcaatgtcgtcgtttttttaaaat

SEQ ID NO: 11462 - DNA, 1445 bp, Heterodera glycines
  unsure (1)..(1445): unsure at all n locations
ttttttttttgtttgcttcttttttagcaaaatttgttcattcctaagggggcaaaaaaaaactaataggataaaggagacgcagaaataattatttggattttttgatttaatgtccctaaatngtggaagaggatctggcccagaaatttttttgtcaaaatataaaagctggttgatcgaatttgatttcaaataattcattttacagattttgttgacacgaaaatgttgcaaaatttttgattaaattaagacaaaattatgaaaaacacaaaaccaatcaataatagtctgatcagggctaatgccactgattgctcaagatattattggtcatttcctttcaaacagtgcaacatttgtttgttggacatcgatgcgcgacgcttggaagtgccggaggatttgccatcctttccacgccaacagcgcatgatcagcgagatcaacgcattgattgcccgatcagcatctgctgctgatcagcaacaacagaagcaggcgggggaggacaaaggcgtgcatacattttatatgcgggtaaattctatattctatatgttatattttgatgcataattggtatacgattttttcaattcgtctatatatacattatattatggacaagtatatgttgttgatggaattttattttatgaatttttagaacatttgcttgtggccaaaaaattcgttcataaaaatgcattaaagacaaaaaaaaatgaatatttcatttgagtaaaaaataaaaagaaaattaaaataatttaaacaattttttttacaaaatgttttaaaggaaacgtgataaattttctgggaaaatagttatctaataattaaaattttcatttgtattacgaatatgtaattttttacaaataaaatatagcaaatacatatttcctggatactaatactcaatcttttattataaatatacaaatttgtatgcacataaatggcgcattcaattatttatcaatttagcagtatattttaaaatgctgtggtgctctagccctgaaaaattgaatctaaggttttctggaataaaaatttccaaattttacagggcctccaattcaatgcggccattcgtcagctgtttctggaccattttgtctcactgttctccacctatgaggcgtatttgcttcatgccggcacggagcatggtggcattgtgtcggtgccgaagagtcggcgcaagaatggccgaatgtttcgagagtcgagcgcaaattttgacaaaatttcatttctggttgatcagccggagtcggtgctctcatttctgagtgcattccttgaaacacaggtgatcatgaacgatcgatcgatcaatagggctcctgattaaaaatttgctttcagtgatacctttttcttcattgtaacaaaacacaagcttttcttttcggtagacgtaaaat

SEQ ID NO: 11463 - DNA, 2412 bp, Heterodera glycines
  unsure (1)..(2412): unsure at all n locations
gtttcgtacaattttgttaatatgtcctgaaaaatgcagtttcgagtcaattataatgcctaggtcacgaacattatccgattctgaaatcttttttgagttaattaaataatcttttttcatattatttttccctaaataaagaacaaaacatttcnccagttgaaatttctaacccatttatttttgaccatttttccaaagcttcaattgctttatctaaatgatttgttttatcatcattttcatgggcataatataatttaacatcatcggcatacatttttatgccaactgatgatgcttcatttgcaataaaggacggcagatcatttataaaaattaaaaagagtaatggccctaagacacttccctggggcactcctgaaaatattctgaaactttctgacaattcttcgccaattttaaccttaaaactccgattttttaaaaagttagttaaaaaattatgaatttttccttcaattccaatctttttgattttttgaagtaataaatcaatgggaacagaatcaaacgccttgacaaaatcaatatagattatgtcaatttgttgattcttttgtatagaattatatatatcgtccatcatttttaatatttgggttgtagtcgatctattttttaaaaacccaaattgttctttatcaaagaatcttgtactgttcagaaattctaaaattttgctactcaaaattcgttcaaaaactctacagacagtgctggttaatgacaccggcctgtaatttaatggatcagttttttcgccttttttgaaaattggtaccaccaatgatgttcgccatatttccggaatttgaccggaatccaaaattagcctaaatatatctgctaatatttttgtaattggttctgcacaattttttaataaaatgtaaggaacattatccggtgaagtggaattacgccggggaagtcttcttaatatgttccaaattattcccgcattcaattcaatgtcagaaagtttaatcttattctgtgttgattgagtttgtggaccattaacaattgattttcttaaaaaagacttttgaaatatttctgctaatatcttacatttttgaacattgctggaaaacatatttccagcattatcaattaacgtaggaatttcattaacttttgataatttatttcgaataaatttgttaactgagttttgcccttgtgaaataatttttgactctttttcatttcttaatttgtacaattgttttttcatttccctagaaataattttgtaatttaaaaagagatcacttttttcagggaatttttttacaagcttatgtaaccgtaatttctctgaaaataaatctcttattttttgaggatacgattgttttattatcgattttagaggtctattgggtataaaagtatcatataatttcagtactttatttaagaattctttatatttttgatcaacggtgtacactgattttattgataaatcaattcgattttcaagtatcgcccgacttaatttcgaaaaattaatatttttaaaatctcttctataaacactgggattattacgccggaatttttcttttattttaaatccgaccattttatgatcggaagttgaaaaatgttccaatacaattaattcattaattaattctgattcactagtcattactaagtctaaaatcgtattttctctggtcggttctttaacatgctgtttcaattgtttttggttcataaactcaatcagcatatttgacataggatcatttatatgttttaccttattttcatcccataaaatatttgggatgttaaaatccccacaatatatgatattttcagaattactctggtccgaaataaatttgagtagctttttagtattctgaactgtacaattcggtggacaatatatatttatgatttggattggttttttaaaaagtaatttaatgtgtaaaatttcgctttggaattttgtcccagagaatagtgtctgataaggaatatttgttttagttagaattgctgatccaccgccctttttctcatttcggttcgcaagcattactctatatctaccatttatagatagttcattttcaattgtatttctggggtttaaccaggtctcattgatgatgaatattgatggatcatacttttgtgctatatgttctaaatcagatattttatttgaaattgatcgggcatttattaataggcaggaaacccagggatttttttctcccttattcctaatttttttgtttggtttgctcacgcatccctagcgagttctgagcggggcggnggttttttcagagatttgatctccaaatcgaccacaaaatatttgtactcacctgcggcaatattggcctgata

SEQ ID NO: 11464 - DNA, 2555 bp, Heterodera glycines
  unsure (1)..(2555): unsure at all n locations
attatcgattctagagatctgtagggtataaacgtatcatataatttcagagctatattnaaaaattctttatatatttttgttcactgtgaacactgagtttattgctaaatcaattcgattttcaagtattgcccgacttaatttcgaaaaattaatatttttaaaatctcttctataaattctagggtttttatgactgaattttacttttatttgaaatccgaccattttgtgatcggaagttgaaaaattttctagtactgtcacttcattaattaattctaagtcactagtaattactagatctaaaatcgccttttctcttgtcggttctttaacatgctgtatcaattgtttttggtccgtaaactcaatcagagaattagacaccggatcatttatttttttactttattttcatcccataatatatttgggatattaaaatcaccacagaatatgatattttcagaatcactgtggtcagaaatgaatttgagtagttttttattattatgaactgtacaatttggtggacgatatatatttataatttgaattggttttttaaaaagtaatttaatgtgaataatttcgctttggaatttttcccaaagaaaagtgtctgataagggatggttgattttaatagaattgccgatcctccgccctttttatcatttcggcttgcaagaattaatcgatattgaccttttactttaagttctgattctactatatttctggagtttaaccaggtctcatttattagaattatagaaggatcatattttttggctatatgttctaagtcggctattttatttgttatcgatcggccgtttattaataggcaagaaatccaaggattttttctccggtattcccaatttttttgcctggtttgctagcgtatccctagcgagttctgagcgggcggggatctttcagagatttgatctccaaatcgaccacaaaatatttgtactcacctgcggcaatgttggcatagtaggcttgttgccgtagggagtataaaattttgagttcgctttgggtcatatccctgcggactttgataaattgtggcaaattagggaattttttcagtgcattatggaacttgtaaagaaattggtcacgggaaaatttgtccaagaatgtcacctcaccttcaaaaattcggtcctcttttgtcccgctctcaggtcgtgtcctcgggtggcggtgaatgtccggcgaaagtttgtctttgacgccgcattcttctgcaatttgttccgccaatgcccgtgtaaaaaaataattttaaaaaaatgagacggcaaaatcaaacaaaaatttaaaattataatgaattttttctaacccccctccccctccattgagactcttggtcattaaacaccactccttttttgcgtgaatgattaacagttctaaaaaaagaataaactaaaaaactcatattaattttttttaaatcattcaaaaaagcaagctaaaaatataaaagataaaattactcaccggcttctcgatcaccatgtcattttgctgctgcttgtcgccaacagcgacagattttatcgatcgcccgctgttttttcccacgccttgttagtgatagtccaattaagtttttcctctgtgccccgccccctcgcatttttcggcctataaaaagggcaacatttttctctcacatatgctcacttccacatttccattcattcatttctgctgctgcttaataaatatatatttgtgaaaagagtccgggggatttggtcgggacggtttccccctcccccttctgctgctcatcgtcgtcgttgtccgccctcaccaccgcttagtcggtcttcccccgcaggagtctctcactcctgcgggccttcgctttcaacagctagtccgtcccttcccccacatttgggaaggcacggccgagaaagggaaagggggaagcaaacagctgattttgcccttggcaaagtcggctctcgccctcgctccccacaaaagtttttgtcgtccttggctgcgacaaaattggagccccgtaggggtcagttgttcctgccgaaaggacctgacctccatcaatcggccgtagccgtcgatcaaaaagtcttcgcccgccaaggggtgaagaacatcggctacagtcgccgatttactttctccctaccgaaagggaggaaggctcattcggccaccagtcgccgacttcttcgtcttgcccaaccagtggcaagactcattcggcctcagcagccgactcttcgtcttgcccaaccagtggcaagacactcggccatcagcagccgactcatttagcctaacccaacaaagggaaggctcattcggccatcgccgccgctcattcgcctaacccatcaaagggtaggcacattcggccaccagtcgccgacttcttcatcttgcccaaccagtggcaagactcattcggccatcgccgccgctcattcgcctaacccatcaaagggtaggcacattcggccaccagtcgctgacttcttcgtctt

SEQ ID NO: 11465 - DNA, 4128 bp, Heterodera glycines
atggatcacaaaacgggaaatctcaggatggggtgcgcgtcccttcctacaaatttctcttttcgtctaaccatgccccctttttgtgcactatttcgttttaaaaattgggaacatttttttgtttgtttttttgaaactaaaatgtaaaaaattttaaaaaattatttctgattttaaataatgcttctgtttcgaatcttttgactctaaggaattaaactgtaatttttagaacaaataattctctgaagttttgaacttggcttttcaatgtttttaagtcccaccgtgaggcgggacagttccaaaatttgtaccacattttactgtggaaagtccaagtaccttaaggactacagaagagtcaatggcagcagtcacctttggacagttatgaaaaagaaataaggaaatattcgatggggtgcaatcctttaaaaaattactctcgtcttctaccctccctctctttttgtgcactgtttcgttttaaaaattggttccgaaattttttgactctaagaaattaaactgcaatttttagaacaaataattctctgaagttgtgagcttggcttttcaatgtttttaagcccaccgtgaggcgggacagttccaaaatttgtaccacattttactgtggaaagtccaagtaccttatttggacaattaattgtcaacgaacacagtcgcctttggcctcttatggagcagaaaaggggaaatatcagatggggtgcgcgtcccttcctaaaaatttctcttttcgtctaaccatcccccctttttgtgcactatttcgttttaaaaattgggaacatttttttgtttgtttttttgaaactaaaatgtaaaaaattttaaaaaattatttctgattttaaataatgcttctgtttcgaatcttttgactctaaggaattaaactgtaatttttagaacaaataattctctgaagttttgaacttggcttttcaatgtttttaagtcccaacgtgaggcgggacagttccaaaatttgtaccacattttactgtggaaagtccaagtaccttaaggactacagaagagtcaatggcagcagtcacctttggacagttatgaaaaagaaataaggaaatattcgatggggtgcgatcctttaaaaaattactctcgtcttctaccctccctctctttttgtgcactgtttcgttttaaaaattggttccgaaattttttgaatttgtaccacattttactgtggaaagtccaagtaccttgattggacaattacttgtcaacgaagacaatcgcctttggccatttgtgaaacagaaaaatgggaatatcagatggggtgcgtcccttcataaaaagttctcttttcgactaaccatccctccctttttgtgcactatttctgttagaaaattttttgtcagcgtcaacagttgcctttattgttttacagttttaaaaaccaatcattccagttcagtgcctcttccctcctttgttcaatatttcttcatcgacttcaatcaaatgtgctaatttcatctatcaattaaggttgcaattttttaaatgccaaaaaaagcaaaatatgcgaaaagtgagtggcgcgactccgactttgtttcattttgggaacactacgcaaagatttcaagtgaccgatgtttttttcacgttttcaaaaaatgattaaatagattcaaaactcattattattataaatcagatatttttagatgttcccaagcaattaattgattttttcaaacatttgtttggtttttaaaacaaatttcaaaaaatccaggtccaggcctggatccaggtcccgaggagcgatttttttccgggggaacggggattttcctggatttttgtccaggaaatccaggtccaggctttttcaaaatgtcgagctctaaatttaagccctttttagtcttcagtcccatggtccgaattacgtgtattacctgtcttttagaaaaaacaaacaaattaattagcaaatgttttgtgtttcattaaacaattgcagtgcatttccctgctgtcccttgctgctgctcacctcggcagcgaacttgacaccgccgcggacgaaagtgccaattccaccgacgacggcggcccaaaaaatggcaaccgaatgccaaagagaggggcggacagccacggccaggaggaggacgaccagcaccaaactttgcaaggttttttgtttgcttgcttatcatttaaatcgtcttggtgcgtagtttgagactctaacgaatttttgctttgaattcggtttttttgtttggtgaaaaatattttgcaggcccattccattacttgacagttcggtactcttgcagtttacgggatacttttaacatacattttagtaattttttttaggttttagaaattagtgaaaaataattttcaaggggttttcgaggtcgctgatcatgaatgcagcaatccatttttgccaattccgtacccctgacccgaatttgaacaaattcgaaattttcgaattcagaattagccaaattttctttgaatacagctgaaactgccttttaattgcggaaaaaatgcatgaattataataccactgtgatgaaattggacggactcaaaaaaaaaacttaggtgctcctattcgaagcaatgcaaaaaatgggaaaacatttctctgcttcagacgctgctccactgaacgaattggacgcctccgccgtttatttgccgtcgttggccaagcgcaaaaaatgccacaaaaaggcgaaacaacggcaggagcaaaaatggccaaggaaaacgaattggaatcagcagcaaatggaggacaatgagcagggggaggaggaaaatgaagacggaaacgagtctatggacgaacaaatgaaggcattccgaaagaccacgttggaccatcgcaaacaatgtccgtttttgagggacatgggattttcttggccatccctctaatttcgaccttggcatttttaaattccatccgtttttgaggggcaaggattttcttggccatccctctaatattggaccttggcatttttaaattccaatcggttaatccgccgtcccccctcattttttttggtaaaattaaccatatttttgatcaaagaaaacaactaacgggaatatcggttcttcgttaccgtgggaaattttgtcgatggaattttaaattcattcttatagacttcgattggtttctttttttcgaatttgatagagtctccgattggaatcacaaaaaattgtttggtttttgtaattatttggttcgtctaaaatttgttgcacctggggggtttggttggtgtcaccggttgtaaaaattatgaccatttctgccaaattccttgccaatttgttaccgattttagttttttaattttaaaatttcattttacagaggagcagaaaaaacgtgaggagcagcaaaaggcgaagcaacgacaggggcaccgaaaggacgaagaagaatattttgatgcatcgaaaagtaaattttaattgattttttaaagaaattttatagagaccgtaaaaatttacggttttttattattcttacaattagtaaaatctggcaattcacaaaaaatgcaaattttttgtattttttacgaaaaattctaatttatccccctttcattttccatattttcagtgagtttcaaggcggcccatctacagcaaactgttgctgcagtgcgcaattcgcttgttggcggctgtggcaccgccgcggggagtgtcaatgccatcgatagcgccggcaccgcaaattcatccgccgctgtcgcgtccgccgggggcagcgacgatttgtccacccgagggcgtgagtaccgacgccgagggtttgtacggcgaggcgggcgtgaccagactgggcccgttggagagcgaattgcgtgcctatttcgatgtgcactttgccaagtacgatgccggacacatggcccaacattccgctgcgtttctgaaccgcaaatgccaatgttgtgcgaccgatttgattaattgatgatttggtccggtgacattttgccggggtggagtgagtgttctgctcacaattcaacccccacccca

SEQ ID NO: 11466 - DNA, 855 bp, Heterodera glycines
aaaatctgttaacaaagcacacccaaaacttcaaaattttctccggcggcgtctatcggcaccgcctgccccctattcccgaaaatttttttgaaaaagcgcgccgaaaaaactgcttttgaaaggcgaaaaaaaggtcatcaaaaaaatcggcggccgaccccacctttgctaaattttggccgacccccccccttttaatgtatgaccaaaagccaagggcattgaccagtaaggaaaatgttatgttcttggaaattgaggagatagtcaatgattggacgcataaattgtacaagacccagagaatttgcggattttttttctgggagtagacttcgtgctgggggggtttagatttttgccgggtttaccactaattacaaatttgcccaattcaaatatattattttgttccaccttttctgtccagatcccaaatcgcatcccctcgtgggccaaacgctgaccattggccaccattcgtacgcggtccgttccctgctggcggagggcggctacgcgttggtgttcgcggtggaagcgctgaaaaatggtataatttagggcatcgtgtggggttggccacccattttcatgctctcatccacccaaattcggatgtttggcaaagcatgaatcgagacgcgtcatggccgagagaattctcaacgattttttttttttgcgattcgtccatccgacagtcattttattcgatcatagtgaaatggtcttttttatttgaaattttcttagaattttttttgaattctttccaaaatcgcatttcattgcacagatcggtcccaccacccgaacaatgagtgcggcggcggcgctggcggtggccaa

SEQ ID NO: 11467 - DNA, 2445 bp, Heterodera glycines
  unsure (1)..(2445): unsure at all n locations
tttccgtagctntggaccaaatgggatctgggtaaaagtacctgtatgaaattgttagccaaaacaagacaatggatatgtatgtttgtttgtatgatgttaggtcaaatcccctaaaaagtatcaatgggaaaaaagggcgcccgggaaatgatgcgtcagtggaaagtttattgtcataaaaccaagttccttgcgttttcgaggtcattgaacaagaatgcaggtatccatttcggccaatttcgaaccccggaacccgaactcgaacaaagtgttttaatgctatttgcagaataataaagcgatgtttagccttaaatcagcataacttttttcttagctgggagccaagacaaaacaaggatattttatgtttgtacggtgttaggtcaaatccccttaaaaagtatcaatggtaaaaaaatatcaatgataatactagttaaaatttaattattcttttaatgttatttgcagaataataaagcaatgacttaaccggatttaatcaaatctaactgaataatagagaaatctttgctttatttaatttttaaagaaaataaatttatatttagtttttttctgaaaagttatcaaagaattaaatgtttcatattttatggtctaagaaaaatttaaataacttactttagtttaatttaatttaatttgagccgtcatgattttttattttgcaatttggaagccaaagaccaagattttgggacattttataatttagtaaacttacggttagataattaaataaaaaattattagtaaaatcatatttattcactaatccataaatatgtattgtagaacataaaaggtaactcgcccggtgggactcgaacccacgaccccagcaatccgtgccgtgctctaaccaactgagctacgggcgcctcttttagaggttctctcaggtcctttatcccactttctcccacactccgttccttctggcatcacattccgcctccctcggaagaccggtccctcgggctctccttggcccttcaccgacggacttggactctccttggtccagtggtcccggcagtgtggaggggatccacccaggagcgccatgtagaacataaaaggtaactcgcccggtgggactcgaacccacgaccccagcaatccgtgccgtgctctaaccaactgagctacgggcgcctcttttagaggttctctcaggtcctttatcccactttctcccacactccgttccttctggcatcacattccgcctccctcggaagaccggtccctcgggctctccttggcccttcaccgacggacttggactctccttggtccagtggtcccggcagtgtggaggggatccacccaggagcgccatgtagaacataaaaggtaactcgcccggtgggactcgaacccacgaccccagcaatccgtgccgtgctctaaccaactgagctacgggcgcctcttttagaggttctctcaggtcctttatcccactttctcccacactccgttccttctggcatcacacaatggcaaaacttataaattttaaaattgttaaaaatagtataatgccattaattgccaacaaacatttcgccaaaaaatgccttttaatttttaagatatttcaattggacaaaattctaccagaagcgatgggtgccgactgtgaagacttccgccttttgtcagctgtgtgaaatggtgcaccaccaaatggaggagggcggcgaatttgtgggccgaaattacacagtgaaatcgcacaaaaaattgtggggagctcaaagatgtcgggagaattatgtgcagaacgactccaaaacccccagaaaaaatttaaattttgtgatttttgtgtttttgatgtatttgaaaccatttgaatgtttttattgcttattttttatggagttttaattaattaagaattctttaaacggtgttccaattataataattcaccaaatagttgctaaaatggaacaaaataatcaaaataaaatgctttttaaagtgtggttttaagcttattcaaatcagcactttttgcttgcaaataaatatttagaatttcgccaagagaattttagttatgccgatttgaatgttcttggcgatgtgtatattaaatttcccgttatttgttgttactagcggggtcagcgcctttggcgcatccctcgctaggcagtacgattgtgttatagaattaagaatgataaaatcgactgggctttttctccaatctctgggactcaaatctccggcattccaaacattgggactcaacccaccaactttcaatgacattccaatcactgaaaatcaccccatcagcatttcaatctctgagactcaattctcaggctttccaatcgctggaactcaacccaccagcatttcaatctctgggactcaaatctccggcat

SEQ ID NO: 11468 - DNA, 977 bp, Heterodera glycines
cttccagcggtcgccattctcactacattttgttgctttgtcttttttaaccaattggcaccgaattggcgaccttcttcgccttcccctttttcaattgtttcgtcttccaaatttccaaactttggaaattcgttggatgcagcactaaattagtttttgttacagttacaaagtgaaaaagtacggaagtaaaaattttttaaaatataaaaccggttttccaggattttagtgttttgaatgaaattcttccctctgccaaaacaaacccctaacattagtctattaaaaaaagaaaaaaggatcctgattagttaatccctcaaaaagttatagtgtcacaaccaaattgacctaatttttggcgatacaaaagtaacgaagcaaaatctttaacagacactaactcaatttcaaattagcagaatttaaaaaattattgctaggctaacttttgatgctgaccaaattttacaccaacttgatcagatcactccttcatgttgatctgagaactcaaaaatggcttaaaacgctttatgtccttttctacataattttgtccgtttttcggcgtcactttgtccccccccttaagctcagcagctccattttatatgtttcgagttacgtaagtacatatatattaaaagaaatactccatttaaatttccaaacgcaaataccgtggtgagtcgaaggacaaaaagtgcaaaatttgttaaatttttgataaaacaactcataacttttctcagacgcaaccaaattgcacaatcttggtagcatacaatagcttatccgttcaaatgaatgattagtagggagttggacaccgacagaaaaatcctaacgtgcccacaaatggctatctcttttttgtatccaaattgcgcattaggtatttcatacagtgcgtatcaaaggttgccttttcttatccggcaaaacgaagcattagtagggtgttggac

SEQ ID NO: 11469 - DNA, 2688 bp, Heterodera glycines
  unsure (1)..(2688): unsure at all n locations
atgcgaataaacaaaagagggaggatcaacagaaaagtatcaaaattaaaaaaaagaaagcttgcgacaattcaccgcaaatacaataaaaacattttaagttttacctctccccttttgtcgtatctgattgataatatgaaaatggtgaatgttgcggttttatatatgatttctaaacaaaaattaatttgaaatttccaatgagaaattatttaaaattaaattaatatttttaattaacaataaagtgatttcaattgctcatccttttcaaattatcgcttacctttacgggcgaattcatttctatttctaccttaatttaacaaaaatagtcagctttccaataaaagttacaattgtaactatcgtatgtattgttctcgttgttcggtcgtatctctctttcccttacttcccctctctatcccccctccttctctctctttctctctctctctctcccatctctctgtcttccccatctctctctcactcccccatcagctctctctctctctctctcatcctttctccttcttccaccgtttctctccccacccacctaccgtaccacttgcaactgtagttccatttcgggcccctcctctctcacatatcgtatgccaacttcgctcagtttaagaataaatccctttttctctgtccattgcattaagcggtctttatgttgaccaaaataattaatttgtgaaaaaatttcattgttttctgtgcccggctttttcaacacaattctataaaaagtgttgggttcggacaacggcggcaattggccatggaatttgccgtgaagaaaaagccgaacctttgggtcggcatttggtgtaaaatagccgatgaaaaacttgtaaattttgtctgaactcggctcctcaatgacccattcatttgactgaaatggtggtgattaaattctttttcaatgacccttaattaataatttcaattgcgtttgaatttttgaattcccaacccaaaaattcgaaaaattaaataatcaattaacattaattaattaataattatttttaattactcttttctgtttgcccaaatccgttaatgattttatttgcagtttgattcgtccaattcgttctttttcttcctttgttttcatctcaatttggaagtctttttttccaacgacatctatttgcttttccttttcttcgcacttttcacaattcactgtcactctgaaaggagtggatggatcggccacaatttgaccattaaaagtttggacagagtttgaaatggagcaacatattgccaaagtgtagaaaaacaaaaataatagccaataaaatggcgacattcactgaaaaagacaaaaatgaaaaaatgtaaaattcgtaaaaattattattttacattaaagccccataatcatggctttaagaaaaatgtatcttcccccatgttttacgtaggaagacaaaataaaatatttcgtgtcaaaaaatcgatagaatcgataatgccaacgcaaagaaaattcatggaaaagtagcgaaaaatatttatgaataaaattattataaatcagaagacacaaaaatagttttaaaatgatcaaatgttaattatgaacagggctcacaattatgaggctttggcctcattttgtggttttttaaaaggcaaatgaagcatgatttttacagtgaagctttgagacattttttgtggggttttttttggattttttgcccataaacaaacaacacaaattactattagaaatatttgcaaaatattaataaagatttattattatttaaaaaaatttccatttatatgaatttcacccagcaacaatatattaaataacgtcaaaactatgtattcagagtagaattcgcttcttttcctcttttttcccaatctttcggctgtcaataatcaaaacacacggagaagcgcgcaatttcttaaattaattttgagttaatttggaatttcttttttgggtattattttaatttaattagtcattagtcacgcttgggtgcgatccgggccgaccctggggaggcattgggttgtggggacaaagctttctagaaagtccaattaaaatggtaaagcaattgtatgcccatttttacttataatgttccatccaaaacggcagaatttggccgtcatttccggcaaaattcagcgcatgcggcaaaaaagggctcacatctttttctgtgggattggtcgctttgaacgcttccactgaacagataaacattcattgtgaaaggattaaacattttaaaggaatttttatttatttaattttaaaatataattaattcgctttttatttttaatttgaaatttaattaatcgctttttagttttattttggacagtattttccgactgttttcacatttacccgccaattggcagcagtaaaacgcccgttggccccgcgagttgacgcatttctccgagtaaatgtcgttgtacgccgccccgcattggtcctccgcccatttggccgcccttcggccccaccacgggtcgtccagtgccatccggcacaattcgacccgcgtcggtcgcagttccgcaacaaaggcactcagcggatcgactcgancctgcgatcttatgaaaaaacaaagagaaaaacgatgtgtcaagagtgagtagtta

SEQ ID NO: 11470 - DNA, 678 bp, Heterodera glycines
  unsure (1)..(678): unsure at all n locations
accaacgcagggcgggcggagggtcagtaagcattgttgagtgaacatgtctgtccaaccgaagctagtggtcattaattatccccttgggaattcttttggtgcatttctgaccgagccaaagccaatcgaatggtaattaataatcccttggatgcattttgactgtataatgcccacggaagtgtcaataatatcccacttggaattgaggtcaagctgtgagtcaatgattaattgtgacagttgtgactatgcaaaacccaacatcagatattctgtgcttgagacagctgcctcttttggcaaggtgccaaatttaacccagccgaaaaaataagccccgcctactcggtggagtataaatagcctgtcatttccagcaaaagtacattttttccattcatttggaaattttgaaatttttctgcaaacgactaacgcgctctttcccttttgcttcctcgctctctgtgcactatttaaaccaatttaaccataaccttttatttcctaccatccctttaaatttttgcattccctctttcttcactattaaaccgaatcaccaaataanaaatataattccataatcttcccataacctatnnacatataatttaataatattacaattaaataattattacaaaaatacttttaatttctacgtatcct

SEQ ID NO: 11471 - DNA, 1671 bp, Heterodera glycines
ctcttttgtgggctgatcgcagctccagagattttaacatgcacgctaaagcttaatgatgggccgcggtggctatgagtgagggtgttaattacatttggaatacaaatttagagacctcttttgtgggctgatcgcagctccagcttaatgatgggccgcggtgtctatgagtgagggtgttaattacatttggaatacaaatttagagacctcttttgtgggctgatcgcagctccagcttaagggccgcggtgtctatgagtgagggtgttaattacatttggaatacaaatttagagacctcttttgtgggctgatcgcagctccagagattttaagatgcacgctaaagcttaatgatgggccgcggtggctatgagtgagggtgttaattacatttggaatacaaatttagagacctcttttgtgagctgatcgcagctccagagattttaagatgcacgctaaagcttaatgatgggccgcggtggctatgagtgagggtgttaattacatttggaatacaaatttagagacctcttttgtgggctgatcgcagctccagagattttaagatgcacgctaaagcttaatgatgtgccgcggtggctatgagtgagggtgttaattacatttggaatacaaatttagagacctcttttgtgggctgatcgcagctccagcttaatgatgggccgcggtggctatgagtgagggtgttaattacatttggaatacaaatttagagacctcttttgtgggctgatcgcagctccagagattataagatgggcccgttcatgataaagcttaatgatacatttggaatacaaatttagagacctcttttgtgggctgatcgcagctccagagattttaagatgcacgctaaagcttaatgatgggccgcggtggctatgagtgagggtgttaattacatttggaatacaaatttagagacctcttttgtgggctgattgcagctccagagattttaagatgcacgctaaagcttaatgatgggccgcggtggctatgagtgagggtgttaattacatttggaatacaaatttagagacctcttttgtgggctgatcgcagctccagagattttaagatgcacgctaaagcttaatgatgtgccgcggtggctatgagtgagggtgttaattacatttggaatacaaatttagagacctcttttgtgggctgatcgcagctccagcttaatgatgggccgcggtggctatgagtgagggtgttaattacatttggaatacaaatttagagacctcatttgtgggctgatcgcagctccagagattttaagatgcacgctaaagcttaatgatgggccgcggtggctatgagtgagggtgttaattacatttggaatacaaatttagagacctcttttgtgggctgatcgcagctccagagattttaagatgcacgctaaagcttaatgatgggccgcggtggctatgagtgagggtgttaattacatttggaatacaaatttagagacctcttttgtgggctgatcgtagctccagagattttaagatgcacgctaaagcttaatgatgggccgcggtggctatgagtgagggtgttaattacatttggaatacaaatttagagacctcttttgtgggctgatcgcag

SEQ ID NO: 11472 - DNA, 4144 bp, Heterodera glycines
  unsure (1)..(4144): unsure at all n locations
cgttttccccccgagaaatttaaaaaaaaatttgataacagaaaattttcaagaaaaaaatcttagaaagttttttcataagaaaattctaagaaaaaaaattcgagaaattctcagcgattttttggaaatttttttgaaaaattttagtaattcaccataaaaatttgtcgaaaaaatttttttttagaatttcttaggaaaaaactaagatttttttcttgaaaattttctaagttagcaaattttttttaaaaaatttctcggggggggggggggaaacgaggcggggggaactgatatgggggagggggaaacgagctgctcccgtcccggacctccccccccccccaattttccccaaaattttaatgaaaaattcgtgccgtaaaaaaaaatttggaatttataagaccccacaatttgccctcaggccattcctcattctccgagagcagcagcagcagcaatggcacttcaacaagcagtggtggctttaccagtagcagcagcgaaggcgagcagtaccagctgcaacaggacgacgacaataaccatggcaacgggggcaagcagttcagctccattattccgggcaattggtcaccagcggcggtgctgacgacgccaaaaagtgccgtttccatgcagcagcagagcatcatcaccaacaaaaccagcagctgttacattcgtgccgtcgacgacaatgagaacaacaccgcgaaggcgaagatggtggctgcaggtgccacggcatcgcccgtcgttggcattcgcatggacccgctgcatttggtagggcggggcgccgtttttttttcattgagctgtgcgagggtctcaaaatcgagggcatttctcggtgccctccccctccccccccccttttttttgccattctcggtctcgcgttcgcaaaaagcactttgctcgacagtttcctaggttagttggatgcactatatttaattctcgagtcttgtccctcataattggtcggcggcacgtttttccttggcacggcaccaatttttgtagagaattttgggcccgagagtctcgagactgaaactcatattctccgttacccgccgggggttttccatggaatttcaatatgtcaatgccctcgagcgcatccatacaatgttccattttttaaatccctattttccacagatccaagcctgctacccgtgacacgtgccacggcacttttcggcgccatccaatggcactttttgtccatccgttaattcattttcatttaccatgttttgtcgaacatattcttttttttttaatttatgtgttgtattagttagtattggtgttgaatatgtttttgaacacatcatccatcacaatttttctgggggttgacgaccagggatggattttcgaggcctcaaaattatacggaaatcgaaattcctcgcttaaaagtgccggaaaatcggaaattcctcgccatccctggtggcaaatggacgggaacattttcaaaacggaaaagattgaaatttcgaaatgtaaaattttttgccgaaatttcaaaccgaaaatttttggttataaattcataaatcaaccgatttaaaacatatttttattattttttttagaaattttccatcatttttttttgtatttttctctgtctgactgtgtgttagaaaagtctcttacattttgcacactttcttctccacttactcatttcgcgctccttttacgtattcgcgaaattgaaaacaattcgaatttggcgttttgcaaaaccgaacaaaaaaaaacagaaaaattgaaattccgtttttgctcagtccaaaatgtttggtcggtcggacaaaacgtcaacaatttttgtcattggcacattttttttcttaattggaccgatcagtttttttgttttgttttactcattttggcacataattttgattccataatttgtcttctctttttttcagtattgttttagtgatcaatcagtagtactgatcaattaattgacttaccttatgcatttaacagttcaaaatgtccccccccccctctctcttttttttttgttaattgatggcatttcgccaattttcctctgtgaacatttgaattttgttcgattcctccctttttaatcactaatcacctccccctcttcttctgttcaacttctgtttaagttgttgtacatttttttattaatcagtttgtccatcgccaacacacttcctcactgatcagaaataattttgtttcctagctttgaagtgatttttcgtcgatttttttatatttttaatttaattgttggccatttggcccctctgatgatgatagagttgccggtatttccggcacggtctgcgcgtctgatcacggcatttttaaaaaggaaatgttgctgatcaccgaatacatctgatcactactgatcggcgcgttacggtaatccacaaaagcattgatgtacgagaattcgtcaaagtaccgaaatcggcggaacattttctgatcacttaggattgattttttccgtgatcgtgtccaaaattatcaatgttttgcattagttcgtcccgcagttacggtaatctgatcagttcccgtattgccgcttaacagagacacattttattgtggtgccgtgatcagatgtcggcttcagaccaaaggcgtgtaaaatgccggtgaattatgggcacaatgtctgtccgtctgtccattgttgtcccatgaattctctctctctcactcccgctcaaacacacacatatctggtcatgtctgatcaactctctcctctctctctctctcgctacaattctcgttactgttgtgctattcttaaaaatgtttttcgtctcccccacgctctctcttctcatctctcacagagatctctcaaaactctcctcatttttcatgtacactctaacttcactctgctgtccttatctgtgagctctctcgctccctctctttctcccctcactctctccattaggcgaactccttcaatgctctcaaacacacaaaaaaaatgttttttaaaaaataataattatatttaatttttattttttagatagattttttcttttcgctatcgaactaaatcattttttgcaaaatggacgatgaaaaaaggcccgaactgagtggcaaaaaacgcactccatcagagagaaaattttaaaaaatcccccgattttccagggaaatttttcttaggaaatcaagcgattttttgaaaattcgagcgggagtaaatcatcgttcattttcaaattttaatttttcatccattcattccttttctcataacattttggacacggctccgctcataaacaatttgttcccattgagcgtcctgtcactcaaaacttttttttaaaattttcttttttcaatgcgctgggaatgtcgaaaccaccattcgtcaaagagaaccagtgtaaaacaaagcaaaacaaaacagagaggaaaatcgatgatatttttataattttcaanaatttttttaaacnaaattncattacctacatttttttttntaacnacatttttntnttaataaaaaancnncatccaatcatttacattcataatcncaaaaaattnttctacctcctctctaacaaaaacctaaaattataaacccctaaaaccttcanaaactnttttcattaccataaaaattntcaaaattannnnaaaattttnnatcatttnacaaataaataaaaataanaaatttncaatannacataaaaccnaaaacactaatcancttaaattacaaaaaaatatacattcatttaannataactcatacnnacacattttttnttctcataaaccncacctaaaatnacactaaatntcaacaaaaactccactcttacaccatcaaataattattnttcacaacaanaaaattcaactaacaccaataaaacaaacnattacacaatntcnttatnatttattnatnataattttaaattacaatctcaacacaaacaaacaaaaacaagaaaaaaataagggtcatnccatactttttaaaatgtgtaacacaaatagtgagagaaaaacctttttcaatttataaaaaaacggagac

SEQ ID NO: 11473 - DNA, 2939 bp, Heterodera glycines
ttatttatttactttttaaatttatttcttcaattttcttttaataattaattagtttctcatttgcacctcatcaaccgatgcaaatgtgctgctgatggacattatttggtgctcctctgctgttttgctctgttctccttcccattggccgaccattcgcaatttacccaaattgtgcaaaaatgcgacggtcgttgtgctggccgaagtgaaaagcgaagcgatcagaaaaatcagcgaagaagtgatcagaacctggccaagaaggaagaagaagctgctagctaatccgatggcaaaaacagaagagaaagtgccattttgaagaaaatatccccagtaaaaaataaaatttgttcaaattcaacgccataaactcatttggcaattttgaaaatttagtgacttaaaatgtcaaaaaacggtacgcttcatatatatctagctcaatactgacggttttggttaatcatttaggtgatttatttatttttttcctaaactccctgggacctgaaaatgaaagcaaacaaattttttctcaatttttttaaaaataatttctaaataaaaaataattttttatttagaaaaagcttttccttaaagttgaagccctggtttatcaaattaaaaaacacataaattatttttagcttttttttttactaattttaaatttataaaaatctctcccgccgcttttccttttatttctcacccgtacgctgcacgtcatcaccagggcggcgcaaaacggcagcacaacggcggcgagcaggtcaagcaacacaacgctatcagcagaagaggaggaaatggcaacagaaggccaaaatgggggaggagagaagcgcaacggcgcaaaagcgttgtggaagagcaaattctgaaaagcaaagcgaaacaaacaaattaagaactaattaattaattaatgtataactaagccaggggtgcgatctgtccttatttataagatttgtccttatttggaggttccaaatcttataaaataaaaatgtccttatttataagatttgtccttatttcgggctatcgttattagctcaaaaataaccaaaattggggcaatttttagacaaaatctgttaacaaatcgcattaaaaaacacaaaattttcccagcggcgcctatcggcgccaccggacgcccctgtccaacccccaaaaatttttgaaaaattcgccgcaaaaaaagcgttttcgaaggcaaaaaaaggtcgtcggcttggcttttaatttcaaaaattggcctttttgatgaaaatttgttaacaaatcataacgaacttacaaaaaattttcctcggcggcgcctatcggcaccgccggaccatctcccccccccattctccaaaattccttggttggaggcgaaaaatacaaaagttgatgctatattaattgaataaagtgttatacaagcgatttaaagcaattttgcaaaatgtccttattttggacccaaaaatcttattttttggccttgatgttcttattttgaaaatttttcgatcgcacccctgaactaagcaaaaaaagaactaattatacatatgcttacaatatggtcggatagcacgtggcacaccgtggcgagcattgccatttggtccagcagttgggccaatgcaaccgcaccggccattgcttggccacaagtgcaatgtgccaattgatagagtgccccattcttggcaattcgacgcgatattgagcagagatggacagctgaggcaaatgtgggtaattaaagaattaattaggggtaaaataaacaaattaattaattagggattatttagaattaaaatactttgtttaactaaaattttaaaaacaaataaattgttttacaggtaaatttactggaaagcattgtgagtgccgaagcgaatgccaacgaaagaagtggcattgccaaaggcatctgagcaaaaagcgattcaaaaaaaattattttggtttttttacctcaatttttctgccggaataatccgagaaaattgccggcaaaatcacatgaaaagttacggccaacaccaaagtggtcactgaattttgaaatttatttttctaatttttaaatgaccttttttgttaaaaataattaaatgggacttcctttttaaaatccaaaaatgtttttaaatattttatggtatttttaaaactattttaatattatttatcaatattttcaccaatgatagccaatgagcagcggcccaaccgacggtcccattccgagtggggctgaccaacggcacccgccaaattgggccgtttcctgcgacaaaactgacggaaaatgtgcgaaattggcatttacagaaagagatggattaatatttgaataaaaattaaaaaattaaatttaaaaaatagaatgtattgaaacgaatgaaaaaaaactttaataaatatttaacaataaaaaatattaaatttaattttaaattactaaattttttaacttaaaatttatttgatgctttttcttgtattttaagaaagaaataagggcaaatttggcgatgaatgggcggggggagggcacaaaagttggccggccaaaattcgttttgtcacattgacaacaaattcgccaagggtttggccaccccatcgtcggcactaatttaatatttgagtgccggcaccgagcggagacgaaagcatccggcaaatttggcaaaatgcctcgaggggatggataaatttgagggaaataatccaaaatgatttttgaaaattcaaatttaaaattccattttattttaagcggaaaataattgacaaaaatttgaaaccatttagaataaataatttaatttatgacaagtgaaattgccatttgctgacaaataaattcaaatgaaaattttttattggaatttggccaagaaaaa

SEQ ID NO: 11474 - DNA, 1326 bp, Heterodera glycines
agtaaaaattgagaaatttaggcaataaaaaatgactttttgctcctatttattatcgatacaaaaagcaaatgcttcttcccttaaaattgttcccgggggaatttttattttgctaaattttggacggacttttgttgctctctgatgagggccaggatggcacaatttggtggtcgatgatgctaatttcggcaaattcgccaaaataaatttagggaaatcaaaaaatttgaaaaggtgtttgattttttaaatagtgccaaatttagtgaaattccaaattttcagggccgcctaaaagaaaaaaaatatttaaaaagtgaaataagatttttggaaatgaggtgataaattcgtcgctaaaatccacagtaatccaaaaacccactgatcatttgagtttataaaacgctttttgaatatttattttttaggtcaaaagtatttaaaagttcctaatggaatattattgaaaaattatttgcattgaaaaactgccaagagacataatgttccatttttattcgggaatgaaatttaataattgttaaatggtcattattgaatttgtttgtgctcctcaaaagcattccgacatcgccgcgctggtcagtgcctgggcgtccgcttgcgcaagtccaagtgccaatttgtccgcttcctaggggaaagcatacacaaacaaaatgctaatgaattctcatttttagtgttttaatgcaaaaaaattttttttttaatttctggaaccctcaaaaaaatcatacaaatatctaaaaattcaggacacttgggaaccctgatgggtttttcagtgaacaaatacaaaataaattaaaaaattctattattattaacgttttttaatcatttacaaggctccgcgaaaaaaacgatcattggtttttaaatcgatactttatttaacaaaaaatccaggccagaggcatgtgacccaggcatagtcaggcctagatttttcctgggttttacctcttccgcaacggcggcgcgtgccgcgcgcgttttcggcgcggcgctctgttgtccaccggttttgtccgttttgcagcacggacagatcagtccgagctcaacgcgcacttcggcaggcaatgcagccaaaaaggttctctcctggcaaaatggcacattgaaaaacacaaaaatattaaaataagtgatttaaatgtaaataaataaataaaattaaaaagtaaaatcttttgaaatttaaaaagcgctctttttcacatttggccatagacctagaaaataggccaatcgtgtgataatgattagagatcgcaattaaccattttt

SEQ ID NO: 11475 - DNA, 5110 bp, Heterodera glycines
  unsure (1)..(5110): unsure at all n locations
aaaaataactcacataattatgtattgtcaagtgcttntagccatacaatcggcacaatccgttcaaagcatacgcaaatgccgccactccgtccgacncaacggcacagtgcaggtcaattagccaaccaattaaacggcacaaacaaaaaagacagtgataggcacaattacagcactaaagatgaaaataccgtagataggatggagacaccgtacttttggggaagtcaaagactcggaaaattgttgtaatttggttattatgatatatgatcatattgatcagtgatcactttatgatcttttctaataaattaatatcggagagagcgagagagaattaattagtcgaaaatttatttcaaatatcaaattttaatgctttttacacagaagcaattaaaaaaaatttgcaggtcaaatgcaacaaaaagtgaccaatttgcggattggactgattatgagaaacaatgctttgatttggtcgcatttttattattgaaattattttccaattgtgccaacaattcattttaagatgccattgctcaattttggcctttgcacgccgtaatttaccgcttttgaaatttgaaattgccaataaattaattacttttttcagcgacacatgcacagattatgacgtcagaaagctggtccaattcagtaagattttattaaaaatagtaatttaatttaattaaattgcaattttcagtttatgaagcggccgaactttcgatgggccgcaaatttgtttgtaatgtgaggaaaaagcaaattaattaaatcatttgcttaattactttcgcttttttaggtgtccgtccactgcagcaattcaagacccgaaagtcaattgtaccacgacggaaagtcaatggtacgaaaaggcaaaatttaaaaaaaagaaaatttaaataaattttaaaatcgtttctctgctcaaggccgtcctttgccttctgctagccatcggctcccttatgctttttggcactttctacgacatttacgtgcatcggccactcgaacgtgccgttcttgaaagtggccaaactgtaaaaacaaaattaattcattaattaattaaattaatttattaattaaacgaattagggttttattgttttttaaattatttaaatgattttgggctcttttccagaacaacaacaacaagcagcagctgaacattgcacgaagtgttggccaatccaagacaattttgttcattcgattgttttccgtggttcgctttgttcaaaattttacaacaaattaattgccattaatttgtttttggcccgtaatttggactatataatggacacgcggatggaggagggccaaattcggtgtttgcatggtgggagaattaagcaaattttcactaattgcaacaccaatgaattaattaatttttggtaattaggtgcccgttttctcagcatgtgttgggtaattaattaattaatacacagctgttctaatgattttgaattttacagataatctttggccatacggtttgtcccaattgttttttttatttattttttaataatttcccattttcagtattattacattggcacttctttcaccggcggtcttttgactttgccctttgtaaaaaaacattgttaaaaattcagataatttactccaaacgctgcacgaattccccaaatatttctacaatcaattggtacataattgtttaaatttattatttttatttttaaattattacaattttaataaattatttttcggttgtccaagctccgctcgcggtcgactcattctttctgctcagcggccttctcaccgcgtacatttttctgatcaaattgcacaaaaatcagtttcgtatcgacgcggccagcacatggtatcattgtttaatttaaaatttaattaattttcaaattatttttttttgcttttttaggttgccttattatggacgccgatatttgaggcatttcaaattctaaaatgccaatttgattttgtttgttttttcctttttaggctaactccaatttatgttttggttatgataatgaaaggtaatggccagcccatttttttgattatcaatttttgttaattgaactttttcagtcactgtgctcacttatgtctctgagggacctttttggaggccaattgttagaaaatattccacaaaacttaatgatgatggcatttttaattaggacccaaacttttgtcgagactcttggtgggccaatctgttgtacataaagaattttgtgggccaaggcgactcggtgaatttgagagcagcaaattaaattataatttgttgaattttaattacccctaattattttacaaattacccctaatcaagtgcatgggttggacttggtatttggccaacgatttccaactgtacgcttttgcacccattctgatcatcgcgttgcacaagtgtcattttcgaatttgtttaattaattttttatttatttaattttcgatataaaatgggcggcgttttctttggccttattttaatggccatctcttgcgcaataaatgtgctgatcactgtgcaaaagggctatcctcccgcccctcttttgacgtcgaaattacaaatgtaaaaataaaaataataattttttaattaatttaaatatgttttttcagagtggcaattttacccgattattggaacgatttgtatggtaagaaaaataatgtgaaaatgaactaaaataattcttaaataaaatagaataaattgaaagcatctgataaggctttttaatgatttctaaaataattaactcaattaattaattaattgattattaattgcccttttagtgaagccatacattcgttgtggtccttacataatcgggtgcattgttggctattttttggttgaaaaacggacacaaaacaatttccgaatgagtacggtagggatttggattgttacggtattatacaatttttgtttttcttttcagttccattgttccattggctggtccttgtcaattgtgctgaccatttattccgtctttggccttttcaatttcactaaaaccggcgaaatttcgttgtggtggtcagtgagaaaaataaacctttttttcttgcatttttttttgccgatttaaaaattcattttaatttgatttatttctttttaataccctttattactattattataatcaaattccatccggtctttgacttttttctttgatcaaattgattaataaaactttcatttattcgaaattactccaatttatcaagaaatcattatctatgctctctttttgtagttttttaaattttaattgaaattcaaatccataaattcttttttattttccaaattaattttgccattttcttccggtctttgttgtacaccgtcttcggtcggttggcattcgctgttgcgttgggttggacaacttttgcgtgtgaaacgaaccacggaggcaacaattgcaaaacatattttattaaaattaaatttattaattgcggcgttaaattcatataataaacatttttccgccatttttaagcaatgataaatgccattctcggccacaaaatatttgtgccgctcagcaaaattacggtaattttaaaatgaaaatggaaaacaatgccgaattgatattgtttcagttttccgcttatttgttacatccaattttgctgcaactttattacttcagtcggccttcggcttttcattttacccattcatttcaattggtgccaatttcacacaaatttattttaattaattattattgttattaattttaaacaacaatttttaagttttatttcttataaatcagttgcacatgttcttcgccgccgttgccacttcttacggttgtgcgcttctgctgagtttggccatcgaagtgccggtaattaacagaaatgacaaaataaggccgaaataagcatgagaaaatctttaattcggcacaaaaacgagcatttggaacaaaaatgccaaaataggcaaaaatagacgtgagaaaaagcatccttgaaacttcaaaccaaaattaaaattcattttcatggtagaaaaagtaacacttgtttctttgttttaataaagcccctgggggttcattctccctttcgaattgggctttattagaggtgacaagcatattagaaaaaaagagggcaattagttattttcaggtggttaactttgacaaattaatctttgggcccggcagcggtggcgccgcctcgcgccaacgccgcagcgccgaacaatcgcagcagaaggagcagcagcaaaacggcacggaaattggcatggcaccggcgcaacaggcgaaaattgaaaaattaaattaaattagaatttaaataatatttttgaatttaggcacaggaaatgcaaccattgatgacgaagaaaggagaagaattggatgaaaaggaagaaaaagaagaagatggaggccaaaccatcaaacaaattggggaagaaaatgcagcggagaaatgaaattccattttcatgtatgaatgaaaacatagttcagttaagaaaatgccatttgtaataggtgccaataataataaatgaagcttctgcggttgtcaattagtaaagcattgagttgctcaaacgtttggccaaatccaagcctttgaattgtgccgttcgtctgatgattagtgtcttcttcgggcttttcttttttgaattggcgtttcgtttcgctttatctttacaagaaattcaaatttaattgtttaaatcattttgttcaattgatttatttgtttttcttcttctcagattgccccattttcttcttctgttattgtcccatcgttttgtccatccgccgatttttccgtttgcattttcggatttattcgttccatcgcggcgaatgcgcagaaaccaatggcggagccgacgaaccaactgaagtcggcgacccattcgaagttggcggagggacggaacaaagccgaaaaagcattgggcaacaaagccaaaaatgggaaaaaagagggaacacggcattcgaaatcagtg

SEQ ID NO: 11476 - DNA, 968 bp, Heterodera glycines
  unsure (1)..(968): unsure at all n locations
acaaacgaagtggcnaatgttaatgcgatgggacgccatcttaaaacagacaaacagaaatgccaaattgaaatgccaaattgtaaatttggcttattttgggtcccatttttcatttttagccatgattttttgggcgatttaagtcaatgaaattccccactgatcagcgagtgagtgatcactgatcagaccgtcaaagtgagtgcgccaacggtcactgccactggcgagtcgatttgcgcgaccatttcaattgggtcggtggtcatttggccaaacacgggcttagtggcggagattgtcagcacggtcagagtggcgaacagcaaataattgatgggcaaaccttgaaatggggggatgctaatttggcataattattcataattaagttcaccgaaaaaattgcccaatttgaccgaattccacgacttggcgaagcgcgaaaagtcgcagaaactgaaaattgcgctgcccatcgaagaaacgattaatgccattgcggaaaacattgtcaaaacggtctcagaaagggacagcggttcatctgcagtgaatgaattggccaaattaaaacattttttggataaataataaattataaaatttacaattttaattaaaattaattaattgtatttatttttaaaaccgttttaaattctcaagtttttgccttttcaccttcaatggtcaaactcatcctcaaattggccatcccggcggtagtcaccaaataagcggccagtgccatcattaccacgtaaacggcgggtccggccaagtcgatgagcaaacggacggcggaaaggccggcacggaacagtgcgacttggacagaccaaaaaagcacaaaggaaagccaaccgagcggggagagaccggcaaaacgaaggggggactgaaacgggcaggggggaggaggcgaaagggtttgcattggcacaataaaggagggactgaaa

SEQ ID NO: 11477 - DNA, 5537 bp, Heterodera glycines
  unsure (1)..(5537): unsure at all n locations
gcatgcgaattttgaggtcatccttggacatcgtcgtgcattcttctcactgcntgattgtcntgctggggtggggtcgacacccatgaaaacggcacgtgccgacccaccacgtgttcatgtgcgagggcgcagatgtgcacgcccctttcgcggcncaatgagcacaacactcatggccatcgtggcaaacgcgctttttgggtggaggaggctgaaaaagattaaaaaattcataaaaaatattcaattttattaaaatttactgttggagaaggtgtggtcgtgcccaagtgaccgtcggttgattttgttatttgctgagatgaagaaatggtggttgtgacggcctaacaaataagggattttgtgtatgtaaatcccttataaactaatgccataatttgaaaaattatgtaaaggaattttggcatttaaaaatatcgaactgtaattctttgtgatttgttaaatcacttgtaattaacaaaagttaatcaaaagcttatcatctattatcggataacaagttttattatgatcacaagggccggattcttaggttttagttcttttttctgcggctttgtttcggtgagaaatgtatgaaaaacacatttttacaaaaaaaagaggaaatataattattttgtaactaaattgctgaataagttatttacatcgattttaattcattctcattgaaaaaaagcacagatttttcaaaattttcgccaatattttaccatttttcgtccctatttcgatccaaaaattgggttttttcgaccctaaaaatccaggcctaatgatcacttaaatgaagctgggggctcgagtgtcggcacttaagtgtaccgactccactctttttttgaattgtccactcactacagtatgctttccgtcgcactcgttactgtcttcctcctccgacgaggacgacgaactgctgctgctgcttttactgctcgacttgtggtggcgatgtttgcgcgaagagcgaccaccgcagcgtggcttatgcttacggtgtttcttgcgtttggcttttccaattcaaccattgggaacgatgaaggactaacagaaaaataaatattcaaatattnaaatgtgattgaataaaaggaaataacaaaaattttattatttatttttctttttttgtatttatagaatttttttttttaatgattaattatagaaaaaactcttattgcattggttctcatggttttcatttctatatagaattttttaaaatcctgcagcttttggccagaaattctttattccggagtttttttgttttaaaaaaaattgcacgataccattttatattgttcctcttcatcacattccttacacacacaacaacatgatggattttgagctgcaaaatatattaaaaatgatccgatgcattttatttatacatttttaatggtttactgtatgatgaggacacggtagtgttgggtgtgaatgtgcctaaggttgtgctgctgcttatcgtggaaagggtgatctgatcagttggttctgtcgtcaaaagagagggtgacagagaaaacacagtagagaagtgatccgatgccgttgaagttgtttccccaattagggttgtatctgtcacattttgtacttatttcaagaatcttgtttcattcgtttaccaatattggttgaactggtccctgtcgtaggtgttgcggttgtctcaccaagttgagttgtacctgtaacatgtgtctattaattacatgtttcaccaaatcagttacaatctttttaccaagcgtggttgaacttgtctcggtttgtggtgttgttgtttcaccatgttccgttgtcgtgcctttttcgcttgctgtacatatgccattaatacaaacggaatcaaaacatggctcttcatctaatgaacaaagaaactaattaagagtaatatttaaaagggttcaattaactgttcccctgaaaaattgagcaatcgcctccggactttattttggcacaacataagggctcaggagtttgttgctttgtcaaatcacagaaaagataacttaactgcttggctaattaatggcatcattactttattataatgaatacttaaatggagaaaaatattacaaaatatttttccaaaaattttctttttaatcaaattttattttaaaaaacttttacggtgatccgcatccatttgttgctgtacacgatggtcttgtggcatatgtgtacaaattgtcggtgtattcattgcttaggccagctaaaataaattatgaaataattagaatgtaatagtgccgagagtaaaacataattttatgccataaaaagtttcagttatttgttctaagttttccaggacattgcagaatattaaaatttaaaaccaaagcattgtgaaaggcaatatgacacctttaattaggagaaccggatcctggaatgggtacattgttgcactgaggcgataattttcagaccctgagcactgaaaaacaataataaaataaaattatttttacgaatgccaattttttcgattctatttcaaataaataatttcttaaaaattgtttaaaaatgtttaaaatttgaattgtcaccggaacaatttggtcatcgggtgggtattgcgtttcgcgctgctcacgattctgccacttttggcgccactgctcccaaatctatgcccagtaataataattaatatatttgataaaattaccagcagtatatttctaaaacttagacccctccacttaaattagtcttaattgacacacataatcgaggaagcagtgataaacgaagaaaattgggtcttctgttgatgtttctaagcgtgtctaaaaaggttaaaaaaataccgcaattaattttaaaaaaataataatataattattaattttaaaacacttggaattaattaataaatttaccatttgtcctcctatccatgaatgcacataattgtggatcaattccaatgcgttctcagattctacgtccggtatcgattgagtgcattcgctggttggagtctgaaaatattgggaaaaacaaaaattattatttttaaatttttttactgcatttgtaaaggcaaaaaagaaatccatgttgcttttcgttagcattgagagaactctaaattaattggataaaaaaatattagtgcgcttttttactccttttctccaaacagccgaccatttaagccgaggtcacggcgaattttgccaccgctcgactgaatatattttcattcaagtcatttgaattaatctattgatgagatatgtatgaaacgaataattagggttaaattaaaatcattgctacaaaaaatgaacttacagtataccaattggccaaaaaaccgtcggcaatgaatttatttccgttgtcaggagcacccatgaacaatttgctccacatgatcgaatctgtctgcattaaaaaaagtattatttatttttcgtaaaaattattttaaaaaaacaattaccgctttcggcaatcgctggtccaatgtaacgtcccaataaggaagacacactgatgggtcaattgcgcgaattgcgatttccatcataaaacaatttttttttgtttgcattaaaatttcggttgataggtcattttttaaatccgccaaaaatgtcacacgtataaattcataagttgtctcagtttcaaccaaattaatattccttggtatcatccaatagcactaggtgttctctattcaaatataaatttatgtagaaagaaaaaagttattatcataaaagtaaaaaaaaattgggtcagaatgttttgtccataccttttttgaaattcaataaagtttttaatattaaatattaatagagcatttcttagagctatcgaaattccattaaagtttgaattctgactgtagattttttgtacttttatggccataattttttataattgaaaaaaaatttcgaaccgcttggcggatttatgaaacaacccaagacgaaaattttgcattaaaaattatcaactgatttatatggaaaaacatggagatattcgagggtcggaactttttcaaattcaagaacaaagatcgacaatgagtccgagaatggagaaagaaccgaggcgccaaaaaccaagaaaactgaccttttcaaatattcacggtgccacaaaagaaaggtggggcccccgtgggcggaagggattaagctgggattgcagtggaagaaggacagccggtcgtactcgtgggaaccgtaaccgttcttcatttggagccacgcgttgtgctaaatggcaaaaccgcctaatttctgcagaatcgggcaaaacccggcctccatcacaaaatatatcagcaatctccgagacccgttcattgtttttttgaattttagtcttttttggcatcccaaatgcagtgatgttggagtcatggcatattgtacaaaaaaagtcttttggcaaatgcctgaacctgtaaaggcattctctggtcgaattaatagaaactctttaaaaacattaaaaacataataataatttaaatgatttaatttttgattacttgaaacaatcaatttttatcgcttcatgaacaaattttaaatcagacagaaatttagtcattggtgcctgtacctgtaacgtttactgatattttttcaggtttaacctgtatctatttttctatataaaaattttttccggtctctgatccagataaaactcggttcctatttattactttagagtttaaacagtttccatgcagctgtacagtggcaataaatgagctaaagcctatataaaatcaatgctcttacaaatcgctctctccgatcatcgctgagcatccggtaatccattcgcttccaacgacacaaactcttatccggtcaagcgccctgttgatgttatctcacggttctacacagctaacatgccggttgtatagacgatatccatatatctaaaatcatgacaaacctataaccttgattatgattctatgagtctcacattacagcgattcgcgcgcacagcaatacataaagactactccacgagtaagcttatcattatcgaactttagacacagtcgcattagttttaatgagttctgataatggcaaacacaatattcgcagtgaatcattcacgctggtttaatgcgttgccgacaacggatcatgtcgactgtctcgaacggcgtgcaggactagatcaatctatacagggtcagaaaataagtttatccggaagagcgcatgcatgatacacgtgtaatcggtcagcatttcttgttgcatgaacacaccatttgatggaatattacacttcgatccctatggcgtgataatattcgtcgatatttttgatgtaccagaccaccctgaacacgcaggtacggtagccatatgtcaaaaatcacaggttactcatagtagaggtggatgatgaagattatgtaatgtaaacataggtaacagcaccgt

SEQ ID NO: 11478 - DNA, 4375 bp, Heterodera glycines
atttgggcatggggagccaaaaggtacagcgaatttcaactgtctacgcaattctaaaatgcaatttcaggcaacaaattttgcgttttggtggctgtagggcaaaaggttacgcctctaatctatcgactcgaccacggaaaaccaacgccacaactcattggcaagatcgaaccggccaacggactgaacacggcgatgtgggccccgcagggcggttgggtggtggtgatgggggtgaacacgtccagcggaattgtgagcttcatcgacgcgacgggggcagaggcgaacaaagctaaaacgattgagcatacttcactcagtcaggtgggccactgtcaagaaatacaaatgatctttcaagaatatttttgcaatttgtttcccattttcagggttcttgggacccgaccgggcgatactttgccacgtgcactttcgcgggaaagagtcgctatgagacgggctatcgcattcactcgttccaaggacgtgagctgcgacgtaaggcggtagacgccctgctgcgattcaaatggcgtccgcggccacccgtttcattgtccgagcaaaaagtgcgggagactcgcaaatcgttgaagcaattgtcagcgaagtttgaggaggaggacaaaagggaaatgctcaaagtgtcgaaggtaaacacaaaaaaatatattggggaccgattgatggcggaaaattccctttttaggaaataattgaacagcgcaaaaaggcattggaactcttctcgaacattcgcgtcgctgctgctaaaacatacgaagaagaacgggaaaaacggactgagctcagaggcaattcatttaaattctaaataaaataaaaagcaattaaaacaattgtttaggtggcattgaccaggaaattggcgagaaggacctcgttgaagaaacaataacagtggcactaaacacggagaaggagaaaatcagagacgagagcaaatagaggagagaggtgtttttcatgcactttaaattatgttttctgttaattcattgttaaatatgatatgtactcgagtttattataaggtcggcaatttcggttaaaatttattccgaatttcgggactagcagtacgtatgtgggtctaccacaacacaggtacaatcaatagacgtatttaatatgcagcgtaagtgggtcagaacagcaaaattgaaccaatggcgctgctattcgttcggattgtattaatccattttttgtcaactgtttctgacccacagtttccgtaattattatgtgtacaatttggggatattatggatggggtgggccaaatttacaaggtaataaatatcttccggttgtttcgttttcactgtccttcttcgtccctggagagtccggtcagctctttcaccggacattccgtctcccaaatcagcaaatgcgccaaatccctcgctcgaatttgctctgtcattgcgcttctttcgttgctctccttcttgtcatgagggattacatcttcgtcacctattgtgtttttgacatttttaaaacccaacgatcttttgccccccccccttaaataatttctttcaacgtataaaacaaacccaatcgaaaatcaatatatccatcgccgccggacaccatcaatgcttttttcgtctcgacactttgtgtaaggtcggaaaatccctctgtaaattttggtcgtttaaattgtttatctgtgtgtgtaaaaatggtcaccagcaatcaatggtagcagaaaacggacagcatctttgtggccatggaagctgagctgagcgtttgtaatgtcacagaatggggtggaatttgccgtggattcatcgcccgacgaatggacacgaatcacttggcctggcgtccgtccccggtcgaggtcagccacaacagtcgcactgctcctttctgacgcaacaaaatccaaatatttgacacaaatcgcttgacctaccttttaaagggattgagacgattatccctgatccggtgcccacccaaatccttctgttcagctcactcagagaggtgattcgcaaatggctgtcaagctgattagcccctgaattgacgaaaggatttagaaatgagagagcaaagcggaagacgaccaagcattttggagatgtaaggttccacgtcaacgtcctgaagatgttggaaagtttcgctgtggaagagacggatgcacgagtcgagtcggatggaaagccaaacgccttttccacagcaaatcatttgtcgaacttgggagtctttcctcgggtgggcagtgaaaacatgctgaaatacgggtttctctgattgtgagtaattgttccgctgtttttcatcaacctttattttgagggttgtcgggtcgagtaccatcacacaattcctacaggcagcccatacatttccgccaacagtgcacaaatggcacaccgaactggtggcagaacccaatttgaccacaaagtaaccactggcggaccattccccgactaaaacgcaaagatggcacacaaaataacacgaattaggtattatcaattaatggaactgtaagtacagtactgacttgtattccggtgaaaaacagcgactgaaccattggccaatgcggcaaacatccgcccgtttaaatgtctaattgaaaatttaaatttgccacaaatgatgacgtacaaaattgagagaacggcatccggcattttcacacgccgcaaacatttgctccaatttcgcacagccgaatggatgtgaatgctgaatgtatgaaaataaaacacaatattatggagaataactcccacaaaaagttctccagcccaatccacatggttgggaggctcagcaattcactctcagcgccattggcacaccattcgtacgagttcaaagcgtcacgaacatgcaaaggcaaattggcaatggccgaaagggaccctaaaagtgaccaaaatagcattccaaggcaaaagggcttgtatttatagtgtcattagtaaaagtgttaagaacagcggagcaaataaacaggaaaaattgaaaaagtaaattcagaaagcgtgattattaattaaaatggatggaaccgaaaagcgtggacagagaaaaaaaaggatggcacacctccaccttttattttgtttgtttgtcctcaccatccgtcaattttttcatgacaattgtcgcattttctcggtccattttttctgacgaattttcttcgccgaattcaaagggaattgcttctgttctatgcagtgagggcttattgctgctgagaacatcttgaaccgattttggggctcaaaattcataatgggagaattttaggcacatttttgcgaatgaattcgaaaacacttacttttcgtttcaccgttcgctccgatggattgattaacactgactaaaaaacaatttcaaatgaagacaatttcaaagcacttacgttttctttttggcgacaatttctcattgggtggtgaaaatgttggaatttggtcctcctcttcacatttttggagtgcaacgaattcaatggatcccaaagatttgacttcctccacgagctccgccgggacattcactgtcgacaaatattccccggaggtgcacagttccgagtcgacggacattccctcgtcggacagtcgcgaatccctctcacgaattcctaaaaagcagcgaattaacgcaccagcaaaatacgaggcaaggcaatggacagtgaaacacctgctgcactcgcgacacacaaaacgttgacattttcgatagaaaagccggcaaggatattgccgggctgattggcctccaaaatggagacgaaggagcgctgctcgtccgagccacaaacccacaaaagactcgaagcctcgaggagtgtggagtcccttctccgtctccgtttcgtgtgattcttcgactatatgcaaaaatgcggataaatccccaactttctaatgggtaccgtctgttgttgattctctctcaagagcacctcggggtcacagctcaacattgggtctcccacaatgtattcgccgtccctaagccccccgtgcagtgccgacggagcggcacaccaaaccttttccgaataaatgaaacaatcagaaaaaagaaaataatcacttttaaagacggcatttgttccaacaagggcctaaaattgagttatgaaaaaaagaaaatgattagtaaaattgcgacctgcaattgaccggaacaggaattgagatactttctgtggctttgttggaagtcattgaccatcctttttagggaaccaatgaatattcgaggcatttggccaattcccgtcatagcgtaggcattcggaaattcctcctgcttcatgtactga

SEQ ID NO: 11479 - DNA, 1710 bp, Heterodera glycines
gtaaggaaatcacaaggaatgaaagagttaatggacttacaaactccaaatggatttactccgcctttgtgccaattcttcttcgtgttttttggcccttttaagttccgtgaatttgaccgtctcctgcagctccaagaacttttctttgtattggttcttctccatgaccattcgtgccatttccacgcgtgtgaaacgtttcccctgggaacggtcctccttaaaatgggataaaagtgctaataatagtcagacaaattaacaatttagaacatttgatgaatgggggggggacccaaattcatgtaaaacacaaaaccgaccttttcgtcaatgacggtgtccgaattgttcattttctccttcaattccttcatttcgctttccaactcgcggattcgttcagacattttcaatttgaccatctccaaacttcgcacctcctcgcggaacacttctttctcactgaatgaatcggaaattaaaattaattttcgaataaaagcaatgcctggaaagctgatcaacttgggcaatgaggtcgtttttaacaatatttaatgcgttttttgtctccaacagttccgtgttctctctgatcaaattctccacttctttgcccattcctaaacaattaaatccttcaaataaaattttaaataaaaaagaaaggttgttatcacacaaaacaagcaaaaaaggaccaaacaccatcacaaattagcaaataccgataaatgtgtcgttgactgcaaaaaacgaaaaagttttacgaaaaattcataaatttggggcaattacccgccgaggcgaactctgccggatcaactaattggcctgaggttttgggagatgaggcaaaggcgcaaatagccgatataaccgagaaactgacttggcccaatactcacctgtaaggtcggcacccaaagaaacaccgtcgccatcgtcgacaacgtccctgaaaatggcaagtgtaaactaaagtaggacgggctcaagcgtccaacaggttttaacagttcgacatagtttggtaaattacaaaaaaatataataaaatcctttaccggcggtccgtgctcgctcaattttatcggacttttaacgggctgaaatttcgcggagaattccccccccccaaaaaatatgaaaatcctaatgctaaatcaataaaacattgttcccgatgtttgttaaaaccagctaaaattcccaaagaattctttgatgaatgctttgtcttttaattgggcattgactgtcccccgctggcacaaaattcggccgtacaattgttccatttgtccggcggtgctttgtcgcccgtctttctcctccttcacttccttctctgttgccgcttctttttccttctccgtgtcggcgcgtggagtcgcgagaatttcggccaccgtttgctcttctccaaattcttcgtgccaatcccctttgataaaacaacgggtgaattacttctttatctcgaagaccaaagcccactttcggtgctgatgtgatttgccaagttcaagtcggcatgcgtactctgtgacatatgcgcactgatcaggtcggaaattccagcgtacatttgtgtcgatggcactcattgccatagtattcctcaatttaaatgccatttccgtatgatctcaggagaatcagtaatttcgaagatggacctgattgtttttgccaggacct

SEQ ID NO: 11480 - DNA, 5204 bp, Heterodera glycines
taaaagtataaaaataaaccaattttacgagttgtcaagtttagttttctcttccaaacacgaatggtataaaatttaacaccaattttttcagctattttcccattaattttccaattcgtttttgaattgaatttttttgtaaattcttttttcactttttcaaattgtttaacttttactattttttgctgatttgaaaattcccttaataaaccttaaaatgagacaattagtaaaattcaaatatgccattgttttcttaccaaattcgttcttccatttataaattttctttcgactaattcccaactatttagcaatttctcattacaattgagaatgggacataagtttataaacgctatatttttgccattcctttttcatcaaacaaatattagtaataaatcttcactttatttgtctgtttttgattctaaataattcataatgccataattagcgttttaggagaacttcagtttacaatattgcgaatttcaaggaatttttgttaaatttaatctccacttgaaaaaatatgtccttatttttgcaattttaatattttatttctcaaatctcatcttctttaataaaaaattaatccaaaccccccccatatctgaacaaatcctgtgcgttttcaggccgaacaatgttgatctttacactgataaacacgtccgttcgcagcagaccaaacaatggcaaaaatttcttgaaaataaccaaaaacactatttttaattaattaatttttggtttatttaagtgattaaattttgtttaccggtggatttttgatgacattaatctcaaaccattgcatcaattttgactattcagagccctaacccaaatagcaacaacaggccgaaaaagaattttcggtctttaaataaaattaattaagtattatatttcctatgtatttgtaaaatgtcacattaattagcaaaagactaataaaattatatgccttaattgctttgcttatttgtccacgattatggccaaagaatgacgtgtcaaacaatcggatgcccacctcgagcgccaccttaatttgatggcaaaaattacttctaatttgaaaaattggcaaaaaaaattgtttttttaccaaaataaattgttccgcctccaattggcgccaacttggcgaacattgaaggccaatttttggcataaaattgccagtggacaaacaccaccgtccgcccggcacattaacgaaattggcgatttcttaaattaaattttatttaaaaagtcaattcttaaatttgaattatatttaaaagaggaaaatttattttatttttttaagacatataaagtttaagccataaaaactttgcttgattttgattaaattgtttttgtttcttatggcagttttacaaaacgagacttggcacaaattaggaataattattactttttgattgacatttttttgtaaattaaatttgtttttctgttttatttgcttgctatttccaataatgataagaacctccgttagacacacctttgtaattgatttctatggtttcattgatgttgcgataaattttgaacaaataaatctgtgaatataaaattcaacaaatatattaaaattaaattaaaattattttaaaattattttttgtttaattaccgggcttaaagaatagctacgctcctgaatgttgctcttctgaaaaaaactatattaaaatcaaaatttcgttggtgttttttgaaaaacaaaatcccagtcataaattgttcagtagtttgctaaaattcaaaaaataaactatttcttcgtttccatgaaattaattaaatatcaacgcacttcgcttccggtggcctccgatttttttcccaagtcctgaatttgtttgtgaaaaaatcaaaaattaataaaaaaagagaaaaaaaacagaaccaaaaataatataaattaactaatttaattgaaacaactcgaagaaaattaaagtaaaaattatactattacatttttttaataaaaaattaaaaattaactttaataatttattttaaaataaataatgtaaattatttagttcatttattttttttgaataattttttaaatttttgtgttaatctttttatttttaaatttgaataaaaactttttaatttttccaaatatttttcaccttttttctcaatttgaacagtatttgtacacgataagctgtgcctgcaacgctttgtcttgtggcattgataattttgacaatatcaagcaaagggatgcccccggcagaccgatcggagttcaatttttgggccgcaatttcggaaatttcctgtgattaaattaaattttcgagttctacgtcatttgttgaaaaatacctgccttcccttaagttttttttcgataattaccaagcttatctggtagttagttcacttgagcatatttacacaaaatacacaatcttttttggttttcttcaaaaatttcaacataattttccaacttagtgaaatgccagttagtgttttcttagaaagataaatatttcagcttaatgcatcattttatatgtaaaaaaatagttttgccatgacatcaaaaaactgaaaattttggccttttagtcccgcttttgctgaccgtgatttctggcaaatttacacaacacggcacaacacggccggccacaatttgttgatgaagcaaactaaattcgtcaagctgttcaatctccgtttctgcactgtatggaggaaaacgtttggcccacgactcttcttcttctacttccttctcatcttggtctctttgaacggcctcattagcagtaagcattgtgaaggccggagaattttaaattttaattggataaaatttttcaaaatttctttaatttcactatgtgaagctaaaattcttgaaaagggctaaatatggtaataaaaatcatttaaatggaaaatataaattaaaattgattagtttttgggaaaacgaagacaaaaaatgaaatatttcaatgtctagctttatttttgacgcgaaaaacttcaatttaggtgtataaatgtctaaataacggcaaaaaatgataaaataggggcaaaaattgataaacaggtgcgtaaattttaaaaatctgtgtctttttcaagtaaaagccatgaattcgctccatagtcacaaatcagtatcgatccgccgactaggatttatccatatggaacaacagcttttcctatttatttgttgtccctcactttaagatgctaccgatccgctctcatcttctgaaatgcttatctgctgtttcaaagaaatcaatcgatcaatcactttcgcgtctttgctagattaaatgttacgtctttgaaatgagcttttctcgagctgaagttaatattgtaaggcctggaccggaaatggcattttattttcccacgcacatttattactccgataaactcctcccatcccgaggggcgcttaaaaggcaatggagagccagtcaaaggggcagtcggatcagtcgggagccatttcagtggaacggccaatcgatccccgcctgggaggatcccccaggcatccatcaacatcccttcccttccaagccctgaggggcctaattacggacgcgtaagagggtcccctggactaatttccctcataagcactgggtagtgggacatcacggctttactggtagcaccggatggttccaaccctatgcttacagggcttgggccatgggaagagggggattcgagtggtagaccgacttttcaggggatgtttttgtgttgcgcaaagcgccaatcattttagagtcctggccaggccccagcaaccccctgggaatcaacaagaagtatcaaatcaaaaattatcccacgcgtggttcgataattattttcaaaaaaaaaaacccaaaagtttatccatgcatggtttcgaaaatcctaattcaaaaataaaatattcaaaaattatccatgcatggtttcggaattttgcggttcaaaaaaaaacctcccatacgtggttcaaaaatctttacagtcaaaaaaaaggggtgatcgaaaaagggacagaccccagaaaaccctcaaaaatggaatttaactaattcatggagctcaaaaagagagacaaaaacaaaataaaagactaaaaaataaaattacgaatgaattaggcatttttttagaggtactcttaaaaatgagggtgaatttaattaaccccacggggtctaaaaaagtgttttgctccttttggcgaaaattaaaatctgctcaattttaatcggaatttcattaacccttaggggatcaattaatttgaaaagccataatcagttaatcataaataaataaataaatgactaaataaataataataattaaattgaaaaagatagaaaaagatattaaaatcaaaaaacaaataaaaacaataaataaataaatttaaaattaaaagaaggaaaggaggattgaaaatgcaaatcacgtgcattgagcacacatatttagtcatttaaatttgcgtctcctaaaataagggaaaatttaatgaaccccacggggtctaaagaaatattgtttttgactcatgacaaatcccaaattgtcgagtcttagtatccctgaggggaacaattaattgaaaaatatttaaaaaaattataattaaaaaagaggaatttaaattaaatttaaattaaaaataattattaagagaaaacaacaaaaaaaaaaagattaagatatttaaattgaaaaagtgggaatggaattgaaaatgttaatcacgtgcacggcagcgccggattgtcggccacagtacagtgacaaagagatggtcatctcttccatcgcttagccaccttcccccgcgtcccatcttttccatcgcttcgtcttcccccgcgtcccatctcttcgttccccccccctcttccatctctttgtccctccatatcccatcaccccctcctagcaaattatgcgttgaatggccaatatgtccattccgcaacatttaagtgtaatgtatgggaatggccacaaaaacggcaacgccaacgaaggacgattggctgccgtaaatcgtttagtgctacagtggcttggcttcttcccgaccgacccactgacatcccccccaagcctttccctctatc

SEQ ID NO: 11481 - DNA, 1097 bp, Heterodera glycines
ccaacagcaacagcaacaacaacaacagtcatcctccgactgttgtcagacgtgtggctgcgcgtgcggttgctgctgccaaagcagccctttcttctgtttcacgggcgacactttggtaatttaaataattcgcattagcaattaattaatgaatgttaattaataatcattaactttacattaattattaattgacaatttgaaggtgcaactcgtcgacggaactcagaagcgaatggacaaactgaccatgggcgattgggtgggcaattaattgaattaatcactcaatgataattaattaattgtcgctatattcattttaattgctttttgccacgagttcaggtcgtttctgccaatggttcccaactgttgttcagcatggtcgagtcgtggatccatcgggtgaattcacaaaaaataattaattattccaattaaaattgagaattgaataaaaacaaattcagaagccggaagaggaggccgaattcgtgaggttacagctcgaagacggacgaacgctcaaactgacagcaaagcatttcatttacgcctcaaaatgcagcggagacggcggtaagcagaaaaggggtcattaggtaggcccagtgttttcaaacggtttcggggaaaacccggaccgggcaagaaaaatcacagacccagtgtttcatcggaccggggcccgaaaaagccgggaccccggtcccgtgccgtacaacttttgtaaccactattcaatcagtagacggaattttgcattctaattttgaatggtttaaaatttgcagaaaatcattcttctgtcacttttgcccttatttttcctgcaaattttcaactttgtttagccttaaattcattgaaaatttgttgttcaaattggttgatgtgcttaagggtacgtgccgatggagtgggcgcgcgcgcggatggtttacgcggacgaagtgcgcgtgggcgactgcgtattcgcacaagacgaggcaaattcaaagccaattaaaatgcatttaattaatttgacaattgcccttttcagtccggactgatggctctgttcgagcgccgcgtcttaagcattgaca

SEQ ID NO: 11482 - DNA, 3389 bp, Heterodera glycines
  unsure (1)..(3389): unsure at all n locations
acaacgtgctgcagaagagcttcttcaatgtttgtatcncacggattggcatgatttgaaatgccatccattgaattttcaaattccaattcaattcacagaattggaaaacactgccactgattgaccaaatttacgggcacgtcagcgaggaagaggtgggcttgtggcaccgccaatgccaaaatgtccccattttactcatttgcccacttaatgttcagatcgaattcccgggttggctacgtttcctggtcgaacatgtgatgccatttgttgtgccaaagtgaccgtgaaaaaagcattgtttatacatttaaattaaattatcatattgtttcaaaaattaacttattggataaattctgttacacaatatttccaaaaatgaaagggaataacacgacaaaacaattaagccaaggggaagcggcgggggggggggtccggacaatccatcagtaatgtgttagaatttttttttgagaaatgatcaaaaatcttgcgaaaatgaatgctaaatttaatttaaaaaaaaatttatataggtttttaaaacatttatagttagttgccttaataattgaatttaattgatcaactatagaaatttcattaaattattaaaagtgatcacttcgtatattttttaaaaatacacaaattatcaactcccttttttttaacgatttaaattcatttccacatgataataaaatatagcgttttaaaaataaattttgctgacggattgtccgggatcaagcggggaatgggggaaagaccgttgctaatacgatcattaattagaccatagacccaaaaggaaatggcaattaaactgaaatattttatttagtgaaacggctgtcaatacatcataacaaaacaaaacaaaaaagcgttgtttgcggttcattttaagacggagggaaaatgctaagggaaggggcgggcgaagagcatttgtaacatgaggcgatggacgcgtaattgtaagcaccgcaactgaaaaggaaacgggggagagacggatggacacggaatgtgccaacaaactcgaggcattcccaacgagaattgcgaatggcaaataattgatcgtcggtcggcactccctcacggcactgacgacacatcaaaaagttggggaagttaagaaaccagcaactgaaggggcaaagaaaaggtaaaacactgaaaacggaaatgctggggacacaaaatttcgccgagacaaaatgtctccaccggtttttaaaaaatagaaatttttcaaggaaaaaatcagaaaaatcagaaaattcaaaatttcttttcttcaaatcttctttcggcggcgagatttcgggtgcacccttttaaatttaatttttcaaaaaaacaattttttttttgaagagagttcagtggtgagtaaagttgtcaaatgacacttgcgcatagccccacaattttaaaaagattttttatgactcaaaaataaactgagcgacattattggcaattggcgccacggcactgttttgctgctcggttggaatcgactgacctgacacaataccacgacccgtcgtccaacgactcgccaccgattccgcaggaaaagcctttggactttggggcgccgcatttgaagcagtcctctttgaaattgtggtgtcggcatctgaaaaaatgagtgtcaattattcttttcattttgaattccgtacattccgcaaacccatcgcaattgttgaatttgttggcgattctcttccggtgccctccctttgatacatttttggcacgacaaatgggtgggaaagttacgccacaaacagctaaaaaggaaggggcagggtaatataattagcttaatcacgaaagggaaaatcccaaaaaatataaaaatgtacactaaatgccatgtcaaacgaatatttctaacagttcaacacctcagaggaatatactccggcattatattctgcactcagtccgaataaatcacaatttacccgtgaagtaccggcacagttgagctacaactaagttgaaagcatcaaatgccatagaaacgggaaacaaagacaaattgggaagtgggggcaagtcgaaccgagacagacaaaacaaagggactaaccactgggccaaggggaacacagtgcaatttagaatatttatgttacattgagctaaaaagcatttccgagatttcccatggcttttgtcattgttattaatggttttgttcaccttgagcacacccaatactgacaatcagaagttgcagggagttgcccttccgtgggccgtggcgcgtcgcaatggtggcacgtcaaattggactcgtaattgtcaaaatgacacctaaaaggcggaaaataattaattaatgagggatttcttgttgcccttcataacagaaaaaggaatttaggttaataacagtaaaattttttaggtttccaagatgacgccaggggaacaggacaaaatttcgcctggacaaaatattcgccgccaaaattttaaaaaatttcgttggcgaaattatatcccggcgaaatttcggtgtctaaattttggggtgcatccgacgccaagccctttagccataaaaaaaaattaggatggggaacgcacatatacaatttttttttttttttttgctcttcggcagggctaaaaacttttttctccagtgttagtgttcgaaaatttcagggtataaaatagaaaatattagccgtttttttgcaggaaaatgacccttttgccggagaaccaaaattagagacaaacgcactcagcgcattgccaacgcgaactgtgaatgacgccaagttgctcatccgtcggttcttctctgcgacagtggcgacacttcgaatagttggggaagttgagaaagccgcaactaaacatttgaaacagaaaatgcgatgaacattctgtagcttttgcatgacatgcaaatccaagtaaaattgttttaacggatgcaaattattctattcaatttttatgttagtcaataaaatcttataaaaataaaaaagatttttttgtgttatcacctacctataagaacgagcattctgtcgagatttgaccaaaatagtcaaattgggagactttttgaataatagacggaaaattataagaaaattggtgcctgtaggcaggaactgtcccatgattttgtttggaggtatcgccgccccgggcaatgatttttttttcaggcgccatcggtgaagaaagatttttttatagtttttcaccaaaattgctaattttgtagatttttgaaaaattttattaggtgatggagggtaccatcaaaattatcttacaattaaaaatggaccaatttttggtaaaaaaggatttataac

SEQ ID NO: 11483 - DNA, 906 bp, Heterodera glycines
  unsure (1)..(906): unsure at all n locations
ttctgatcactttgaaactgttcgaattgttcaacgcaatcttaaaaagagaaaagttaatttcaaaacaatatgattgtaaattattcatcgtaaacctaccgtatttttcctgctgttgggaatttgccactttattgatccgttccaaaagtttcttctgatcattttgcaactgttcgaattgttcgacagaaacttaaacatgatggaaatttttttttgtgaaaagaaggcaacctaatgaacccaaatacgttcggtaaaattcgttcgttcttaagttttcaaatttgtttggaaaattgcgatgaaaaattacaaaaccgaaaagtaaaaagggcgttgtcgctggaataggtggaggacttttagctccccgcccgaagccgagggtcggctacgccctcccttgaccacaaattaccaattaaaaacactaaagaagcaattgttttcctcactcaaaattcaaaaccatcacttcatcccttaccgttattcggttcattcgctgaatttgaagacatttttataaattatataattgtttcttaaacatgcagattattaattagtttagttacatatgaacagtatttaccagcacaaaaatgggtaatccttcggaattggtatcccgaccgaaaaaaacaaataaattttcttacaaaatcacttttgttaggttaaaaaaaatgagctgatcacgaatccgagttcgggttttgcaaaatcattgttttcgtcaatgatttttcatcaagtacttgatttttctttgaaaatttttgttttctaaaattttggttttctttccaaaacatttcgaactaagtcaaattttacattcagaatttgcttaagtatacaanacttctatgggttttatcctttcgtcgatgc

SEQ ID NO: 11484 - DNA, 4331 bp, Heterodera glycines
atccatactcaactcatccatacccaactcatccatactcaactcatccatacccaactcatccatactcaactcatccatactcaactcatccatacccaactcatccatactcaactcatccatacccaactcatccatactcaactcatccatacccaactcatccatacccaactcatccatacccaactcatccatcgggatccgggacgcgaaaaataacggaattcggaataaacgaaactattacatatttacttggatgctcgaattaattaaaaaatggttaactccggttgctatgtttcgactagctatattactgctgacctgccctttaattttgtgtatggaatggcaaggctttatcattgacaaattcggatatttttttccggttgcggaacgtgatgccgcaacgcttttgacgctgattgctgataacattgaaccgggaacgttgattgtgtctgacggatgggccgcttacggagggattcagaatatgcagcagcgatacgaccaccgctgggttaatcaccgtgttttttttgtagacccccaagaccggtgccgacatatttgtttcagtacatgttcagaagataccacggaaacgcaaaaatatttcagcatattttggaagaaatgagattaaattatcccgtatagtttgaactattgagaaattttgtaaaaatagattagtcaatgacggaaaattgtaaatgcactgaaattagagaaaaaaaattgattggacgcataaaaattgatgggacgcataaaagtcgatgggacgcaagtttattgaaatgttggatgacattagcacacaaacaatagaagtacaatatacgcgtgcattgatcggaattaatatacacaatatacgaatttggggggtgccaacaaatgcgtttctgtgataattgggccatcaataattcatacataaatacggatattttggggagacaaatgaatttattaaatatcggggtcctcatttgtttttcgctcgccaaatcatcagagttctgcgaggctcatccgatcgttcacaacagcgcatcgcggtactcccaattgtcggcagttgtctggacgaaataacgcggatggtgatgccccggcaggtgattgtgttggtcaaagtacttcttaactaaaaaatgaaatccattagtttttagccttttgacccctcattcaaaacccactgagctttgccagcgttttgtcgcgatggaacagtgcagtggtgaggtggcgccatattttccgactttcgttgttctgttggtccatcactggaatgcactcctgccaaaattgaattgtccattaattttgagagaaaatgtatgaatttccaccttgcgcacttcagggctatccttgacattggtgaagagttggaagtcaccgcgcgctatttttcgcaggaaaatctcgccgttccacgcgcctttgagcaccattgacgcccgccgtccgccgtcgcgtgaaatttgtcccgaaatttgatgggcccgtccgagaaaaaagggcttcgccagaaactcgatcgccgccacgaatccactctgcgcacaacgtatttcgacctttaaagaaaaggaaaattcaatacaaaaacacgaatagattcacacccactttgccagccagttcaacccaaggggtggcgtgacaatcacgggcgacggcatccgggaatgtggcggtgtatgtctcgttgtgctaaaagaaaaatggtgaaaaacatcaaaaatggccagacacattcgtgaacataccctcccaaatcgcacaaccatcgttccgacgttgtgcacgcccagtgaagtcaatcccgcgatgaatggctttgattcaatttgagcggtgcacgaaatggcagagtccgggtgctcagcataaaaggcggagaggcgcgggctgttgctgatgtgttccgaaatgaaggtcaactgaaaatgataattgtaatatgttgaatcatgagacccccgcccccccgtcaaactcgacctggttggtagctgatccaggaaaaggtcctctatccgtgagttcaccgctcggcaattggttgggcaacgtccagcgacaacgaaacgtctcaccaacgatgggagtgtacggcttttttgcgacaccttctttccgggcggggaagaacgagttgaggtaaaacttgagcacggcaaggaatctgaaaattaaaaaatttgaacatttgtttagggcggagggagaaaaaaacaccacctcttctctggcgtgttttcggtggatgcacagaccaattcgtcggggtgggctaaaaacgggaagcactgttaaagttaaaatttcaaaatggaatgccactcactgaagaaatcagcgtacatttccaacatcgaccgtcgttcaagaacagaaattggtaacactaaatttgtcaagcccgagcggagaacctgtaatttactttcacattagaagtttattttgagtcatgagtctgtccacctgtttaaacaagtcctggatcaccccgttgccactgttggaagcgctttgctgatcactgtcgtaaattgcgtcgtaatttgttctgtctgcgtcgaagtggccccaatcaggcaaagggaattgtaaattagcattagccatttggctgaaatcggggactgaaaattaattacaagaaattgcacaaaacgaaaaaaattaacaaaaatacttagggtttttagtttttcaattttagattattttggagcaaaaaattaaaaaaatgacgattacaaaaaatttagtagatgaagaaaataaaaacaaagaaatgtaaatttgatacggagcggagcaatttatatagaaaaaaacgaatgacaaatgaaacggaattttggaaaggcacacggttcacacatcggaaggatatttaaatgggcatttttgcgctttgttgttcattcgtcgcaatcactgcaccacacataaataatattttgtccttcttcctcctcccataaaatgcttcttcctctcccttccgttttgtgcccttttcaacttttgcttctcatcgtcggcgctgtgtttattattctcgctcagtgctgtggttgcggtgggaagaaggtaagcggacatttcaaaaaacaaaatgccattcattctaaccatttttttcattttcagggaaagaaagcggataaaaaaggtgaacggcagcagcagaggacttttttatttatacaatgggggaggggaagccactacaaattaatgtcatcaaaaaatggcatggtttgagtgaaccaatcctctaacattttcataattaagtgctgctctgaaaagaatttttgcagttttgtgggcccgatttttttttcttctaaattcgtacaaaagcagaaaaaaatctattgttatgggttttcggttggggtcgttgatcgcggaatttgacattcatttttgtacattccgtatcccggacctgaattcgaacgtgaactcagaattcatatttatgttcgagtctttaaattacatctcctactcaaaaagcaaaaaacaattcatttaaatgttacagcaaagaatggcgctggtcaggcgaactcgggcgaacgcagcaaattggagaagtcagccgtaggcgtcggcaacggatcaccgaaagaagcaggtaaaaggaggaggtgtagaggagaaatgtgatttgtctgcgagtttaattttccctttttcagccgtcccggccaccacgccacagccagcagcaggagaagcgagtggtgagagataatggggagacgaaaacggcaaattcataatttcttttgttcgttcagcaaatgccgcggcgaaagcggagggttcgcagcgcaaaaaggaaaagccggacattttcatcacgaaaaaattgcctgagaacaagaagcgcgaattcgtttcaggtagagcgaagcaaggaatacgaataagggcgaatttttccaacaattccgttccttttcaggcaaaaacccggactacgagacgctcaagcagttggacatgcaaatcttcctcaagaagaaactgtcgggaacgcaggcgaggccgcacgacttccaatcgcaagtgtcgtcgcaacaatcggccatgtagaagtgtgcacagagtttttggtggagtcagcagtcagtgatgatgatgataaatttgtgttgtgtcggatgcgcccccgttttaccaatgctatgaatgaacaacagttgtgacaccaccgcatttatattgttaaacatttgtgtgttatttgtgatgcatattta

SEQ ID NO: 11485 - DNA, 4910 bp, Heterodera glycines
attaaatagcaagggtacgaataaatgaagtatagtcaaaaccgtgggggttgttggacaacaaaccggaacagcttacccaattttacacgcattattattcgatgttaggtgaaaaaaaatttttgtgtgtggttgggaagattcagcctttttaggccggaagcaaaaacacgcaacggaaaaaaattttttgtagtgcctgttaaggacagaatttttaaaaaaagccgtcccgggctgattattttagaagtaaaacaacatggtcgacgaatgagcgtgaaatgcgatccatgaccgcctcgggcattcggaacgtgtccacaaacagctcgggcaaccgcagcggacatgtgtacgcaaacgcagccaaatggaggtatacggcggcaacaacggatggtaggatgtgggccagcgcgtagcagaccatgacaacttcactgacgaagttcgcaaatgcccacacactctttgacggcgaagtgtagaagcgatagcgacgcagaaactgcatggagtatggcacgctgaggttaaacttgagcacggacaacacctttataatgcgcacacaaagttatgactttttgaaattttcaagaaaaatcgtgaaaaacatttcaactttatttctttaacaaattttataataataagtttagttatttaaaaaattcgccggtgagatttggggtgtacacataaaaatccggtaattcaaaattaggtttcctattcacccgcggttccatgcgcaccaacagttgcaggatcgtcttgttagttcctgggactaccaacagagagcggtcgagaatgtgcacggataggctgagcgtttcgatggtctgcgttaagcgaacttgtacctgaattaataccgtttcaccagttttcaacatttttaaaatggacataaacaagccaatcgacaagaattgtgccaccaccgaatttcaaagaggacatcggcttctcaatgttttgctgttgaggttataagactgggaaatgactcattttaatttgctcttttatcattaatattctaaaaaccatattttttaaattctttttgtcaatgcttttcgaattcggttcatttgttttggtgggttaagtgttgatgatcagccgaaaatggcaaagaataaagaaccttattgacttgaaaaaaatagggaaatgaataaggttgttagatgagaacgacggactgccatgaaaacaaggaaaaatcgaataaacaatgagaaaatttttcaaaataaataataaaatcgtacaaaagtaatcatgtaggtaaataactgttataaaaaaatttttatgagaaaaataaataatttatttgtaaatttaaaataaaaaatataattattatttcagaaataacaataatttgataaatctttttaattacttaatttaatttataaatattattttaattatttggtcaaccatttcctttaactttaaagtttggaaaattccgttaattatttgtttattggctcccttcccttttgataatttatttagttggctcgcttaaggagtactgtaattaattttaacgaatagaaataaaaattttattatgatgttgagaaaagttcttcaaccataaataaattaatttgttttaataaaatcaaccctaaactggaggcagaaattaaattgtattaaaaataaatttattaagaaaaaaataattttttaattatttataagaaaaatgaatatttattataattttagaataataataattaatcattttaaattaatttagtttattaattttattttacagtccctcaattcgttccattcaaagcgaaattttgtcaaaaataatgttaattgatttgtttatttgacgcccttccagcaccatgcccttttgataattgaaaataaattgtgcatgatattataatatttaattgagaaagaaaaaatatatttgcgaattcaaaatggaattttttttaattaattttagaataattatttataattttatttgtgaattaaaattaaattattatgttgtttagaaataccaatttgataattcttttaattaattaattaggaaaattccgttaattgatttctttattgggtactcttttctggaaattttttaaattaattttagaataattaattatttatttaaaatttttttatttgtgaattaaaaattatatattgtttgagaaaaaacaatttaataaaacctattaataaattaggaaaaatccattaattgttttctttattgggtaccattcccccacccttcccttttgataatttatttatttggcgcgcttaaggagtactgtaattaatttgagcgaatagaaatacaaatttgatgatcttgagaaaatttatttaacaataaaccaaataaactgcttttaataaaatgaaatgctaaaaagggacagtataaaatatgtatcaaaaataacattttattaagaaaaaataaataattttagagattttcgagattttataaaatatcattattattagttttacaatttaaaatattaattaatcttttaataattaatttaataataataaaatataattttaattatacggtcccccattcttttttcattcaaaccaaaattagtcaaaaatccgttaattgatttgtttattggtcacccttcccgcattcgttccatttgataattgattgtttgttttagccctttttatgggtactggaattaatttgtactgatagaaaattttgataagaaaattcataataaataaatttatttgtttgttaataagaacttcaaaagctaaaggcttacggtggctaaattgtattaaaaataaaattttattaagaaatataaataatttttaattatttccaaatttaaattgaaattattttattattaattttagaataataattaattaattaaacgtttttaataataaatttaattaataatttttttaattatacggcccccatttcttttttccattttaaaatcgaaaattgtgaaaattcgttaattgatttgtttatttgacactgttgcagcactctttcctttcttcattgatttgtttattttttcatctttaagggctactgtaattattttggattaaaataatgatgcaaaaaattattcaaaaatcataaattacatttagataaaaaaaacattcaaaagccaaagggttagaaaaaataaatgtgcatcaaagtataaacattcattgagtaaataaataattttaattatttgcaaattaaaaattatttctttttttaaataataattaattaattagaacattttttaaaatttaataaataaatattatttaattatacggccccccatttctttttcgctttaagtcaaaaattgggaaattccgttaattgatttgtttatttgacccccttcccttctcgccacccgaactcgccatttcccttatccctcgctgcaacccttcctcgccactctcgctgccgagcaatttctcgccatttttctcgttgcaatgtactctcgccacactctcgcccccctgccactcgctgctgcctactctcgcccccctgccactcgctgctgcctgctctcgcccccctttccccgctgatgacgtcattttttccctttatgagagcaaattaatgtttatcatccattgccaatgtggccgagtggttagtgcgtcagtctggccgccccctctggggttcggatccgcttggtgcggggaatttttgatgaattttaaatgaatttaaattcaacgtctttgacctttaagacgtttaaaataatttaaaattaaataaatttaattaaaataatttgcataaagtcgcgcagtcaaaaaagtcgcgcaccccctgcaataggtttgggtttcaaaaaaaaagtcgcgcaataggttttggcttcagtactgaaaagtctggcgctcaaatggcccgcgctcacttggcggcgctcaaatggctggcgctcagttggccatgcacccctcccacgcctatggggggctaccgtaatccggacaaaatggagtctctaactactattatgagcgctaaaattatcagagtgccgaaaatcgcatgtgatctaagcctagaaaaaaatggtgtaagtaaaatcgtaattacgctcaaaaagctcctcaaacaattttagcgcttccaattccttctacaatcgcctttatacatcccattatgacgctaaaattatcagagtgccgaaaatcgcatgtgatctaagcctagaaaaaaatggtgtaagtaaaatcgtaattacgctcaaaaagctcctcaaacaattttagcgcttccaattccttctacaatcgcctttatacatcccattatgaacgctataattatcagagtgccgaaaatcgcatgtgatctaagcctagaaaaaaatggtgtaagtaaaatcgtaattacgctcaaaaagcttctcaaacaattttagcgcatccaattccttctacaatcgcctttatacatcccattatgagcgctaaaattatcagagtgccgaaaatcgcatgtgatctaagcctagaaaaaaatggtgtaagtaaaatcgtaattacgctcaaaaagcttttcaaacaattttagcgcttccaattccttctacaatcgcctttatacatcccattatgagcgctaaaattatcagagtgccgaaaatcgcatgtgatctaagcctagaaaaaaatggtgtaagtaaaatcgtaattacgctcaaaaagctcctcaaacaattttagcgcttccaattccttctacaatcgcctttatacatcccattatgagcgct

SEQ ID NO: 11486 - DNA, 1137 bp, Heterodera glycines
tttttcttgaacagcagtcatctctctatgatgagtccttctcctatttttcccatttcccaccattgccattgtgttcgttatcatcgcaaccattgccgaaagtcggccgattttgtgccgattttccgcaaaacttttgccatcgatggaagcggcagaaacaaagcacaatgaaaggacgaagaatggaatgagcactttgagaaacagcaaaagtgccattgtgaagggagaaaaaacggagacaaaataacggagaaaggacggattgaaggaattcagcgaggcgatgttaccggtgccgaaaaaagctgaaatttagcggttttttatgagtataaatggaaattaattttgaatttacccatttcaattgaagcgaccaaacaaagggctcttagaaattcggaagttgaaagaatttgttgaggaatgaattcatctaaatgacattaaaatattatagtttttcattaaattattttttgcctttttcattgccaaatttcggtgccctttctctgattgtaattgctaaaaatgtggccaagtcaatgtttggatgctctaaatgaacgtaaagcatcaaaaaaatggagaatattggcaaaaaaagcgcttcatggccaattgaaaggagcacaaaaggtaactgaaaaataaaaagagaaaatgttaaaaaagatttaaacaatttaattatttaataaatgaattaaatataggaaaaagaagataaatcattaaataataaatggatatttaattaattgggcagactttaagggaagaaatccaaaggattaatcgatcagaaagtcgcgcgggggaagcccaaattggaagaacaaatgccaaaggcaacgaaagccaagcaaagggacggattgaggtggaagaaccctaaaaatgaacaaaattaaagcaattcttaggtttaacttatcaaacaaaaaagccaaaaaaagataccgtaatttcggtgaacaaaagtaatacggtaaggaacaaatgaatacggtaaacggccaaaattgacagatggggcgaataattgaacgatttttgatgcgaaatataaaagtggagggcgaaagaaacggcaaactgtgccaaaagcacaaaaaaagcatt

SEQ ID NO: 11487 - DNA, 744 bp, Heterodera glycines
tggtatagtcgagtgcttcgtggacaggaccaagccatttcagacaaacctaaaaacaaaggaaacttttgcaatttaatcgaacaacgaaatatttgatgtccaaattgagcagacggaacagaaaaacattgacaaaaattcatttgtcagctttgaattgcacgaaaatcctgctgctagtgggaatttccgtaatttctgtttaatttattttttctgaatattcccgcttattccatttgctaattcaaggcaaagtgatcctccgatctcagcttttagcttcaggtcactcatggcccggttaaagtaaaattcccggttccatgatgcttcaatgccatttgagtacggcaacaatccaagggaaagggacactttttgctcttttctggcacctcccacttttcatttctgtccccaatttcctctgtgcctttttcaattttccctcccccatttttttccaattttcctaatttctgctgaccttcgccgccgcttcatagcgtttcagttgtgccagtctttcaatttccgatctgatttgtcgcaatgcgtcgaatcgcaatgctggtgcttcggtaaagaaaatgcgaaacgaatgcgactgtctctccgcgcgcactttgctgtactgctccaccatctgtttgaaattggcaagcgccgccaaaaacttgtacttttgcggtgtgcgcaacacttccaacggtgccgtgccaaaactgttcacgggaa

SEQ ID NO: 11488 - DNA, 3106 bp, Heterodera glycines
  unsure (1)..(3106): unsure at all n locations
acggaatggcgttccgagcagcgcggactgaagtggggccaagtccactggggccaacgacaatttgcgactcgcaccgctcggctcaatgccggcaccncaagccaaaaatggcacattcacttcgtcgtcagttccgtccccttaaactgcgtcaatggccaataatacgatgaaaaaattgggcgattgattaccatgtgagccccaatcggtcatcccatggtcagctgtgaacaaaaaagcagtgctgaagtttggaggttcaaatttgataagcttaaattaggaaaacttttaaaaaaatcggaccgattgtcgccgaaaaatccctcaaccatttgaacaatgccgcgaatgccctcgtcgaccgtggcaatgttttttaagtactgttccgagttcggcttgtgcccatgcccattggtgtcaaggccgagcaaatgaaggaaaaaaatggcacgacggaggcccaaaaggcgacttttggcattcgcatcggaacgaatttcatcaaaaaacaactagagaattaaaaaaccattataactaattcgggttcgctttttccaatttgtccaccaccttaaccctatcaaagacccatctgtccaatttggccgcgtcttcgtctgaaaaatcctccaattcgggcgaataagcgtcggatcgcacattggccacattttcggagaataagtgcacaatgtccggagaaccccaaagaaatgccattgaggattggttcagagtgctgtcgaatggcaccggattgtgcctgggggcaaaggattgcaaataaaattgaataggttttaatttatgaattaagccctttaagacccaaattaaactttctccattaatttttaacgaaatttgcatggattaaatcgccatgttataattaattttagctgttaatttttaaataaattaaatgttcccctttctatgcttaaagttcgctacttccatcctcgtgtgactgcgctaacgtcctcataaaacccagccatcatcgccacatggcccggcctggactcagttggcacatgactttccaaattgccccaggcagcctcaaaaattgatttttttttttattaattaattattttttacaacttttccatcacgaataagcccatgcaaaaaaggagaaagatgcgggtgttggtagaatgttcttgctcgaagtccatcttgagaaagtttggctttcatttttaatttgttttttttaaatttttattttcgctttaaatgtgtccaattctcaaagtttcatttgttttaaaattacctttaagtaacttttactggtaaatgtctcaaatttgtttgacctgccgagaaaaaaacgatgcgatcggcgggcgtaaaactctccgaatttttggcgattttaaaaggccgcgccccgcgcacaattggagaagaaaaataaatgtcaaagacggcgtagagcaaaagcaaatggacggagaagccgacgaaacaaagcaaaagccgaaaaatggcaaagggagcgatggaacgcataaaaaaggcaatggaaaagccaaaaaaggcaatggcacagccaatcggtgaaagatggctgggatgatgaataaatattttatcagaattttaaacaaaatttactcgatattttatttttattttatagagaattaaaaaatattggatgagaaaacaaaagaaatattttcatttgcgttgtgttttctaagcttttaaaacgaaattcaaaacaaacgaaaggaaacccaaaaataaattcaaaccaaataaacaaattcaaaattttattctattttattcattagcaatttatcatcatatttgtccaaatttccaaattcccccggggcgtctataggcaacgctggattataaaactgctaggatttcttaaaaattggctcaaaaccacaaaatttagtcttttttttgacaaaatctgttcccggcggcgccaagaaatgaaattaataatccctttaaaaaatgaattttttattataataataattaaaattggaacattttaagaacacgagcccggcttttctggacccggcagtacccggacccggtttttgctcaaatgcccagacccatgtaaccctattgaaatctctacgattaaactttttctcatttctattcaaacaaccaccattttttgttataaaacaaaagcttcttttttaattcaaaatttagaaaatcatattaaaataaacattcttggcattcttcttctctatctatgatatttctaaaaaagttatgacgaaaaattgcaaaaaaaaaaaaaaaattccctttaaaaaattcattttgattttaatgtttaattctttttcaaaaaatctttactgaataaaataaaatcatttaatgaatgtcgaatgtttgcctgatcacagttttgtctcttcttttcatatgcaaatgcgtgggtgattggtctagtggtatgattctcgcttcgggtgcgagaggtcctgggttcaattcccagatcaccccagtttatttttacactcagaagagaatttgttgaaaaagtttaaaattttatgatatccatctttaattggtattttcatttaattttttgctgtttatttaatcgaaaggaaaggattttatttcatttaattaacaaattgttggatttctttaaaatgattaaacaattaaaaagcacagaacagagaatgcatttcgaaaatcactcattatttagacactgaacttcgccctccgttatttttgccaaccattcgcagtagatataaacgcaggagaagaagcctaaaataggaaaaggcaattcaaaaataacacagtgagtaattaatgaatgctaatgggtaattaaaaattgattaaatcagttaattgattgttaattggctgccctcaccgttcgattcgcatacgaaattgcctcggctggtcactccgatctgttcccagcgctgaccgtcgtaacttttgaccaacaacggaccaccactgtcgccctgtgattcagaagggtaataacaggtaagcagcttttcactgttaaatgtatcttacaaag

SEQ ID NO: 11489 - DNA, 2905 bp, Heterodera glycines
tattttacgtgtcaaagggtgtgcatttaagccctccctgtgcttgcccactgcatttcaaatagctggtaattcttatttctccggcctaatccagaaaaaatcactatctctttttttggaatattttacgtgtcaaagggtgtgcatttaagcgactcgctgtgcttgcccactgcatttcaaatagctggtaatttttatttctccggcctaatccagaaaaaatcactatctctttttttggaatattttacgtgtcaaagggtgtgcatttaagcgactcgctgtgcttgcccactgcatttcaaatagctggtaatttttatttctccggcctaatccagaaaaaatcactatctctttttttttggaatattttacgtgtcaaagggtgtgcatttaagcgactctctgtgcttgcccactgcatttcaaatagctggtaatatttatttctccggcctaatccagaaaaaatcactatctctttttttggaaaattttatgcagcataggatgtgcctttgagctattcgctgtgcttgaatacatcatttcaaaaggctagtaatttttatttctctgacctaatccagaaaaaataactatctctttttttggaatatttggactcaacccaccagcatttgaatctctgagactcaattctcaggctttacaatcgctgggactcaaatctgcggcattccaaacatgggactcaaatctgcggcattccaaagacaatcagacagtgcactattttcccacctatcctcctcaacttttttcaaatcattttttaacgcaaatcattaacaaaacgccacacaaattcaaacaatgacaccgccggaccctaaaaatccttaattttctttaaaaatttgctcaaaatcgcaaatttttttttatttccaaacagaaatttcaaaatcttaaaaaattttccacaaatatctaagaaagaaatttttttctttttatggagaattacttactaggttttcctgtactaatgcactttaccaaaaaattattcaaaaaattctttaaaatttttttatttttttgaaattttattattgaagaggtcatttattgacgcctgaagtgaaatagaggcgaaatcttacatggacggtaaaaaacgaaaaaaattgccaaaaaataattggcgtaaaacaaaacgccaacacactcaaattgaaaaacaaattatattttcaaaaagctataattggataatttgttattaatgattaaataattcataaactaacagatagaatcaaaaaataacagatgaatcgatgcagaatttttttctctatcgctatgcaaaatttggtgcggatttaacatagagaaaaaaagctagacatagaaaagtaaatgtagttttttacattattaagaatgaagagatagtacataaaattgagataagtaaagataaaaattaattgtgacagaacgccaatttttttctgtaattatccataaaaagatttattgtcgcttttttttcttttttaccgtccatgcttacatctggcacgatttatggtcaattttgtgtgaaatacatgtgaaaatttaaatttttaccaaaccggaaaccgttccgggcccggcaatttgaaaatccggtttgaccggttttccggtttgaccggtttttgagaggccgggcccggaaaccggttgcttctgaaaatatcagaccggtccggtccggcatttttgagaattccggtctctaataggtacatacacacactcaactttattatatatgatggtgacccgtttaaaatgcatgttccgagtggaaaacgacgggaaggccatgagacgttcagcaaatggtgcgaacaaattaatccatccatctttccctccctcttttatacccccccccccccttattttctccgtaggttttgttgcattcggatgcgagcgcaaagggatgggtgatgatgaaaatggtggcaaagtgctttatctgctgctgaccactcggctgaacaaaggacatccacgcaaaattaaggtggcatccgtttgatccgaccttcgagttttcttgtatggctcagtggtttttggaagatagtaaagggtaaggggatggtggttcgagtccgccccacgacattaatattatttttgtgaaatttagttttaaagatttttgccaaccatgggtaacaatcttgttattacttgaaagcgcttgggaaggagtctaagcaaattttaagcaattcgatttttatctgtttttttagttgagccatttctaccgactgtttgacaaaatgaagcgcaatgggatggcaaccattcaatttgctgacccgaacttgacagtttacgtgtcgcaggtgtgcctaacaaaaaacaaaccaaacaatgagagtaacacaagttaaaatcacctgctcttatgcatttcaaccctataaaaaaatttttggctctaaggtcgtgaaagcgtgtttataggtgttttatgggtcgaaatttttgactttttgttcgaatttgggaccgtgattcgaagttggccaaaatgagtgtcagattcgtgatcagcgatcccgaaaacctatatagtcgtatgttttttgtttgaaagtgaaaaaaatgtaaaaaaaaatatgtggcttaaacagcataagagccaccactctttttatggcattttcttacttttaggcagaccctaaagcactttgccagtttttgctgcatttgaacggcttgttacgacatgccgttgatgccaacattagatgttccgccccgccatgttcatctcccaccaatgtgccgtcgtcgccgccgccaatcgcaacagtttcgactgtccatcgccaatgcacttcagcaa

SEQ ID NO: 11490 - DNA, 3712 bp, Heterodera glycines
tgcgagattaaagcaaagattgacttttaacaattaaacttttattttttgttttttacgcatacacattcaaaagtcttttttactactccattacttttatgcttttgttgtaaataactatgtacatatgtattcgaagattgtgcatttcattttgctatggaagtgattgaccctcgaaacactttattgtcaaatcaagaagtattggaacttctgaatcaagcaaagggacgtcatattccaacaaagggtcagcaaatgaatccagcccaattaaatctcattcattacctttttcgaaaatataattcccttccattttagattctcagaatcataacacaattgtgtatgaggcactaaagtatttgaatgaaacccccgcgactgcgcaacgccgacaggacataatttcgttgattaatgcgctgaaaaagttcaaattgaccggagcagaggtcgtcttgcaaataaatagcaacatttggcacctatcaggaatcctgcattatttaaatcatttagtaaaaattcctaaatcgaaaaatttgactttatgttcgagtccggggaccggaattgatcaacaaaagactgggttcataatcagcgacccaaaaaaacctagaacttttttaatgatataaaattttttgaaaattttattaaagtccgggtccaagattttcagccgggtatcgggtccagccgggtcctgaaaaaatccaaaaaaaatcaattcttttcaattttttttcatgaaaataaaagcttatacttttaaaaaagcatgaaaaatattaagttttacaaataaacgctttattaattgtctaatttttttattgctatttaaaccatttttttgcggtgcgcttttccaaaaaacttttcgggagcaggggctgtccggtggtgccgataggcgccgccgggaaaaattttgaaagtgcttcgagttgttagcagatttattggaaaaatgaccaaattttgtgattttggccaatatgtttacagaatttcttccaaaaatgttcaaattttcaagaaatatatagggttaaattttcaaaatttcttatggggaaattataaaaaaaactaagaaattttttgtaaaatactatgaaagcaacttttaagctttatttacttaatgataaaatggcagttttcaacaaaaattaaaaaaaaaatgcgagaaaaaacatgtgatatgagaaggaatgaacttgagcaaataacgaaacgaatccaacagaataaccattaggccacaggatcgcactccttaacaataaatattaaattttttccttcaactttggtcaacattttgaccctacccacattcttaccagtgtatttttggacccggacctaccggatcgggtactggattttcaaaaaatggggtctgggtcttagaaaagccgggtatccggatctggacccggtcgggtgcccggacccgtctaaccctaagatataccactcattttttcacatttatttcacttcacagataattcaaattgtaaatctacgaccaaaacaagcagtagaagtgcaactgatcgttgaagaatcggaggaaaggcttacggaggagcaagtcgatgaattagttgagacaatcatcaacagtttacctcggaattattaatggacttttaatattttaattcgaataaatcattaaatgtaaaatatgtagaaatcaactgattatttaccaaatgttttgtcttttatcgtttttcatttttgttgttatttatcttcgattatttcagacaaatgaacaaaagaactctttggcatatgcttctcaaaaacaaaatttgcaatgattgtgtgcgacgtattattttggatggcgcgagagttcaatcgacctccagtgtttcaaaaaggtgccaggggtctatgttagcagaaatgtgccaattttatgacttctaccccttaaaatgcatatttttcctgcgggcattttttaaaaaacaaatttgaaaatgcttttttatgcattgaacttattcctgtgtgtgccgaatgtcgcctattatttttagcttaattgtgcataaaccaacacgggaagaaattgcgcaaagagtgaccaaactgctgagagagttccacttggccaaggaatggcaaacaatcgaaggcattggcagggaactgagggaacagttgctgaattacccggccagtcgaatggtggtcattgaggtgttactcaataagaaacacccaaaattgccttagtttgaagcaaatttaggaccgaatcgtaatcaaaaatattaaaagatggtcaaaacgatgttcgaacgagcaaaccaaggcattgttgcaacagtgcttggcattgtgtggaacggtgccggaaacgaagaacccggatggcattgtcgcgttttgcgaaatgattaagccttcttcccccccccccccctacactttacaacgcctcctcgcccggtcaatgatgcctttgcttatccaccctctcccccttcccccacataaagcctttaaaagggattgttccctgctcctttttgcttattccctttctgttccctattcgtgcaatttccgctttttccattgcgtcccatcgcttttcaccgttgcatttcttcgccaatttaaagagtgatcgagaaatagtgatttgttgaatttttgtgtgaacaatttttgagtcctattcaagagtctggaagggttaaaatcgcattgggcaaatccccgccaatcgcgacaatataatagaaaaatttcctaaaatagaaataagaaaggaaatacacatgcaccgccactgctaaaagatcccagatcctggttttcgaatcccggttcccaggatctccatttgatcgtttcccttctccccgtttctcggtttgaccatgatcactgatcacccccaaggatttatcaacatttactcttaacgaagcattttagacggtttcattaccacgagacgatacaattgcaatgaacaagtgaacattgataggggagattaaatgtttttttagctggacacatcattgaacgaatggtgtttgaggagcagggcgtttcaaactaatcatcttgggatttgcaacaagcaaatgaggttgtggttcaacgttgtctgctcaccctaattgttgttctcaagtgttctttcccaaattttcagtgcctgaaaaaaagcaggagtaaatttttaaattttttgaaatacgacacgaaaattgtgcagaatttttcaaaaattttcccattttttcttggaatatttcagttcgggggaggctcccgccccttggctacggcctgttgtccctcaacgcttaactaatgctaacccttggacattttagataaaacaaaaaatgaaaaacgaaatttttatgatggtaggccgagcgtgaatgctgagcgccgctacatctgaacgtcgcctccaacttcttggtgagtttttgcaggaaaaccctgagttttgcctcctcgggttcgttggggttgttttttgaatgattgtctttacaaatttacattaataagtattaaatagaggtcgaattcggggaaatttgcggtccgaaactgccaaaaaatatctcataaataaaatttttcacaattttgtgtgcatagacgcaaatttatagggcaaaaatgt

SEQ ID NO: 11491 - DNA, 1385 bp, Heterodera glycines
tatcatgcttttttatcttaaaaaatttttgcaaatcaaaagggtccccccttttgtttcaaaatatgtcacttttcatatagcgccagtgtttttatgtaataaagaaaaattcaactcgtactggtactttttccaacttgtacttcgatttgagataaatttctgtttttgcacaatacgaattgggaaaactatttcgaattgggtagcaatcagtacgagttgggtttagtccgctaaaaaagcacccaaaaaataggctcaaaaactctgttagaatttcccatgctatgagagaccatattttacacttaaacaaaattaaaatggcaaagaaagaagcaataacaacaagtcgcatatattatacatatgtacattatcataacattacatagtgggacaaatacaattatcagagcaatacaaataatgatgattattagggacgtgaattttaggttttaactattttttttgctcaattgatttgaagaaaggagctcaaaaacgcatttccgcataaaaatttttcgattctgatgtcattatcggtcactagaaatcactattttggcgacttcgtcactaaaatagttaaaaatcactattttggcgttttgtcactattttttcactattttgacatttttgggcaaaattccttaacaaaaattcaataaaaccaaaaaatacacccctaagaatcgagctaaaatttttcaaaaaaatacacccctaagaatcgagctaaaatttttcaaaatatactcctatgaaatcaaaaaaaaattttctcaaaaagttactttcttggcaaaaatttttaatttaaaaaatttttttaggtaactattttgggttttttggtcttaaaaatcccagtccaactcatttgcaactgcaaatagtgaataaaaattagttttgctcaatttttggctgaaaattatgtcactattcgtcactatttcggcatttttactcactattttagttaactatttcgggatttttcttcactaaaattcacgtccctaatgattatcaatcctttttatcatttattgtccatcagttttcacttcgcatttaaaaatccaatccgtgtccaagacaaatgtgccgccggcagccaccaaatgccaaaatgctcacggcacacgtccaatagaccctccacctccaacacggttgtgggaagacatttgacgaaggaatcgcttctcccgcgcaatatttgacatcacacaggaacaaatgatgcaaatcggaacacagcagatgacacaaacacaaaccaaaatgatggcaatagtgacacccacagtaagcttcctgaaattgatgaatggagaaaattactgtatatgagtgtattt

SEQ ID NO: 11492 - DNA, 3821 bp, Heterodera glycines
  unsure (1)..(3821): unsure at all n locations
ggcgtactatctaatatttttattattnaggaaaaacaacatttacttcgctatgtttagcttcttttctatatgttagatccacaggaaattttgctgcatcgattaatgctgaatttatttttgttaatgctctatttcaaaagttataagaaaaacaaaattttaaagcctcataacttttctctggtacaccaaatcgcttagcattgcttagaaaaagcttctcattatcaagagctttcgaaagataccaagattatccaatttggttggcaaaaaccttcaaaaataattcccaaatatggtgattttttaatattttggacaaaaataaatgaaaatattcatgttacacaacggactcgaaccaccaccctttgtccctttactatcttacaaaaaccactgagccacacatgcaaatcttttctggtacaggagctcatttcccgggcccgtgccaaaagaatgaggtaggggttaacctaccctcagctgcgggtaccccccccccccccgacactaattcgggggattggggactcagagcgttttaaaaatttaaaagttaattcatccacgaaggggggaaatattgaaaatttttgagattttgaacaaatttaaataaaattcattaaaaattacgaaaaactttcacggtggcgcctatgggcatcgcagaccccccaaaaccatcgtgtcgatcggtaatttttcaaaatatgaacaccaagaccgaaaaataagattttagggtcaaaaataataatatttagtaacattttttcaaatcagtaaaattttacaatttatttgatcaaaatgctatcaaattttatatttttagtctcccattataaactaaggacaaaacgaggttaaaacgaagattttggccccaaaaataagattaaaaacggctttttacattgtaaaaacagggctgctaactgaaaattttcaaaaccagcatttagccaacaagaatcatcatttggggtcaaaatcagcacttaaatgaaaaaaaacatgcttttttgtgacgcgctttttcctaaaaaattttttggacacaggggccggcggggagaattttttgaaaatttgagttcattttgctcacagattttcaccaaaaatgaccaatttttgcgcgattttgagaaaatttttaagaacaattttgcggactggaggtgccgataggtgccgccgggaaaaaaaaaatgaaaattgggagtttttggtagcattttttacataaaaaaattttaaaactataaatatatttaagaaatctgaacaattttcgtcgctaccccaaaatcagaacattcttataaataacgcactcttgttggcgctaacgaaatcagatgattaaagtgaaaaaaggaagatttacgagcatttaaaaataaaaatagagtttttcgttaaaaaatttcgttgatcactacccgatcggggtccccgaccccccgacaattgactcccccccccccccgcccgaccccgacatgtcgccccccgaggggtcggagaggaaccctaaatgaaatgtaaagaaacaaaacagcgcaaaacgaacagagaagagtcgtcgtaatcaccacgaattggctcaattggactgaaaatgaggggaaaacattaagtggaatttatcatcagcaaatttgagaattagggggatcgtattcaaacaccgacaaatgttcggaaacatgcacaaaaatgggaaaaagtagggtattgggaatatgttacccacaaaaattggaattccgagtttaattttcgttttttttaataggagggcctttaaatttattttttttaggatattcaaaaaattgctgtttatcaaaatcacagcacctgctgctgttgttgttgttttgttgctgatgacaaaagccatccttgagaagcaaagcgacaatgagaagaagaaaaagcaacagagaattattcttgttggaagccatggcaaaaaaaaagaggacgaaaattggaattatgtcgaatttgaaaaaaaatgattaaaaaaatgaatgcgaaaagttgagaaaacaaatcaattaaataggtaatgaatggtcgggtcggggtcactttggcgcgggccattttggcgccgcgaactttaaagtgttataacttttttcttatccaaccaaataaaataattttgataccattaaataggcctaagtgttctttattagcctgcaaaatattagaaaaaataaattttgttacaaaagataatagcgtgcggcgccaaaaaatgccccagaaaaaggtcattttttgaggttttttggccataacttttttgtgtttcaattaaattttttgaaattttgcaggctattagggactatcaagcgctttaaaatgatatcaagcttatttaatttgaatgagaaataaaaatgttatagcgtttggcgccaaagtggccggttccctgaatggtcagtagcagggttgttccgggtcgagaaaaatatcgggtcgggtttcgggtcgggtcggccgaaaaatcatcgggtcgggtttcgggtcgagaaaaaggccgggtttcgggtcaattgacaaatttttatttgtttaaaaatcaaatggcactgcaatatttgcagcgaattgcgccatttataggacgatggaaataaaaccaaatggaatcaggtttttcagccatctgctttgcttaaattcaagaaattcatacaaaatatctttagaaaaaggataataattagagttgagcggtaatcggtaattgtaaaaaaaccggtaccggtactgaccggtaatgcaaaaaccggtaccaactttttccaccggtaccggtaccggtaccaactttttccaccggtaccggtaccaactttttcaaccggtaccggtaccggtaccaactttttccaccggtaccggtaccggtaccgctaaaaaccggtaattttccaacgtaaaaatttttggacaaaatttttcaaatacaaaatttttattcagttttcgcgcgagtgcctgttttttagcattagaattgttcagaagtatatgtatattgaggatgaccaagttttttttcaaattcaggataaagaacactaaaattcagatgtagacctcaaaattcagattattgcaaaacaagggatcagcggccaattttccaattttgcgaaggggtctccggccatgtaaattaatgtaaatcaatgaccttttttgctttcaacaccgcttttttcgcggcacgtttttctcaagacttttggggaacaaggagggccggcggtgccgataggcgtcgccgggaaaaattttgtattttttaatgcgatttgttaacagaatttgtaaaaaaagaccaattgattaatttttgggtttttaggatgcttaaaatgaaagaaaaaaagttggaatatttttttaaattaaaatttcaattaaaataatggtaaagaaaatatgaagaatattctatcccagtggggaattgaacccaagcgagaaataataaaatcagaaggtttagccacttgaccacttatgcatacgaacaaatgctttaaatgaaaataaataatttaattttttttctcaaaaaatttctccttcttcaccattccctactcttttctcacccagaccccctttcttaccagtgcttatttcgacccgaaacccgacccaaaatcatcgggtcgggtttcgggtcgagaaaaaggccgggtttcgggtatcgggtttcgggtaacccggaacaaccctggtcagtagtagaa

SEQ ID NO: 11493 - DNA, 4146 bp, Heterodera glycines
ggtctatagtagtgagaacattaagaatttcttcgtcctcttcgggttcgaagacagttcgccttaccacggtgcaattcccttgtagtgatgtcctgttatcattggtgtctgaccattcaagtgtatccactttatcaaccaattgatctaacctagtcgtaattgtgtccatgtttgcattcatatcagctgttgtttggttaatggcatcagtattttgagtcgccctcctattaattacccttaaactgcggttggtggcatcctcaagacgtattacaccttggtgaaccttatcaataagtgagattggggcattagaatttggaggagcgcttatattttggaataaatttctttcaacaattgcaatagttacttggtcttccattctatccagaggatagttcacaaatgacataatttcagtgtattagacttctactatttggcttagattaattagatgaatgagttaaatgagcactcaaaaaaaaaaaaaaaaccaaaaacttttcttatagtcttacgactaatcagtgggaatgagatagatttgcgcagtggtgagtaatacgggaaaggaagcgtgcaatttaggctgcgcggatacttatgtatgaaagttttttggctgtgtgcagtagaagtagtagctgggaaattgttttgcgattagaaagagcttggaaatgaaaatgatttgtggctggagagacggaatgctttatgcgggttgtaataaatttttttacgccccattttcccatcgcgataatatcggccgcggcttagaaatcatcaacattaagtgactgtaatgagcaaagttcatatggaaatgctgctataataatacagtaactttggatacttaattcggaattgaaaatgagtatgtgaataaacgatatttgaagtgaattgaaaaaaaattagagatcgaatttcagcgaaaaatcgaagggggagaaaaaaaaaaattatgaatttgacttactgcaagggcaatgccattggcatgtgggacacactccgaatgcggggcatgcgttcatgttcgattcggccatttcggcgatgttcagtgcctaaataataattatttcaaattggtcaaacataaaaccgtcgccaaatgcacacgaaaaaaatgtgtataattaacgaaaacttgagaagaatggttttttcttaaccacttgttaatttgtaacatgcatggtacatagcgttagacactttaattgttgaccctatttctgagaatttttgtgtgaataagtcgaagaatcagtaatatcagcccaaaaattaaaataaaccttatgtaccagcattgtttaccacataataaccattcactgaacaagtgatgtacataccaaatgtgccggatgcgttgagtgtctgtgctgagttcaaaactgaaatttactgaaaatttacagaaacgcaagcaaccaaaaccgcgaaaaacaccgtaaaatacgtgagaaaaaaaaacaactcaaattctgtcaaatacgatttcttgttcgaaatgagtgaccattaattaaacatgtaaggaaaactcatgttccaactgccttttttgtattagagataaatgagtaattaggacgatgaatatgatgtaaaaatggcaatttgtatggcatgttaaggcatttggcatttttcaattatttattttttatgcctttttcgacttttttttttttttttttttgatttttttttcgatttctcacttattgagggcaacgaaccacattaggtcatcccgttggctgatttggggaaatatcgcatatttgttatgggttaggtggcaagggggcctccgggatttccattgcgattcacgctacccccaaaaagtttcgatttcgaatgtttttttttttttacttcttttttttcgttttcatttttttttttaatgccataataacaattatatatatatatatagtgtatagaaaatagataaagataaaaaatgaattgataaaaagccacttggaacatttttaatttattaaatttgggttattttggtccccacaaaaaacataaatattttcggttgtctttttttttttttttttttttttttttaacaaacattcgcgtcaaaagaagattgtttttttttatttttttttttttaaatttacttaactaattattttaatgactaattagatttatgaataattaattgattgtctacctcaaatccaatgccaaatgctgattgcttagattccaattaattaaagacggtaattggcactttaaaataaaagagaaaaaaaaaattagctaaataaatatttttcaaaaattttctattcctctgacgagggcacttggattaaaactaaaataacattttgttttgttcatcctctgacgaggggaatgactatcgctgcacattgtaagtgaagcgacgccaaatcgtcgtccatcttttgggtttttgtgcttcattttgcttttggcgaatgaataggggcacaccagagaacaaatttgttattttgcttagggcaaagatcaattaggcccctctccgcacggcgcatatttacgatttgaatgtttatgttaatggtgaaaccaatcccattttgtttttctctctcttaccgtaggtaagttcattgacgctctacagtaatccatttttaaactgatcagcactgggatattaggcttttcactttagctcttttggcgtttcacttttgagactttggcctattaactttcatttctgggacatttttcttgccaaattttgagtgatcacttttgtccattcatttctatagcgctttatttttatagacgtctcttctcactctcttttgtaaaagtattcttttttttatatttatagacatctcttctcttttttagaggtactcgttatttctttctttttttttatttatagacggccgtcttttctgattccctaacgggaatttctcaaaattaaaaaaaaaataaaaaattttaccacggttggtttcttacccatcctcgccatcggcgtcatttccgaaccaatgaggttcggaaccatccggtgctaccagtgaaacgggcgggccctcccaggatcattggcgaccaaatattatccagaattactttattctcccatctcaaacttgggtaattaaaccacacgtattggtgaataaaacgaaatgtgaaaatgaagtgaatgatggatataacgcggatggcgaaggatggaaatgaaatggataagaaaatgactgattgaacggagataaagagatgggaaagtgaaggaaaatgcgggaaggaatttgtcccggaaaaggccaaaaatccaattaagaaatcccttttacaatccctttttcaggattctcggatcagaacaagattttagtaaaacaaaggctcgggattcccgggaaaattcaattatcccggcttatgacccccggtcaaaaaaaatatttgtatgattattttaatcattcaatcatttgcaaattttgctcgaattttaaaaaagtattacaattttttttacgagaaaatttaatttttcaatttatattatattttatttgcacaaatttttaggaatttattaattgcaatgatcttttatataatatgtttggttttaattaaaatattcattttcattttgccataatttttaagaatattttattacaataaccaaataatttgggtagaggtataaaataagttgaaaacataaaaaatgtgcatataaatagggttttcttttagttttgaattgcaagtcttaaataattaattcagtgaaaaaaattcactttcaaatattttccagccttaccgaattattttttttgaaattttctgaattttccatgtttcaagttcattaaggaaggtgatctaatcaaattggtgaaatcgattttttatgattagtgtcaaaacgttacgttaaattaaattttttcacatttttctctgagcttaagcctgattagttttgttcaattaaaaatccacacaaagcatcaacaaataaatgacccttaattaaaaggcacctaatcaatcgtcaataacccttaattt

SEQ ID NO: 11494 - DNA, 2201 bp, Heterodera glycines
cttttccgctaaattattaattttcataatttcagttagtgtgcagcaatgtttggatggatattttccccttttttgaccgtcttcaactctgcctcaaattggcactgctctcgccccattttgatgtactggtggacaaacattttgatggcaaaggcggagtgcagcgcaagtttcaatttttctcaaattaaccggtcaaatgttttaaggcctaaaatattgaattcggaaattcaaaattgaaaaatggaacatttttcattgaaattgaagaaaatatttattttaagaaattgtaatttcaaactaaaaattatgacttttttaaaaatagaaaaatcattaacattgatgcgtgatataatttccatcccgcaattttttgtataatttaaaaaattctctcaggaaattactgtttggccggttaaaatctttaaaattcatcgattcgaacatgattagattcaataagaaaaaattttcagatgccatatatacaaaattatggcaaagtgtacaataagcaaatagttttactaacccaaatctgaggttggttaagaaataagtttgtacactttggcacgcataagctcctaaatagaaattaagaaatctttacgcttgacttaaacataaatatgtacttaaaattattttttttatattaccaaagtcaattgtaaagatttctgtccttatgcccactttaagactcacatttttatttgtttcaaatctcatcggtctgctttgcgaccatgatgagatttgtgcacgtgccggtctgctatgcgaccatggcaacatatcggtcagcttagcgaccatgatatgtcgtgcacacgccggtctgcttcgcgaccacggcgaggctggtctgctttgcgaccatagccattagtgtcggtctgctttgcgaccatgacacagtgccggtctgcttagcgaccatggcatccatatcggtctgctttgcgaccaagatattggattcacgaccagactttttggttcagttatttttccccatcgttaccggccaacatcctgggcgaagctggtcccgcactttgccaagaccagtggactggtgagaggtgacgttaggataaacaacggacccattttccaactaactggaacctgctcctccgggagatgtatgttcaggccaataaatggaacctgctccttcgggagatgtgtgttcaggcaaacaaattggaacctgctccttcgggaggtgtgtgttcaggcaaacaaattggaacctgctccttcgggaggtgtgtgttcaggccaaaaattggaacctgctcctccgggagatgtggtttttgacatgtttctatctgcactcaatgccttttgtgcaattagggatacgtgagcgtcctgcctgatagatttctgcagcgacttcattgtggcgcaggacgacgatgatcattattttacacattcgtacattttttgtttataaatgtttatattgtgtgcaataattggtcaatattcctcaaatacctttgccacactcgtattatcccattgattttgtttttcagatgccttctaagcaagaaatgctgaagatgagaaagaaagaagagcacctgaggcggacggagaaatctgttagtccaggtcgctcacctatcccaaattgccctcctaagggcaatccaaactgtctgattttggagaaaccattgagtgcagatgagaatggggtggcatcacacccgggcactaccacgcccaatattggtgctttacaattaagcaccccggcctcttcgattggaaataaaaggcggcaatttacatcggcctctcaaaatattgagacatcgccgcgcagcaaaagggggaaggtcgacgatgctgaccgaccaaactctgctattgaggctattcgttgtacgcctgtttccacccgtagagggcggccagctaagaaaagaggtggcccaggcaggggcagaacaaatgattcgttgagcgaagaatcgtcaatggatcaaagctctgaagctggcataaatgtagcggttttgcccaatgtgcctgaaaaaataaacttcagcacagtgtcaattaattttgctacatcgcgaaattttgcctgtaaaatttggaaatgggcagcaattgggctttacgaacgtgatggcgaaacaccgatt

SEQ ID NO: 11495 - DNA, 2385 bp, Heterodera glycines
  unsure (1)..(2385): unsure at all n locations
tgaaattgtnngatgatcaagancatgaatgctggtggggcgtctgttcacagaaattggcgagactgatcagaaatctcaaaaagtcatcatcctcaactaaaaactttgcgcctgcccgatgatgaagagatgacagaaaatatagggcgcaatgagtgcagtcaaatgtctccatcattttggtgaaattttaaattatttatgttaattatgcatttttcaatcataaaaggatcactttaattttttaattaaaaattgcttttcaaattcattaattttttgacaattgtatcttctttggcctaattatgcacttttctacctaaaaatgccttcttcgtttgtttaattattttaaaatttcatcttccattcataaattatgcatcaatttttattgaaaaacgagttaaatacaatttatggtgtattgatgagaaagacagatacatcagaaaacaaaaacattacaaagtgtggccaaaattcttcacattgaaatcgctgcctataattcccttcccaacatatggtcggtaacatttctgtaggggcatggatacgaccctccctccctcccgaatgttcggtcggaggaagttaggataagtgacaatgattggctcataatcacccgttgttgcgtaccgcaccacttcttctttgaacgtctcgtaacgcatgccttggttgttgatcacgtcgtagttcagcgtcaatccacgcaccttgagcacgtattccttttcggcatccgccccagctccctttcgtcgcaaacacagaccatactaaaatgtgaaataatcaatacaaattaatgtataaacattaaacttacttgttttgcacccccactgcaaaactccacaatgtcgtggtccgggtactcgtcagtgaactggcccaggtgtggaccagttttgagcggacatcgctcctccgggtggacgaggatgagactgtctgtatctaaaaaatatttgcaatttattttgtgtaattttgttagggcatatgtaccggtgtagagtagctcggaccccggcgacctaaccacattctgcatggctttgagcagaacaagtcgcgcagcggaagtggtccacagagagatgactaaagttataaaattagcacaattttataagtttattctcaccgatgtttgagcaagcgtgctcatcgacccattcctttttgtggaggtaggtgatgaggatgtgcatctcgtccagctgatcaatcgatgtgacttcgatcgatttgttgtccaagtattcggctagcgttaccgggtcgtccgttataagtgtctgggacagaccgaaatttcgaagcgaaaaacgtccccctgaaaattacattttttgtcaaaattcatatgtcaaaactcacataaattgttcaggcagagctttgccagggaccgtttccccttgttgaccaccatttttgccgggtcaatgttgatgccaaactgctcagcacactcttggacaaattgttcttccttctcagcgtcccctcttatgctgctgtcaaaaccgcttgcctggatcttctgggccatgaactcagcaatgtaggggcggaatagtttgtcgtcgctctgttcgtactccagcacgcggaacaccctcgtgacgcggtaaccctcgtcgagcgctgcgttgagctcaatcgatgtacaggtgctgacccacccgcgttgttgatcagtgtgctgacagtggtagtcgttgtccacgcctccagttggatattctttggcacaggcgatgcacagcggaaagcacagtcggtcgtccactttgaccggtaacactgcaacatcgatttggcggggtggcacaaccaagactttgagcagcgccagcgggaaaggattgtccgctgcgcttgtccactgcacttgttggttcagcacgtgcactttcgggtgtccaacaggatagcgagtggtgaagcttaagatttaaaatttatttgtcaaatggagaaaaagaactgactttatgtaagggtataacgacgtgaagtcgtaataggagatcttctctccgggccccgccttgcgcagcaatttcagtggcccggtccgtcctcccgtaaatgcctccctgatcaccagtggcccgtcatccacgtagttcgcgaaggatttcctcatggctttgctccgctctagcatggacgtgattttgcactcccagtacacgtccacacgattcactcgggcccggatgtattccatccgctttgcgtcgcgctcccgtacctgccccgctgtctttccgtggggcaacaacatgttatcgattggataacatttctaaaaggcgtgccaagaacagccttaaaatattaattttttat

SEQ ID NO: 11496 - DNA, 2632 bp, Heterodera glycines
gagtacccgtcgcagcatttcggggttaaaaccaatccggaacagctctcggaagacaagcaccatatcgaagcgaccgccaaaatgcgagtaggcataggtgtcgaatttattgggcagttcgaacacgagccaattcacaaatggctccagtgggttctcagctatcacttgcttgtccacgtatgtgcccaagaatcggcgttgacagaacacaacggtccgatgtggtccacagatttgacatcctgcagtttccctcttccatttgccgttttcaatgcagtcggggcatgcaacccgggcagcaatgaagtttggctgatgttccctcttatcaggttgttgggggtccatcgcctggtgttgcatagtctccaagtcaaaggccacaatccggtaggggtcgttttctttcggttcaatttgctggatgaagcagcccctctcgggattgtggtaggtgttgcataattggcaatacgtctcgtagcatttgtgaccctaatacaatcgcactttttaatatatttttcccattattacttttcttccatttcgattgttgtcgcgaacattccaaataactccacactctttgcactgcttcgattcgacacaaaagtttgatgtcaaatggtgttgatgacagtcgttgttgcgaaatgccttgttgcaccccgcacattcacggaaaaacccatccaacggagagcaggggaagcgaggtccaacacgagaacaaagcatgcagcgtgctttgcaagaatttagatgtgttgatggtcgttgatatggcttctcacattcaaggcagtagtgttgaccaaacaagccatattccttctgcacaccatcaaaatggccgttgtttaggtagagtgagattggtgtgtcgtaatagttgttgatgtatttgtacagcggcttgtactgacccgtggagccaaaaataaacacagcaaaacgatgtcgttgctggctgttgttccaatggtccaccacccggggcacaacaatttcagcatcatacgcattgagtccaggccgtgcgccaatttgttgcatcagttgcaaagcatccctttgaagacaaccctgttggccgtgttggctgtgaaggtagcgatggaacttccaacttgcccagccacggcttttggccaccattgttgcttgtaaggcataaaataaacagtagctgcgctcatcaggattgtttatcttaaaacaacccatcaaaactgttgctttatcatggaccgaaccttaatcaaactccgatcattaatacgatggtgaacaggtgctagagctcgtcgtgcgcctcccttcaacgttcttttggtcggcagtccaggtcgattaactgtcgtcacaactacggtaaaaggttcaccccacagtgtgacgttctgttgcttcttgctctgtgccactttgacgaattgatttaagatggtgttgaccgtgttgtccgtgatttgccggatagggatggggatgtccccgccagtcaacagtggactactgatgaggcagccgaggtgtgtcggatgaattccccgctcacggctgtctgccacagccgcatcaatgctgtactggaaaatgccagcaataagtccttcaggatttgctgctgctggtacgtcctcaatgctgaaccgcgacttggctttgctgtactgaaagcgcggcacgtgctcgatagtgctgtccagctttctaacgtagtcttttgcagtttttgatgtagatgaggaggtcccagcaccttcttggaccatttctcccaataattcgttgatgagaaagcggcgccgcggctttttattaggcattgatagaagataatcaatagaaaaattagagggccgtttgggaggttgattttgcattattcaaaatctaattaaaggaaagaaatgagtgtgaatgataaatgaatggtcaatcgagccaatttatagcgatcatattgggcatgggaaatgtgaaatcgattccattaaaagttgtaattgcaaaaccaaccatgacctgatgagcagcgcactgccacccatgaagcacaagacgacagggcacctaaacggctcgtaaaattagacaggtttattgtattacctcaaggcctaaaagacattaaaaattgctgccaggataaacggggctctgtaaatcgagcaaccgccctggttaacagcaaaactaataaaatgtttaaatttaataaaaaatgtggactaagaaatggaaataattgtgtcctggcgcgcttataaagcctcccagaaatcgacaagctcctcccatcaatcgataattttcgatgccatcccgaaaggcggctttttcaaattttcctttgaagtaattccctcgggaattgagagtgcaatgagcacttatgaataattaacgacacctaagcaacagaagaattatacatttattgatttaacatttttcgtaataaaacaatcgcgtacatgtccggacttgcacaattattaagaatacttagaaattgtgtaaatgaatcccccagggacatatggtaaataaaaacaatacaatgggcggcacaagtagagagtaaaggggactggtaagggtgagtattcct

SEQ ID NO: 11497 - DNA, 4112 bp, Heterodera glycines
ggggtctgttgatgggcaagtgcccatggggctggggggctgatggggcggggggtctggtgatgggcaagtgcccatggggctgggggatgatcggagaaatctcttataatctgggcttggacaagaaacgaattaaatcggtactataaaaaatttgtgaccatttatttctaatttaaagtcagatccaaatacgaaccttttttaatgtggacaaaaaattcgttcaactcgtaggcattaataatatggactataaaaaagttccctttaaattatcctaaatttatcaacaaaaaaatgtgtgaaaataaattattttccaaaaaataatttttccttttccctccattcttcccatttgaaagagtaatgatcggtaacatcattcttgtccttttcttctttctctttctttcgtgttgctgcgcttctctcgtcgcactttcttccttcgtcctccattctttgctcccatcgctctctgtctctttctcgttcctctttttgttgctcccaaacatgttgccgcctcagcatgtcactgtgccagccgccccgctcttgccgtctttcttccgcttccctcctccgttcttcacgcctgagacgcgattcttcctgccatctcctctcgcgttcatcccactccaccatttcttcttcggtcagggcaaaaacgacttggtcgtcgttttgagcagggttttgcgccataataaaattgaaagaattttactaaaaaataaaattaaaaaagctattgggtagaagtaaaaattttatatcggtaatgaaaattttgagtttcttaaatagtcacttttttacattgtaattctgacgcaatcctaatttagtccaaattcagcaaattaaattagtaaatgaccttcaaacttgcaaaactttttggtcttttgtgcagtaaggctcaaatattacactagaaatcatgcgattctattagtaacgaaaatgtttcgtttttttttgcaagaaaaagttgcgattttattagatatgccgaaataatgaataaaaaatttctctttttctttccgtacgatatgggctaaaaaaaaatttatttttcgggtttaaataaatgcttaatagcagttaatcgtattttattgtataacattttcatgtcaaatcgataatttggcacttgtttttggaatttatttatcttcgataaattggtatctgacatattctctgcttcttgacatttaaatatatttcgttctttgataccaatttctaatttttgcatagctaaggactgttttctatattcatacataataagccctggtaatttttgaattttttcaagcatttctaagaatgaaaaatataaattttcgatttcaggggcactaaatgccgctatgtagaaatttttcacccgtttaaaaagtttatttgcaaaaatttcgagattaattgatcgtttaagtatttttccagaaattttccaatttctcgtaattttgttttttataaaattaatttcttggtctattgtcgacatctgggattatagttacttctagtgttatgacatcatccaaaggatagaaaagcgaatataattcttcttttaataggacatgttggaacaaagcctcagctgtgttttcgctagggcatctaagagggcaataaaatgattcaaaaccaaaagaaatcttcagaatgcttttgaattttccttgttcatttttataaattttttcgattattgatgcgaggatatttttaaaattttcctccgcattaattaggaaaggatttttaaaataaaatttggttttatattttgtaaagccaaattttaagtcctcatgacataatgactcaattacagaacacccttccattttgagtgtggcccttttagttttttggttcttatatacccatatgctcccaaacaattgtttggagcctattttcataatttaacatttggctctgcaccctccgggactcgaaatgtaatcttcgggcttccattaatgaattttgcgattgttcctcgagctttgttgcctggtcaaaagttttgcatctctcgaaatcacgccacgtagattcggctttttctgactccaaattgattttgtccaggattgtgaagatttcccaaattgaatcggacattttaagatataattctcgaataccattagcgtaaggagccttttctctagattttattgcacgattaagtgtttcgcgagaagatttggcaaaatcgcttacttcatccgttagcgcagctacatcccgccatgctctttctgtctcttttttgcagcttccaataatatggaattagctttttctgatttttcagaattcatttttatttaattggtattttttttcttgatcctatttatagtttacaaacaataaattcatctctaaattcagtttggagtctcggatttttcttagcatcatcaactaattcttgttgtcacccaaaaaacattttgcccccgcagaaaaattatgatattttatgtcctcttcgatttcaatcaatatagtgtcaggatgatgattgtgtcggcgcgtcattgtaaaaaacccttccttttcaaaaccccagccctggcacccatgtgaattaagttcacatttccaccaaagtttgaacttggtcgttttatgtttgtaatagcgataaccatcacaaaatttccctttggcactttttattgatactagttgagacattctctaatatgccccattaaatgcacacctctatatatttttaggtgaaatttcacctattttcacctgttttcacctgtttccttttcacctattttcacctgtttcctttttcacctgtttttggtttatgtcccacaacctttgattctcatgcagtttcattttctcgaatttttatttttttcttaaattttataagcaataaattcatccctaaattcttcctgaggtctttgcctttcaaaccgtatttggttttcgcgcattgtttcttttagtttatttgccaagtctccaatgcctaaatcgggctgcgagtaagcggtccgataaatttgcccaatttcttgccgataatttttggctatttcgattgattgtttggcctcttctgctaattcttgacacatagttaaatcttttctgtctagacatttttccataccttttttaatatttttcatatttttttcttctttttttattttgtcaaatagggcatgaatttttaaaactccatctaataatttgctatgccaaaaattcacaccaggtttatccgggtttttatttttaatattttgggcttcaaccatggtattatgtgcagaaaaagaaaattcttttgcttcgttatctaacctaattatgtctctaaatacgccttctacagttcttcgggcactggtaaattgctctttttcttcttttgaaaggcaacaactttccgttccgaccaacaagaaccaaactagaaataattttaagtaaaacatttttatttgaaaaaattaacaagtttatttatagatttaaaggctgacaatatcaatcaaagagtaatagatccccttcttccctccgaattctttcaccctcgccccgactttcatagtgcacacggcgcccgccaaacttttgacctcatcctaaatttaaatgtatatggatttttaaaaaagcgttgcgttatcatcccattctgtttcccacgcacaccgaaaaatcccacattttccaaaagccctgtatcatctgccacagacaccttcaaataagatgtcatctttttctcagccccgcaagaacaagcccctttacggcataaagtgcatgcctaacaaactgaaattttctttcatttttattacaaaccctgtactccgcctccatcacattctcaattctcgctctcacaacaaaaactcttccgccttcaataatctcgaaatttttaatttcagcgattgtttgcattttctggagattctaccaaaaataataaattaaaattgattaaatataagggtcaaaaccttcactttaaaaataacatgaacgtttaa

SEQ ID NO: 11498 - DNA, 2077 bp, Heterodera glycines
  unsure (1)..(2077): unsure at all n locations
ttgtccatgatcaattttagcaccttttgttagaaatatgtaagcatttggtaaaattttaagcatgaaaaaccgaagttgatttttttgcggagctttntccaaaaagcttttggggaacaaggtgggccggcggtgtcgataggctccgccggtaaaatttttgtgatttttaatacgaatttgttaagagatttgtccacaaatatggccaaattttacgattttgagcaaatttttaagaaaataaaggatttatagagtccggcggtgccgataggcgccgccgagggaaaaattaagaattttgactatatttttagctaattctcattaaaaaattcttaattttgtggattttcggaaaataattggttatttctggtttttatgaaaatttaacaaaaaatcacaaaaaaacctcaaagcctcattttgaaaatttagcctcattgacctatcaaaaaaccacaaaatgaggctaaaacctcacatctgggagccctgcttatacgggttttttgaaaaatgcccaataagtgcataaaatatgccctaaaaacccgaaaaatgcccaaatacgcactaaaatatgcattaaaaactgccaaaaatggcttttaaccatcaaaaaaatgccaaaaattgtgtaaaaattcagaattgactttaaaaactccaaaacaatgactaaggagcttttttagacaattgaaaaaaattttgaatttcaaactttacatatgcaattttgaatttttttgaatttttattttatgctcaaacaaaattacttttttttttatcttttgtatcaaaaatttttaaaaaagttcttgcaaaaagttcaaaatttttcaatttccaagcgtgtattttttttaattcccaaaaagtcgatccttagggggtgtatttttcgtttttattgcatttttcttatgaaaatttgccaaaaatgaccgaaatatgctctaaaagcccaaaaatggcaaaatatgcatttattctcgaaaacccccaaaatatgcttttatatgcactaaaaaccttcaccaaatcaaaaaattttaacgtagaaatgctatttttgagcccctttcttcatagcatatgcgcagaaaaaatgcaaaagcatataatttagccatagttataaataaaagttgatccgatgtcaattcgacaactgacaactgagtcactaaaagacgcttcagtaccggggcaatcaaacgcataatagcatgctttggtccaagctaaaaacacacttactatccaatcgatttgtctcgtcgagagctgtcgattgataccaattttgttcaaagaattttcatttatttttttggtttattggtttaaatccggtttgttgacggcagatcgatttttagacttagatcattgagagctttcgaatgttatttgtccgggtttgattatttttaaaacaacccgtataagtgaggatatccaaaacttttatcgttaataacttgaaggaaaaaaaaagattgcctgaggcaaaaaatgaaagataattgagcagggtgtgaataatcaaagaaaaagaaatgtgcaaagagacggtggcactgctgctgaaaccggctcattgaagtgtcgagcatcatcatcactttgttggctgtcatagcttaatgacttgtttcggaatcaattcccgataaaaagattcccagttagttccaccaaattgccttctcagctacgattgcctctatttaagctaaatttgtctttagctttttttatatttaagccatggtttttgcatcaattaataagttgttttttttaattttatttgttaattgttttttataaacttttaccattgacaaaacaatgcctttcaaacaaatgcactgcttgctctcgttcgccattttgttggcacttttgtcattaatcgatgccattggctttccaatgcaacaacaatgctgttgtccgcaacagcagtcgagggtggtggtggcggtggcggcggcggatgctgcggatgggaaggcggagggtgcggtggcggtggaggtggaggcccaat

SEQ ID NO: 11499 - DNA, 1714 bp, Heterodera glycines
  unsure (1)..(1714): unsure at all n locations
gactaatgacaagcactttagcaaaaacaaattctaattcaatatatttaagatctttttatgaagctttataatatttntaatttgcaaaaaacaaatataaaaattaaattaataaaaaaatatttttttcgattttttggcaatttttgggaaaaggtaacactcagataaaacttgctaaatatttttcaactaattttttctacgcattaccaagtcagagagccaaatatttgcgttcctttgtgagaaatgtccaaaatcctgcgttctttggccattttgttggcatttttatctttgactgatgccattggcttcccaatgcaacaatgttgttgtcccatgcagcaacagtcatgctgtgggggtggaggaggcggttgctgtggccggaagaagcgcgaggcagcggcattagaagcggttcagccccacttcaaatcggacgaaacgccgtgcccacagacagagtggagacaagtcattgacgaggttggcaaactgatcacttatccaatcattcgcatatccctaattgcttgctaattttgtagagcatccgcaccgacgatgccattggctcggtcaatgccattcaaactgctttgtaccgccgctatgccaatcagaagttcctgatcacctgttcggcagctgatgaggacaaaactggcaccaacaaagtgcacttcagctcatccggcgacggttactgtaacttggtcaaagaacgcatttggtgccaggcggtcgcgctgagcgtgtgaaaaacgcatgctatgcataaacaattaattctttttgatctttgattaattaagttaaataattttccattagctaattcattttaatcttttgattcatttgaaaattaacaaaaattaatttatgatattacatatattaggtagcttttaatttttcgaattaaattcatcgtcaatggccatacactgtataaaagcattgcttctcctgaccaatgaatgacaacactttagcaaaagcaaagcaaatcctaattgacttcttcttcagttttcgctgaaaagttttagtgtgaaaattaaaagcgtgctaaaactgtcaatgggcatttcagaggaaatttttcgcatccgaattaatcaaaactaattagaagattttttaagcagcacaagaataaaaatatgtagttgagtttatttcttaatatcatgaacctaagaaattcgtctattgatcagtgggcattaaaataaaagtaatttttttttattggacaaaaggttactgaaatttttttaaatttcttatatttctaaaattttaaaatttgttatacttattgtagaccaacttatacatgtctgttggtaaacaaattgctttgtttattcatccgtccgtctatcccatgccgatcgcttaattatttatcagcctcaacgtgttgtgtggtatcagccgatcacaatttattcatgattattcctcccctgcttatgtctacttatttttcttttgaagccccctttggtatgcaattttattaccgccaggggcaaaaaaggtttcacaattgatggattagggcaatgagatcggaaagataaaacaatgggatgaataaatgatcgggcggatggaccactgacgggttggtcgctgnaggggggagggacggatcggtctgcccgaaaaatgagccaaagtgcttctg

SEQ ID NO: 11500 - DNA, 2046 bp, Heterodera glycines
  unsure (1)..(2046): unsure at all n locations
caattcncaatataaaaccattcaattcttccacaattaacactaaacatttcttacctcccccctttgggagattatctctttcttccctttatcccttcgcccaattaatcaacacaattcttctcgcattagcatgcacacatcaaagaatgtattcccttcgcatttacgcgtaattatttccctttttaattttcatatgtctaattttgaataccacactaaatcaccacttttcgcccaattaatcaaactcatggccatttcggctctattctatcaacactttattgcttgattaatcatccaatttagaaaaaacaatgtcttcctccctcataatgaactgcttaattgcccttaccattctggctgtgtttgtgtccaccatcgatgccattggcatgccaatgcaatgttgcggtcagcagcaacagtcatgctgtgggggcggcggtggcggctgtggtcgtagaaagcgcgacacggaagcggttcagccccacttcaaatcggacgaaacgccgtgcccacagacagagtggaaacaaatcattgaagaggttggcaaactatcactgatccaatcactgctgtcttatccctaattgcttattttgtagagtatccgcgtcgacgatgccattggctcggtcagtgccattcaaaccgcgctgttccgtcgccacgccgaccaaaagttcctggtcacctgctcggcagctgatgaggccaaaaccggcacggctggcaccaacaaagtgcacttcagctcttccggcgacggttactgtaacttggtcaaagaacgcatttggtgccaggcggtcgcgctgagcgcgtgaaaaggaataatccgatgaattttaaatagttaaaaatggtaattgtcgatcccattatatcataatattgtgcaatagctgcattagagtttagcgtttattatttaaatttgcataaataataaatcattttgctcattgttcctcttcttcctgctttgatcattcgatggaaaatgccaaattctttctcaatcttcgcctcggtgccttttgatttcctgtgcctttctcacataattccgtgaagtttgtcggtccaatccgaatgtctcctgcacccaattgaccacactttccgtgctaatctttggcaaatggctgctcaaatgattcaacagcacattcagcagtttttggctctaaattcttaatttttataataaaataaaacgagttcataataaagtgatatttatcacaggctttaaaagggtttttttaaataatacatttttgtggaatatctatcaattttaggaaaaactaatttaactaaattcaaaatagactcctgctggaagactattcggttctgagatgtccaattaaatccggcataatgaaaattccgagttggtcggtttagggcgttttaaatttaaagctggaaactgcaaatggcatctgagaatatgatgcttatcacaatgattagttctatatccgacttaccagtcccggctcttccttctccccactctcgacatccgctgctcccccctcggcagtgccgtctttctcttccccgtccgttgtcactcgtccgtgctgagttggccggcctgacttactcggcgggggacggccctgggccgaggtcgacgggcacagaaaaatgagcaaaagtgccgagaacagaaacaaaaatagtggaacaaatttggacattttcgcttgttttatctgactaaatttagattcagactcaattagtgattcaaatttttttgatacgaattagagcaattattttgtaaatcatttgattgaatgaaaataaaataaaatattaccggtttaaattattgaggcgaataaaaactttgaatgaaaatgggatgcaatgacaatgagtaatgactaaaatgaactaacacacacggaatcatcattaacatttacttagaccaattatttgttagcacatttataaccgctgtttcttattactacaaaacggaaaaacgaaatgtga

SEQ ID NO: 11501 - DNA, 280 bp, Heterodera glycines
tataataacgctgcggacatctacatttttgaattgaaaaaaaattggtaattactctttctttttctccatattgaccatcatactcatactccccccacccttttcttcttccgccacccacctcccccgctacgcgccgctcctctcctccctctcttgatagtttaaactgaaggcgggaaacgacaatctgatccccatcaagctagcttctgcaggtcctgctcgagcggccgcccggggatcgatccccgatctagtaacatagatgacaccg

SEQ ID NO: 11502 - DNA, 1381 bp, Heterodera glycines
agggcaaaacggacagggagcaccagcaaaggacgggcacataaatggccacgaaaaagtgggcaattaaaaaagcaaaaaattaattttgtacgatggacaacatacatatgtcgcataaaatttatttaattttggttaatattaatctgggtcaccaaactcaattttgctcaaaaacgatcggaatcgatttagaagtgcagaaaacgatgagaaaaaatgccaattatgggctcgttgccatttttcatgaaaaaatcaggtactgaagtaaccactttcaataggactcagttattcatcattaaaaatgaaggaaaaatcataaaatcaagagtgtggagtcggcttcctgcacaatttaaaaaaatgtatttttaaattttttgtataatttttccatttagaaattggaaaaaatacttcttatctatttacaatacattttgacactttaagactttttcatgcgttatttaacgtcggacaattcagtcccctttgaaaatagacacttcagtacccgattatatgaaaatattagcgcgtcttaatttgtattttctcatcgtttgggccgttctaaaccgattcagaccggtttggagcggttttgagtttggggacccatttgtcagattaatattttccttaatttttttttctaagtaaaatttagaataatttgttttcattattatccaaatggaataaatttgttgagcagccaacagcaattgacgaagaagagaaggcgcattttgatgagacgaattggcaactgcactttgacgcactgattgatttgatattgaaaagcaaatcatttagagaaaaactcacagaaggtaaaaattaaattgccaaaattaaaaaatattaattttttattatcaaaaaggctttgataatgatgaaaatacaaaacagcgctttttggaatttgtcctgccaaattatcagaaagcggtgctgaaactgctcaattctggtgattttgctgaatttgagaatgaaattgcattgaaaatggagcaggaaaatggagaaataattgaaaaaatggacaaagaaaaagcaaaagccgatcagaaaatgaaagaactgatcggggaagaaaaaaggacaaaaaagaaaaacaaaagagcaatgaaaaggaaacaaaggcaaagatcagcagctgatcagaaagagggagagagtgagcagaaggaggagaaaggaaaagaaagaaatagggaagagagtgaaaggatcagtgaagagagtgagcaggaggaggagaaaggaaaagaaagaaatagggaagagagcgagcagaaggaggagaaaggacaagaaagaaatagggaagagagcgagcagaaggaggagaaag

SEQ ID NO: 11503 - DNA, 3089 bp, Heterodera glycines
ggaagagagcgagcgaaagaggagataggaaagaaagaaatagggaagagagcgagcagaaggaggagaaaggaaaagaaagaaatagggaagagagcgagcagaaggaggagaaaggaaaagaaagaaatagggaagagagcgagcagaaggaggagaaaggaaaagaaaggacagaagaagagagtcaatggaataccaaagagagtgagcagaaggaggagaaaggaaaagaaagaaatagggaagagagcgagcagaaggaggagaaaggaaaagaaaggacagaagaagagagtcaatggaataccaaagagagtgagcagaaggaggagaaaggaaaagaaagaaagggagaggaaagtggacaggattttgctagagaggaaaacgacgtggaaatagtgaatgaccaaaatggtggtgagagaaagcaagcaaagaaaaattgtgaaaacaattcaatggagttaagagaaaaacaagagagaaaaattagaaaagaaaagaaaacgcaaaaaagagagagtgcgcaaaaagagttgaaaagaaaaaaagacaacgatggaaaaagtgagagaatcagtgaagaaaaaattgaagaaaaaggcagaaaaaacaacaatgagagaaaggagagcagagaaaaaaatgaaggagagagtacgcaaaatgagaggaaaagaaataaggaaaaaagaaaacagaaattgaaagcattggaggaaaataaggaaataaacataaatagttggaataaaacagcaacagattcagtgacaacagaagaaagtcaaaaacagggacaagaaaatggggaagagacaatggaaaagggaggaaaagcatcggcagagaaagaaagggaaaaatgccatcgaatgttgggagcggaattggcaaaagtcaatttgggaagtaagtaattacaattaaaattatgaaaatttgtttaatttatccattcttaaagcacgagatatttacattaaagccctgtaaattttcggactttaatttttatttcttagggtttgaaaagcaatgattttcagactttttgccattttgccatttctgtcctttttgtgccgtttgggtcttaaaattgcatgatataaaacaaaaattatttgttggtttgcaggtttcattttgaatagctttttgcactcaaattaccaagaatttctggcaaatccaaacgaatcgaagcgatgctttttggacattggagtttatgtgaatgaaatttggcacagaatggaaatcattggaatattgagcaattttactggggtaaaatggatggaaagtgcgggaattgtggtgaattgggaaaaaacgatgaaattgaggcataaatggcgggaaatggaaagagaatttgcaaatattagcacaaaatctgatgaaaaagcagtggatttggatgagcttgagagtaatttgcacaaaatgctgaaaagtgtcattttaacaacggagggaattttaattgacgacggacaaatggaagaaaaaagtgagcaaaatgagcgaaaaaaggtcaaaatgcaattgcacctgaacaaattcgccaaaacgatcatttggcaaaggcgatttgagaatgattttgcggaaaagaattgggaaaatttggatgaaactgagcaaaataacattttaaaaatgctaacattcaatcggaatgacaaaaagttggcacatcgtttcaacgaacacttggaaaattggaggaaactgacggagcaacggcaaattggtaaaaatggcaaaattaaaaattttaaaataaaaaatattttaaatttagataggaagttgtttgaccaattttacaaacacacaacccacagttttggcctcggttctgtccatcttggcgtaaattttgctgaaaacactcagcaaatatattttggcagtgcaaataatgacagaatgcatttatccattgtaaaattttaattattttaaaaatgtgccgaaatttgtcgtcgaattatttttataaattcaaatttaagataaatgaacttcttacggaaaacggatacactgattgtccatcggttgagttggcattagacaaagtcaaagaaattgtctcgaaatgggtcggtaattaacagaggccagatttttaggcaaacaattctttaaataggcatctcaaataacgtgaaaaaagaaatatggcaaaagggcacaaaatttaaaaaaggtgtcaaacttggcaaaaaaagcggacaagggaaataattgagtaaaaaatattttaaaaatcaaaaatcttgactgaaaaattaattttcaatatatgacttttaatttaagtttttattggaatatttttttaaaaattgggtcgattctttggtgttttaagttttttgttatatattttttaaggaaatacagaaaaagccacgaaatcaaaaaaaaaagttacagacattacaaataaaaaaaggcacaaaaaggttcacattcgaagctctaatctaaataaattaaaatttatttttatttattgccaccattttcaattcccccccccccccctaaagtcgaacaatgaggcgcgactgctcctgaccggttcgtatgcattgggcacccacgcgcggggctcggacatcgatgcgatttgcattgtgccacaaaagttgggcaaaaaggagcaaagggaacatttccacggcaccgctttttgtgatttggacaacaaagtggcacaacggcaatgtgaagacaactcattgtattgccacttctgtaaggtatgccccgactttgttttttggaaggaggaaataaggactgctggacgcattacggattccgtaattacggctttttagacacccaattacggattacgggttagggattttttgggttttctataattttgatccgtaactaaaacttttttccgaaacaattcttaaaagattaggggcaaaacaatttttcaactttttttccttttattttaatttatcaaaaactttcaacaatttcttaatcaattatcattaaaatttggaatttttctacaaggactcaaaacaatattg

SEQ ID NO: 11504 - DNA, 1098 bp, Heterodera glycines
tgatggcacagttggccaaccaaacgattccccaggaggcgatgctccaggcattgtccggtgagtcatcgtccaacagtgatcaaagggtgattgatcagtggtggaaacatttcataaaattattttttaatccctcactccctttcctatgctatttttccggccttgtcgcgactttcagttttttaaaaccgagactgaggctataacaaccgggaattcccgacatggtcccgtttccgagccaatcggtcgtttattatactgatatggagcttttgtgaatggattatttggtagaaaaaaaatttttcaatttgttttttaggttatttagcaaacgacgcaattaatcgaatgatcgaacatcggaactttgcgaaattcaaaaatttattatggatcattaaattttgggcaaaaagtaattttaattactaacaaaatacaattcaataataaatttcaggcaatttcatttacggaaataaatttggctttttcaatggaatttctctggcaattttatgcacaaaaatattcttgttttatcctaatgcttctgttatatttttatttgagaaatttcttttgattattttaacatggtaagcgataaaataaaattttgatttaaaaaaactttttttgttttttgaggaattggccaatgccaataaaaattgatgaaaataaaaagggcgaatttgaacttttcaattggaggccgtcgcgcattgaatttgaaaatggcgaaatgcaaatgccaataattactccgattggacttggtcaaaacacaagcaaaaatatgaacaactcgacaaagaaaataattgaaaaacaattgagacaaagtctgattttaataaaataaatttaaaaatttttaaataaaacaaatttagccctttctcaactgagaacactaaaaaatatgaagacaagtgacaaaaatgaatggaacagattatttcctactcaaaagtttattgaaaaggtcggccatcaatcaatattcggggttggtccccgaccttcggggagagaaaagtgcggggaccggggaggaggaaattccccgaaattatttgt

SEQ ID NO: 11505 - DNA, 5149 bp, Heterodera glycines
atgttaatgatataattaaatgaaaaaaacaaaaacaaagaatgtacgtgaattaatagaaatttggaaaattaccaaaatccacaaacatactgtaattgggttattgtatgctggttcccataccaatttatgcttaatatttcaaatctttattctaccgtatctcgtttttcaagaattctgacttactgaaacgcattttccattgacccattttccggagtcacaatgatccctcctcccctcaaatttttgggattttctctgcatatttatgccaacccaaaatcattacaattacaattttgaaattaattaattaattgcattcaataacttattatttcgttggaaaaaaataatattattttctttttgttgctttgtgctgctgttcgttcgtggaaatatcgctaatttcgtcacggtgttcgcccaacccattcattagtgcataaatgggtggggtgcggagcaaggcagaactctcttctgcgcgtcatttgacagccactaattaatttattttccaatttttcttcgaagaatgaaaaaaggttcaaaacacacgcccgcagcaaagccaaatggaggggacgaagtggtgaaaggaggggtcttctctcctcatgtgatcatttgcgaacattttcatttgggagtcggttgcacatcttttttttgcccactgttttgagtggaagagtaggaaatcacgttttcatttatatacatacaaaaatatatccctttaatttaaaaaataaataaaaaataataattttttctggcttttccccgctgcttttaagccatttgaagtatttcaacaatatattcaatataaaaataatacataataataattttatggcttttcttcgctgcttttaaaccatttttcaagtttctatttcaattccaatacacatataccaggggtgggcagcggacagaaaaatcccgcggtcgcggattcaatttgccgaggttgtgaatcgcggatcgcagttgcgtcccacccctgatatatactacaagcttggtgttatcaatccttttttaattgcacataaaatttttctgataaagcaaggctacgctctcaagtttttttttcaagaaaagcaggcatcaaggtttcaaattgaagcttttgacgaaaagtcgctctcaactttttatccaagataagcgggcacagaaggccttcaaattgaagcttttgactaaaatttaaatttcataacaattttttcagtggcacacccttttttaaacacatttgggagctctgtgataaagtgataagtaaaagcagggattttgatggcggaaatttttgcaattacaaattttattcaattttgaaatgcgcaaaaacagagattttaattaatttttgtgcattggaccccttaactttatcgcttacaaattagccattcaaatattagtagaggcattcaactaatattgaattatgaaattttgggttcaattaaacacatataaaataatgtcctaacccccccccacccttttttatcgaaaattcgcaacatttgcaatttgtggcctccccattttttgcattgtttcatatgtaatggctccccatgttacaacactttttttgctgataaatttactgcaaaactcttcccgaagaaatttttgcaattcattgatatcaattaatgtttaatcgttggccagaaatttgttgcgtgatttttctttgtttaattaacgttaaatacgaaagaattttttttttataatttggtgagaaatacttacttaaactgattttgaaaaaaattaattatttattattaaatttataaaattttatttttattttttttaatttttaaattgatagttcggtttttttgaaggggtcagtcaccccatcccaaaaatcagggaatccccaccattcacttatggaagtaattcattaaaacagtccatgtaaaaatattgataacgaaaatgtgaacttttgcctttaccttctccagcaaagaaatgtttatttaaatttagaaaatttattctcttacaacatttaaatccgcagaaaatgctctcattgatagtcatcgtttgcttctttgggattgtgccgaatttgtcaaaaccgatcaaactcagaaaccattctccaatggatgttttggtaaacaaaatgtaaaataaaaattatttaattaccaggataatattgttttcattcatcccctgagtctcatcatttaggcttctcataatccgggcgcacttaataatccgcaattccacatttttgggaattgcaaaattttgttggattaatctcttgaatcccgtcctagcaaaaattttgaatcccaattacgcagcgcacaattaaaatttttttaatttatcaatccgtctgccaggatttcttgatattcatatatatttgccattctgttgtagtttatggcctggcccgaggcgcgttatccactggaattgccttttcaccgcgtggattgctttagtgagatggagaggcgacacatcgtgccacaagtcatcacttaccggctggaaaatatcaaaaaactccgtaacggggttggttgaacattatgcataaaactgatcaagcactgattagtctggatagggcctattttcctggtcattattgcgataccaaaaagagtgataatggaaatgggagtatttccaaagggggcggccgtagctcagtcggttagagcatttcaggaaatggaaaggccctcgttcgagtcccaccgggcgaattagcttttatgtctgctgacctggatggattgactaacataggccatataaaaatacatatcatcgatcagtccgacaaaccgcgcattttttatggagcactagcatatacacattaaaacattaagatatgtttggtacgaatccctacccggagccgagtgactgtcacacagatgaacacaaacaatgttaaagtaagaatttgaagcagtacaccgacccaaaatcaaaaccccagactaattatgtaactttctctccaaccttgggatagaagaatttttttgctatgttttgctgtgaattttcagcataattttaaccctgattttttttttgtaaaactattgaattaagcaatgacaatttactaaattaaatttttcccaagagttatgtgaaattcatcgctggttccacgcagctaagcatgccactgcatactaatcatattcattccggtagtttatttatttattttttgaaaaaaatttttttgcattatttttcaaaagttttaaaaacaaaaactagcaatgcgatagacatcgccaagaaaatgaaaatttgcccgatttatcaaccacattttatcccgtacaagcacaatttttggaagattagttggacaaatggtccaaaaagtgacccgaatcaccaccaaaaaaaacccttcactttttctacaggccaacacgaaaaatttgggccatggcatatgccgtgccgttacgcctacattgtgttccgctcccgaagtgatcagcttgaatgggtggagttccggcttgagcccgaactgaaagtggactcggccgatgatcagcgcaatgactgcgcatcggaggaacacaattttgccgaatcgctgttgaagcattgaactgactactgattggagtgtgacatttgaatgtgtgggttgatcgacaacctcaatcattctcattcattcatataaatcacacacacacaatcagctcaaaaaagaatctcatttttttttacaaaaaataggaaaccaaattttgatcaacaatcattttttatcagcgaaattatgtatttgttttgaaaaattcgttcaaatattatattttaaatattcaattatacatattatttctttgaatatttgttagtgattttatggcatagcaaaatttaccacttttatttgaatgtgataaaagcatcacataatatcatcattataaataaaatatgaaaaaaatgtgtgcctttttgtacatatcacttttctttttcatttaaatatagttttttttaaatttataaatgcccgggattatgtattatattaactagctttcataaacctaataataatctaaaaaataatggcattcattttttttcaaatttaaacttatgcagttgacactaaaaagtagagttgtatgggaccgggaattttgggcaaaaccgggaaaaaacttgtacgtgtttttcagtaccagatccctggtcccgtacaactctactaaaaaagttaaaatttttaattctttttccgatttctctctctctctctctctttctctctgtttcacacgaaatcaacactatttctctctatttcaaccaatgctttttctttgtgcttccttaccagacagagagaggagaacagagaaacaacgattgttgtatgaaaaggaaaagcataggcgaaggtgagaggcttcaatgaatggaatgatcaacgaatttatccgattgatcgatatggatcggggaaaattgtttgactaatgatggaatttcaggcagtgtggtgaactaagccgaaagaattatttgtgtctcctgggccaacccttccccaaagcatttagcttcatctgagcctggccaactctttgcacattgactttgccttgccttccgaaccttcttccttccactgcttggccattgctagaaacaaaaggctttatttaatacatcgcatagaaacacaaacatatggccattgggccaaacaaatttttattcctttccatcgcttcccaaccattgccaaaacgaagcgataggccttaaaattgaaggccaaaatttttgtacaaattctgggttcatataaattcggatgatttcaaaaaaaaaaagttctgcatctgtgccataaaataaccttaccgtatatgctctaattatagcccatgggggattatttttcaacttcctcagaaaagggggataattagagactgggggattatgatagagggattatttttcaaaacacctcgtagactgggggataattggagactgcgggattaatagagactgggctataattaga

SEQ ID NO: 11506 - DNA, 1696 bp, Heterodera glycines
tttaattttttttttgttttataaatatccccaaatgtcgggtccctaaatgtcgggtcggcaaatgtcggtggtttccctaagtgccttatgctcaaatgtcgttcgatccccaaatgtcgggatccccaaatgtcgggtccccaaaagtcgggtccccaaatgtcgggtccctaaatgtcgggatccccaaatgtcgggatccccaaatgtcgggatccccaaatgtcgggttccccaaatgtcgggttccccaaatgtcgggtccctaaatgtcgggtcgccaaatgtcggtggtttccctaagtgccttttgctcaaatgtcgttcggtccccaaatgtcgggatccccaaatgtcgggtccccaaatgtcgggattcccaaaagtcgggtctccaaatgtcggaatccccaaaagtcgggtccccaagttgcaaatccccaaaagtcgggtagccattttagctatggtgtcatcaagtacttgattttttcaaaaattaataggcggtaaaccggttaactttactggtcccataaaaagggcaaaaaaaggtcgatttttacaattctgaaaagtactcgggggttatcaagggcgctgattacgaatctggtatcccttttcattaatttcgaaccccgaacccgaactcgaacaaaagtcgaaaattcaaattcttcgaattttactgttatattcgaacatgcatagaatggctcatttttgctgttgcaatggcctgtggttgatttttttttgctagttttaatcaattttagaataaaagttcgaaattcaaaaatttgaatttttgacttaatgttcgaatttgggtccggggttcgaaattgaccaaaatggatgtcaaatttatatcagcgacctcgaaaaccacaagaaagacgttttacatgactttaaaaaaaagttattattttaaaaatcatagacataaaatcatagactagttgatgccgacaaatctgataagaatatgggtataatgccaaaatatggatataatccggcagaggacggttcggtgccagcccaagttttggactacaacatttttcattgttgaccaaatctaataatcttggtatcattcgaaagctttatatgtttagaagctttttctaccctattgcttagcgataagacaattaccaaaaaagtataacatgaaataacaaaaaaaaccaaaattttgaaagttttttcttaataacttttttccaagctaaaatttcgtcctgttccgatagaaatccatcatagaagctataaaccaagctaaaaacatgtttttcgttcgttttagcttcccacagtccatgaaaaaaaattatatggatttccatataatttgaagtcctaatgattatgtatttgtttgcttttatttccttttttaaggcttgttaataatattgttgtcgggggtgggggagctcgtcccacaaaaaagctcagtgtgggcgttccacaaaaaactcagcgattgattggtcattttccggaagcctatcgcaccactttcggtgcaccaaaagtgcctgatccggaacccggaccggcccggttaagaacaagtttttgttcagtttttcaagggctatctccaaggccgggtccggttcttgatccattcacttggagcccgtcatgggtcggggacatctgccgg

SEQ ID NO: 11507 - DNA, 790 bp, Heterodera glycines
ctatggtacgccccactgagcagagaaaagcctagtactatctcgtcgtttttctttttctttgtaatttctctcactttggcgtactatctcttcattttaattatgtaaaaacaacatttacttctctccatttaacttatacaatttgcaccaaattttgcaactatagagaaaaaaattctgcatttttctatactgattttatttttgtttatacttccattcaaaaattataaataataataaaaacgcatttcttttttctctccttttggcgtactattttcatgtctctaacacatgaaaaaacaccaaatttgaaaattctaataattttggttataaggatacaaaatcactttgaacattttagaatcaatagaaaaaagaataaatttagcattttggttagaaagagctgcctaggacttgagttataacatgataaaagtttgaaattcccacaacttttttcatatgagttaaattgcttagcatttgcttagaaaaagattctccttttcaaaaactttttagataccatttgttcagttttattgggtatgaagctagttatggctgatcaaaataaacagtgcaaaaaaggcatttaccttgtaaattttgaattagcgcgcaaaaaattacgctaattacgctatttggcgttatgagtaattttgtctgacactggcgcgtacccatagtgctgttgtttatgtttatctgagtattgtcaagctcaactgaaacccagtaaattattgttgaagggaattaaatcatt

SEQ ID NO: 11508 - DNA, 2492 bp, Heterodera glycines
gtaaacaatttttgccaaatatttcctcaaatacatttggacatttaaatttctaattgtaagggaaataaaaatggtaaaatggatacagatcctgtgtccgtctcgggcctgttttcaatttccgtcatttcactgattgaccgattttggcttttaacagtgtctattttttcaaaatccactaaattggaactttgacattatttgatatccccaaatgtcttctattgataatttgcggatttatgcatatggagagggcggaacgggtaaaatgggttccttcaaaatgggacaaatatgctatccagaaaaaaacggaacgtaccccttcaacacgagcagggaaatgccgaggaggcgacagttcgcatggcgtggcgaaagacgtggcggcggcgaaacgtacggcggacggagggagcagcagaggaagggaagcggaagagcggtggaggaaggcaatgctaacagaaaagacgaaacagcggaaaagcggagggacagcagaaacgaggcgtcgcaaaaagagagggcggaggaagcggcggaagacggccaagcggaggaaggcacgggaggaggaggagacgaagcggcgacggcacggaaaaggacgacggcaccgaggacaaactgcgacacaaagacgacgaagagcggaccaaatgaggacggggcggagacgggcactgaccaacagcagcaacaacagtccagggactactggtaggggcacacggagaccagagacacggggtaatccttcggaattggtgtcccgacggaaaaaaagagtaaaaatttttcttgcacttttttctagggtaaaaagaactgtcacgaacccgaacccatgattttgcaaaatcattttctttagtcgttctaaaatcgtaaaaaattaaattagacttctctatacatttaatagctcattctaaaactttttatgattttacatcagtctgaaattgcttttttaccgccaataaacctttacaaaattaaaagtttttttttttgaaaatcaacaaatgatgcttatacctagataaaataaatgattttgcaaaatccaaatttgggttcgtgcttagcgcatgttttactctcgaatgaataagtgtaaagaaaaattagctctttttccgtcgggacaccaaattccgacagggtttacggacggctcggcattttaggggcacggcacggcattatgggttatatttctgttttcaagcatttaatacacattgtaatgagaacatgtttcgtaattttgacaatcccctctcttattccttctgttactaaaaaaggacgcggaaaagaatctctttccagaaagaaaaaaaaaatgcaaaattcggtgattcataaaattcactgattcatttcttccattatagaagaaatgaatgccttcatcattcattctctgaaaaagaatccctgttttttatttgcctaattctaatttttgctttgttttatgtgtttaccaggcccgtcgtaaccacttaattttcttcataaatttgaatcactattttcacaatatttttttccaacaaatggcaaaaatttcccatatttttttttctacggcgccgaaaatttaggtcaattattattgtacaacattttttggtcggaagagcaaaaaaagctctttgattgtcccacccgaaaatgttttctgtttttcactgttttaatgcttttttgcagttttcattccttccaatttaaaaaggatctctcatcgcaattcgtttcctattcgctaccctgcccataccaatgggttttctctctctctaattttctctatttcctattgttttttccatttctttttttctctcttccccgtgctctttcgtcgcctcccttttccgtcgtttctctcttttccgagtgcctctgcctttccacaattctttctttctttctttctgcactgttgtgtaatattaatatatgtaataacctcattagagtcctcccgccctcttttagggtctgatctgatgctgatcaaaattcactttttgttcgttaattttgcattctttttcctcggttggggtggcggatgattttgattttgctgctgatcagagggggttttgtcgtgtgtctgtattgatatggtatgatttttgatttgctgttttcacctccatctcttcagcacccgagcggtgctcccccaatataaataatacatcaaaattttcaatttttttccactcttctctcttttccctctcataaactcgtcatcgtgctctctctcacaattccatttctttttttctcattccaacgttagtcatttctcccaacattaccactctctgcccatccgtcgctctttttcttttcctcctttcttttgcttttctgtttcttttcccattccccttaacattgacactcttcgtcctctctcttccgtcttctcctctttttcgcgtgtg

SEQ ID NO: 11509 - DNA, 1347 bp, Heterodera glycines
  unsure (1)..(1347): unsure at all n locations
aaatttaaccaatttgttaggtagtctgcaaaactccccccacgccagtaaatttcaaaagattttggncaaaagggaaccctttttttttactataatatttgaaattttgcaggctaatagagaaaacataggcctgtcgaatgatatcaaagttcaaattccgaggaaaaaaatctcggactcaaaaaaagcagacaatttgcattatacaggtccagacaggcccatattcggggatggggatgggggtgaataaaaattaataaattttcaagaaaaatgggaaattttctaagaattttaaggcaaagttattaaagttcatcaggtgcctcagctgaaaatttttttttctggataccggcctgggtccaattaggtattaaaaaatgttaaaaccaaaacgcgtgaaatatttggattttcataaaagaaaaaattttaggccttcgcttgccgatgtttggaccacatcaattttaacaatgagctcacaatgaaacagttcttgaaagttaacaaccaatttttgtgcgaaattttggacaatcttccgcaaaagcacagcggcgaaattgccatttggaattcggtaaaattgaaaaaggcaacaaattaaaattaattaatcaattttattaattaggcactccgttgggcggatgagcaatgtgcccaaaatggcaaagaatgcacgggcgaaaatcgacgccaaatgctcggcccggcactttacaaaattcgttttccgctcatgtcacgggacgaattttcgaaaagcattggtactcaaagggtcggaagtatgccgtaaattcggggctcagacccccaaaaagtcaaaatttttcatggcaagactaaccccccccccccgaaaaaatagtctcttttttggcgaaaagtggctacaaattcttgttttttgctcttacaattagacagtaacatttttttccatgaaaattttataaaattccattttcagtcccttccgacgtgttgaccaaggacgagctgctcagcgtgttcctgtcccatccacctgaccatgcgctgcccgaaatgtacccgttgcgttttcccactgatcaccgaaaggacctagcgtcgtcgcctactgattgtacaaaatttttgattttttttttacaattttcggtttgtacccctccactttttgggagaatttttttgttttataaaagccatcatgtttccaggggttttgaggttgctgatcacgaacgaataggacatccatttctcccaattcgaaactcctgacccggattttgattttccacggattttttaaaacaaaaatttctcccacaaatgggg

SEQ ID NO: 11510 - DNA, 3590 bp, Heterodera glycines
  unsure (1)..(3590): unsure at all n locations
agtcgggttagagattagaantggtcaaaatagaggtgagatcgtgatcaggaccanaccnnccggnaaagagttttcacaaattattacctcaaaaattttacaaaccaaaaggctccccccccctttggtttatacactttgcaactatcgccaggaattttgaaaaagtcgtatctggctcccaaaattaaattgtccaattagtggcaaaaatttttgttgtcgttaattaataaagttgactaaatcatttgaaagtgctccgtgtcaactatataataacaggagcaggtaaaatttcaagttaccatagtaataattcacatgcatttattactggcggcggtacataaaacggtggtagagaaaaaacaacaaaaaatgggtcatttttgtatctaattaattaatgtatagtaattaaaaccggagagaaccattcatttagtaattaaccaattaaaagggagcaaagcgcgcaaacactgcttgtaattgcgtgttctgcagctgctttactgctgctgatcatttgtcctcagcagaaaagcagttcattagtgagtgttcgtaaagcgatgaaaaagcgggcggagaacggacgaaaatgaattaaaaaatgaatggaaaaagcggggaaaattaggtaggggaggggaggcgagatgggataaaatcttaaagggattacgatgaaaaaaggaaaagcggatgaacaaataatagagaggggggggggagggaggcgtaatggggtttttttggggtaaaaaaaaatttaaattaatgaaaagagagaaagggcggcacacttttttgatgaaaaaacacaaagcagctgccaattattattgtttattttattatgagttgtttgtgatgcctaccaaaatatgatcaaaagtcatttttaaggaaaaaaaaaattaaaaaactttcaattttgttaaaaatataataaataattgagtaaaacagacttgctaacattattttgtaatggaccattttattaaatagcacaattaatcgttcgtaagaatataaaattcacgaaaatcagacttttttcccgagtttctgaattcagattatcagattacaattctcggaaacaaggccgaaacctgatagccatgaccatgaaagaacacgagaaattgtgggattggcaaaaacctttttttgtcgagagtcgggattaacaacaattatgtttggtttatgaggcaccgggcaataatgtcaagaggagagagagagagagaagtagagaagcaaaggcaacggtcggaaatgagagaatggcgggagccggaaaatccgacactggaaaatccgacaccggaaaatccgacaccggaaaatccgacacaagcagaaaatccgacaccggtggaaaatccgacacaagcagtaaatccgacacattggaaaaaccgaccccaactttaaattttaaaaataatttttgattgtttgagttagtaaatatttaaaatacatataataaaagttaaatacttaagttctttaaaataaatatttttattgctataaaatagatttaaggtaggcatataataatcatattatttcaatgtcctttttgatcatctcaaaaaaattgtaaacaatccggcaaatggaatcagaggaaagggcatgaagcataagaaagtgtacgtggtgcaagacatgaatctcacagagatttatgcgactcgcaacaatcgacaacccttttattatttgccatcaatatcccatcggatggcagaaccaattaatttttttaaatccaattcgaaaacttgataaacttgccagatattaactcaaacaatcaaaaatattttttaaatttaaagttggtctcgtgtcggattttcctagaggcgttttaacagagggggccgttccgtttcaataaatggatttaacaaatcttaagattttcgaccccccgtcccaaaagaagaaaatataaataatttattctaataattttcagcccaacagaaggggaggctgacgctgaaaattgaaaagttttccgatttttctcgcggcggagaatccggcactgaacggtacagcgatgccgtgaacatccgaggcttttcattcaaaattttggccaacacttacacaatgtctgctgacaagagcaagaaatgtttgggctttttcatcgaatgcaataaaaatggtaaaatattaattaatttattaaaaattgaatttgtaatacgtacagataagcacaaaaaacgcattttccgcttggtttggggggtgtctacaatgacttttataatgccaactttgcttatttctgtgtcccccccccccgcatcgttcccccccccccgagaaataaaaaaaaaatttgctaacttagaaatttttcaagaaaaaaatcagaaagttatttcataggaaaattctaagaaaaaattttttgagaaattttcagcaattttttggaaatttttttgaaaaatcttagtaattcaccataaaaatttctcgggggggggaaatttttttcttagaattttcttgtaaaaaactttctaagatttttttcttgaaaaatttctaagttagcaatttttttaaaaaatttctccggggggaaacgatgcggggggggggaatgaagtgcacccgtcaaaattttacttttcaaaattttttaataaaaatcttgtccattccaggatctgattttgactgtgctgttgaccgttggctggatgattggcacgctgagtttttcgctttcggcacgtgccatttcagaggcgacgacggaagagaatgtgaacaaaacaatggtggcgcatggcatttgcgatggggtgaagagcggggacgaatgcaggtgggaatcgcatgcgacgcacgcgccactctctgctgttacggtgagcaaagaaaaaggaaataaatgtatgggaaagaaagtgcggacgaatgaaaggagagagagaagagagaacgagaaaagaaaacccaatgccaggggcagagagagagaaaaaaggaagagaaaaagaaagaagaggagcaaacacaaagagagagagagagagagggaagtacagaaaagagagtgaataagaaaaaggaaaatttaatttaattaactttttccctcatttttttgtagttggccggtgttggtctgttcattttgtttgcctcaaatatttggttcatctataaggtatggtatactgtgtatttgtcctaactacggtaaccaaaaaaaaattctgcgcaggagacgccgtttttccgggaacgtcaggctcggcgcaacacacacaacaatttgccgaccaatgagccgtacactttggaatgagtacggtacggctacagtaccgttcacacttttctcttgactaccatcgtttttatccgtatgatatcatgagtttctcatcaaatttttttattttgacattatttttttctcatctttgcacccttctttctctgccatccctactaatttattggatcgaaattttgaagttacgtctctctcctgtcggattatggaaatccctctc

SEQ ID NO: 11511 - DNA, 1044 bp, Heterodera glycines
ttgacttggtttcttgatatcgaagctgttttctacgctatttctaaaacggttataccaaaccccagatttttgaatccggttttcagaaaaaatgccttgtggtgaaaacaatatttcacatttcactccataactttgtgagttcggcacggatcgagaccgggataagaccattggaaagagcagctcgagctctacaagaaggtatggaaagaaaaaatagttatttctgggactttttcagaaatcagaattaattctccaatgtggcccaaattttaggcccccagccacagccccttgcttctcccagttttaagtcttggatttgtcaaataaattcaagacttcaaattaataatcaaaaattctcttaaaatttttttgaacccaattcaaaaaaggaaaaaaatttgcagtcaaaaaattattcgaatttctccaattttgtttccataatttccgaaagttattcggtatcataatgccaaaacaaaacgaaatcgttttaaaatattcctttctggacttgacttggtttcttgatatcgaagctgttttctacgctatttctaaaacggttataccaaaccccagatttttgaatccggttttcagaaaaaatgccttgtggtgaaaacaatatttcacatttcactccataactttgtgagttcggcacggatcgagaccgggataagaccattggaaagagcagctcgagctctacaagaaggtatggaaagaaaaaatagttatttctgggactttttcagaaatcagaattaattctccaatgtggcccaaattttaggcccccagccacagccccttgcttctctcccagttttaagtcttggatttgtcaaataaattcaagacttcaaattaataatcaaaaattctcttaaaatttttttgaacccaattcaaaaaaggaaaaaaatttgcagtcaaaaaattattcgaatttctccattttgttacataatttccgaaagtattcggtatcataatgccaaaaaaaacgaaatcgtttta

SEQ ID NO: 11512 - DNA, 1192 bp, Heterodera glycines
  unsure (1)..(1192): unsure at all n locations
tattcggtatcataatgccaaaacaaaacgaanatcgtttannaatattcctttctggacttgacttggtttcttgatatcgaagctgttttctacgctatttctaaaacggttataccaaaccccagatttttgaatccggttttcagaaaaaatgccttgtggtgaaaacaatatttcacatttcactccataactttgtgagttcggcacggatcgagaccgggataagaccattggaaagagcagctcgagctctacaagaaggtatggaaagaaaaaatagttatttctgggactttttcagaaatcagaattaattctccaatgtggcccaaattttaggcccccagccacagccccttgcttctcccagttttaagtcttggatttgtcaaataaattcaagacttcaaattaataatcaaaaattctcttaaaatttttttgaacccaattcaaaaaaggaaaaaaatttgcagtcaaaaaattattcgaatttctccaattttgtttccataatttccgaaagttattcggtatcataatgccaaaacaaaacgaaatcgttttaaaatattcctttctggacttgacttggtttcttgatatcgaagctgttttctacgctatttctaaaacggttataccaaaccccagatttttgaatccggttttcagaaaaaatgccttgtggtgaaaacaatatttcacatttcactccataactttgtgagttcggcacggatcgagaccgggataagaccattggaaagagcagctcgagctctacaagaaggtatggaaagaaaaaatagttatttctgggactttttcagaaatcagaattaattctccaatgtggcccaaattttaggcccccagccacagccccttgcttctcccagttttaagtcttggatttgtcaaataaattcaagacttcaaaataataatcaaaaattctcttaaaatttttttgaacccaattcaaaaaaggaaaaaaatttgcagtcaaaaaattattcgaatttctccaattntgtttccataattttcgaaaagtattcggtatcataatgccaaaacaaaacgaaatcgttataaaatattccttttctggacttgacttggatttctgatatcgaagctgttttctacgctatttctaaaacgggtataccaaacccca

SEQ ID NO: 11513 - DNA, 1109 bp, Heterodera glycines
aaatcgctgcagttttctttcttcaattactcctctttaaagtcctttaattacctctaattttttgttttaagggcgcatttcttttgagaagggttcccaaaatttcgacatgcacttcgccgttttccaatattcgtgcctcaagttcggaaatctctttgaagtcgccgcttttgaagcgttgcgaaatgactttcaaatgatccaacatttgctgtctttgttcgctctccgcttctccaaagtttatttcgtccacaaattttgcgactgtccttcgcaattctttccaattttcactttccaaggccatatccaatttctgctccatcattttgaaaaagaggagcatttcgacactgaatttggccctaatttgccccattttatcggccgagaaaaatttcaggtaaaatatttcgcaccatttttcttcatcttaatttgcgatgatttgtctgtttttgtgcttttttttcttaccaattttttgccttttcaatgtgccgtcatttttctgttctaattttttcaccataaaattgtctccgccgaacatttcgccaagtctctgatgcaaagtgtcgaaagtgtgcctcttctcccaccacacaattttggctgctctcaatcggaagttcaattcgttctctcccgccactctgtccgcttggtacagtttcgtcagcgttcgctgttcctccggcgccgtctccaatgtgccgttgtccagcagttgctccaactccgtcttgtacccttcctgcactttgtagttgaacatgctcaactcggatttaatcgtcaaatttcctccgtcttttctgatagtttcaaatcggtcgcaaatttcaaagtcccttttggcagaaacaatgcgcaaagtgtccaaataattcggcccaaagattttctcattgataatgatctgctgcagagtttgcaaatgcacgcgaaatgaccaaaggagcttaacggacggacttgaggcgataatttatcttatattcgtagtttaagtgctgactctctcttagaatgcttttacctccccccccttttaaaaggcttttccccttttttaatgcttttacctcccccccccc

SEQ ID NO: 11514 - DNA, 2427 bp, Heterodera glycines
  unsure (1)..(2427): unsure at all n locations
aagtgttccacggcaatcaattgcttcatttgaattcgttcatcaaaaggcaattcattgtcaggtaataacaaaaaattggcgaataattcgtccaatgaaataattttggccttgcctaaatgagacagcactaattagtagagattccgtattttttttttggaaaatacggaatttgcgggattaatcccgcgggattccgtcccataaaatttctttagttcccgcagcggaatccgcaagtttgaaacttccggtctctattaattaatccccatttctaattgctttccatccataatattttttatctcaattttaattgagaatttgccaatttccctttgcttttcccctttagtttggcccttttctttgttcgcttctctcttttcgattgtttaccttgcggggtgaatttggccaattgaattaaacacacaaaaaacacaaattttgtgcacatacgaaacagaaggaacattcggaaatttaatttatatgaaaaagtaataattattaattattctaaaattattgtcacaatgaacaaaatcaaaataaaatttgggctttttcttgtggatggatgacgtgttattgtaaaattcaaaatgcgattcggtgccttaataaatccaataaatcccgccccctctaagaaattcccagctaacaaacgtaaaatcaatgagtcacttaactctgcttatgttttatgccataattatgtatgcacaatatgatttaattcattgattcgttttgccaaattctttaaaatattttgccaatttttagtttctttttttattaaattaatttctttttaattcatttgtaattgaattaactgtgaattgttctgtttatcgtgggaatcatagaaaattatgaataataataatgttaaaatgtcaaatcaaaaccattgaatttctcattttcattcatttgttgcgcatctgtgaaaaacagtgtgtgcattaaataggacgaattgaaaggcccatttgaatttggcgagtaaattggcggaaaattttgcacatcgccgttttcatctttcattaccaatccggcgacccaaacggtgcaaaaggcatttttacttaaaaaaatatctttttgaaaatgcttaaaacattaaaaaaaattaattggggggagcagctcactttacggcagataattcgaatggaccaataaaatcattgactccctaattaaccgattaattttagcctatcgtttacttaattactattttttcaaattaccctttcaaatctttgccccgcgtcgtccgttccaattgcggaatttggtggtaatgctccaatttttcggccactttttcactgtttgcccattcaaaaagtttccaccgaattttgttcctttgatagccgcaatttgccatttgcttctccaaattggcttcacaacagaaaatggcagcgaaatgtttgaatttttgttcatattttattttttcaaaaattcttttccaattttgaggattttcttttaatttttctttggctgaattttattttatttcaaaagtttcaaaattttttttaattttaccaatttttaattcctcactgattgttttatatgtaaatttattagtattaaacgcggcattttgttcaggaaacttaggagagattacattcattgaacattggccaattttgggcggtggccaaaggcacacaattgggtttaatggaacggcatttagcggttccaattcgacaggaacatttgaccaatcccttaaaaattaattgctaaattaataaaaataaataactaaatgccattgggagaaaatggagaaaaattggaacaacagaaaggacaacggcgcatttgggaatagggcacagatttttgtggccaaaatggacaaagtggcgccgttgaaaaagccgaaaattgacgagtaaatgagacggtctgaaaaaggacatttgcgtaaactctgaaacttaggcttacttttcgcccaaattttaacagttttgactaagtcagacaacactttttggtcctgaacaagtgataattggaatttgcaggagtgatagccttaaaatgtcaacaattatttgtcatttgaagtcatttacctgctaaggcaaaaatgccattttccgaagtgatctctcccacgatttgatcactttccaaaaactttgagtcaaaagaatccgtggaaaaataaattcgcggcaccggcacaaatatcagatcaacttcgatgtttgcgtaaataattctcaccagttgaactcgtcccgtgatcagagtgattttcgctccatttaatgcctaagtcagtcaatataatttttgccaaatataaaatatattttaattaattaatcanaatanatgaccattccaaat

SEQ ID NO: 11515 - DNA, 1782 bp, Heterodera glycines
aattaaatgaccattccaagtaaagaaaacaaattgcctttgatttgcccgttaaaattgagttcatcagaaagcacacaaatcaaatccaagtcggacccgtccaattcggtgcccatcaaatgcgagccgttcaccagcaaatgggcatctgagagagcgaatttgattttgagtttaaagcattcattgccaatttattttggtaaattgtcgcgacaattcattaattcatttatttacccgttcttttgcccgacattctgttcacccattcgccgatggtttgttcaattttgtccataagttcgagaatttgtcctcttttaaacgaattgacagaatgcttcgaaataaactgataaatctaaaaaccaaaaaatgtttttaattgcttattaataaattaaacttcttcggatattttctgatcgttttctcgcaattttggctccgttctgatcaaattgtactgactttgttcgatgttcggcaaacactttttgccttaattacccaaataattaatttttaaattcacttcgattttcatttctcacctaatttgtgctgtttcagcaccgtttccattgcttttgcatatttttctatttttctttgtccaattttttccccattaaaaattcctttcattttttccacgtccatttttacaattgatgcgaattcttccgaattgatcaattgtttggctttaagagatgaaaaggaatgcatatgcaattggattagcattgtgccgacggtggcattgccaaaagtgccaattttgaccggtttttgcattttttctccgttataaaatgtttcagtcccttttctgaatttattttcaaatttactttttaaataaattaattttattcaatcaaatttatatatttttttactcttccgttgtcaaaatgaatttgtccaattcattttgcatcagcagcagtttctccatcacaaaatgcgaattttgctcatttttctttaattctccgtttagaaaaatgcgccaaaattcgtttaatttttcataagttttaaaatcagtcaaatgcattctaacgaatttcattttcgcatgcgttgttctgacgaacatcgaaatatgcaaatattccaaatatttttctgcttttaattcatttttcaagtaaaaaacgtacaacttggccagtaaaaaatcatttagcaaatcttattttgaaatttcaattattaaagtccattggtaattaattacctgccaattttttaattaccattcgctttttctccgcctttttcggcttttcttcacatttcaattcgcttttttcttccatttgttcccatttttggtccaaagtttcttttccgtttttctttttgcctttgctttttgcctttaaattttctcctttttgttgttcgcttttccatgctttttctctcttatttccctcctctttttcttttttcgcttttccctttttcttttttggccatttccttttttctgtccaattgtcacaataattataattacttttccaaatttgctccgctttttctttttctttttcaatttcaatttctttttccttaatttcttcttttatttcctctttttctttttctttttcttcttcttcttcttcttcgtttgtttcttttgtgtctttaaaaatttcttcttcacattcagacgaagacaaattgccaaaagtttcttccgtcggagaataataatcagtgaactgaagttttggaacatttgaacaatttaat

SEQ ID NO: 11516 - DNA, 2197 bp, Heterodera glycines
tttttcattatgttacaatttaaaaattgttctgcattttttaactgtacggaaatagcatttattttgagcagaatctttgaagaaaaaatattgaagaaaagttgaacggaagttgtattattgttattataaaatgtttaaaattattatttattctataaaataattaaatttaaatatttttattgacattgagcctattttcggttcacccacactgatgagactattttcggttcgtatctatacgaaaaaacacaaccgaaacggatttacaaataggtatctgatcaaattcgatagggtttctgtgctgctattcattaattcaaaattccgctcattcttcaatcttccgacaaacagagcaaaataataaacatcgttcggacttggtcaaaatagattccgtgatcactgactccgtaaaaccatggatacatacagattaatgtatgaaatacaattttaaaatcagtggcaaaaccctggcgaccttcaaacgcttaaatattcccttttattttcccgccatcaaaaatcaatttttcttgctctgctgagtttgttgtgctctgtgctctttatcttttctttcaaaacaatttttctcattctttattttattttttagtcttatcaataattttcctgagtacacaaatttgtacatttttacttaaataattaattaattcttctaactttaaaatgacattcttttttaagcacaattatccgagccgcacaaaaatctttgaacacactcacttgtgttttgaaaagagcagaataatttgttatcccgtactaagtacgaataaccccattttaaccggtgcaaaagtctgacagaatgatcgggataccacaacaaaaaaaaaacacttaaattcgggaaaatttttgaaaaaaatcccttgggattgcaaaaatttgttctgtaaaaaataaagaagcctatcaggggtggggcgcgcacagaaaaaaatcgtgcccgcgcattcaaattgccgcggccgcggatcgcgcaaaaaaaacgccgcggatcgcacatcgcggcgcggtcccagccctgaagcctatcagaaataggacaaaattctctactgaattgccttttgatggtgggtcaacgacttatacttctgatgctgataaaaaaacctttttggatcaactttatagtagccccattggaaaaacataatatttgctgccaaaatttttggaatgggttatctacaacatttcattaagagttatggtatttgcatacagtaaagctgaataaattatgtatgcatttttacagtagttggaagttgagccaaacaaactttaatgaaaatgtttaagaaattccacgctaaaaaggaatttcgtgcattaagctgaaccagaaagattaatttcgaccatataaatccgcgcccattaataattaattataaggctcaaataattaatttttgaagtgtgaatgatcagcagaattgactattttgccttgtctccgattattgatttgtctcgcttttagcaatggcatttctcctccctcggcttgccctcgcctcctcctttcttgtcctcttcgccccattgtccgattctgccaatgttttgttctcttccacatcgctttatcctgtccaccgctttatccaacgtgaattggcttctgaactactgcgtcgtaatcactcagttacttggtttgaatatggcttaagcccggtgcgtttggccagcaaattttccaaagacctttttaattgacagaatcaaatatcactgcctaaagggattgacgaaatatttcttcaagttgaaaattccccgaaaacagctgcactcaaaaataaggccggcaatgtgcagctcatttcgaatgaccaattatggagggagggcttttggcaacccgtggaaaagcccggcggttggttggccagtctggagctgtgtgagagagttctcgaacaacctgaacaccgtaaagcatttcaaactctgctcgagaaaccattcgccgtcgtcgtggtccataaaaatgtttcttcttaacattggtaaccaaaagtctcgaataggtggacgatctgtacaacccatgcggccttctgctggcaggactaaagcgggctctggtcgtatattggtctatgaccggactccgtactgaatcggc

SEQ ID NO: 11517 - DNA, 2635 bp, Heterodera glycines
tttgtcggcccatcttcaccagttgtgcatccatcagcacattattctgcgaagggtcgacaaactctttcaggtggaaagggcaatttgtaatttaagatatccaattaattactcatttgaaatccaattaaatcacttttattatacataaaaagcggagtatttaaaagtgtaaaatcaatctgccgctggaaatagcaatttaagaagcatttccctggaaaattgcctgattcgtttaccctggagcggaatgcctcctttaacaaaagtgaataacccgcccattttcgatttcgcccgtccatacagtaatcatttcataattgcctcacttcaaaataccgtatcccataaagtgccacgggtaaattttgtcggcggattgcactgcaaaaaccaaaccaaatggacaatggacagagtaaggcaaacaacaaataatgcacgcactcaatgctcattaataatgttgccagaaattgctacaatttgtcaatgcttcttccgatcagaaaggctttattttaattagtggtggattttctgcccaatggtcagacgccccagcggaagtgatcgtaagtgtgctgagaaaacaatttatgttaatgttttggttggtcaaattccaaggagaatttggttggtgccattcgcgagttgccagacattcgctttgtctggcagttcgatggaccagcgttaaggaacactccgaagaacctttttgcggctgaatggcttccccagcaggaattgctcggtcattgacaattaattattcaaaattgttcatttacgagtcaaaacgaaactttctcgggccaaatggcaaccaggtggcattagtaaatcaaaatgcctttcagctcatcctaaatgccgcgcccatttgtcccacgggggagtgaacagtgtcatcgaaagtgtttggcacggtgttcccgtcattgggtggccgttgagcgccaatgggagggacaatttgttacgagtcactgctcgtcaggccgggcttatgctggacaaaaagcgaccgtccaaacaagaatttatctcggcattccaccgaatttacatcaaacattacaaggaagagatgcttatatttcaagtgggcttcccaacaaacatcgaatgccacttaaataattgtgccaaataaggatatggtcatcgacgtgccttacaccgagttgaaccactcggccttttgggtggaattcatcgttcgtcaccaggaagttccccacgcccgctcgggtgcggacgacctgaatattttccaggtaattcgcctcttaaaaggctgctgatccgactcacttaaacattcagtacttcctcgttgatgtgatccttttcctagtcggcctctcactgctcgtcctttaccttttcattcttttgctcaaattgttcttccgtctgatcatctttttgatcaaatggcctttttccgccggttggggcgctatcaaagagaaaaaagggacaaaacacgcaatggctaagaagagagactgatcgacataagcaaattcacttaaaaccgagctgctgactgatttaactggccgtttttgctgagccaatttttaaataaatttttagtttccatggcaacgtatattaagattttctcagaaaaacccattaagtagtgtattggtaatataaaattctcattcatggcctttctcctaatcgcccctttggtcgacctttgtttcaatgctgcatctgtacttttgttgccagacaatgacattcaactaacgcattttctgtaagcaatttgcattgactaatcgaccaattatcgttgcaaataattacggatgaattttttcatttattaaaataaggaaaaaatagatatttgttagttcaaatatcggcgaataagtcagaatacgactgcttttccacctttattttcagccttcaagacactgtgctggtcttgtccatcattggtcttgccattcgcttctcctccacatttgtgttccaagctggccttatcggtcacttgctccgtcgcttttccgtttccatcattttctccttgctttacctcgtcctctctattagccttcacatattttcactgcgtgaaaaatggggcaaaaagagttatcactatgcatcacccctttttgtggctgttctcttcatgtttcaaagaacaagtggaataagaaattgaaagcaaaaatgaattcaaaattatattcagtgtccgtactccactattttctgtacaaacggacaattttgatgcttaatgaaccgaaataccatcaaaaatcggagtggctattgaataaaattagcaaaaatattggagagaagccgcgagaatgatcagaaataacgatgtacctaattaataattttctttttttattttaattctattacctaatatggtttgtcccccataaattttttgaaaaaattacggttttaacgaatcgggtagaacatatttccttaggttttcggggtctctgatcacgatccggcatccatttcgaaccccgaaccgaattcgaaaaagtcaaaaactcaattttcaacaaaatttacatttattgcacaaaatgcatagcaacggacaaaa

SEQ ID NO: 11518 - DNA, 3727 bp, Heterodera glycines
  unsure (1)..(3727): unsure at all n locations
tttttgtgttgctcacccaatgcattccatatcagggtaaaacacaaaggcgacagtgttcaaatcgtcaaattaacaaattcccattgaaccgcagtcgccgtctccccattttggcaccgtttcattatccattggtcctcctgatgattttcgcttgctttgatcagtgtcagcttttccttggtccgttcgttcgctaattcaaatgtcacaatttgcgttgacaatggatcaataataaattgaattttgtagcggacggaagtggtggcattgagaaatttctaaacaatggaaaacaaaaattaaaatcagttgcttaaagaaaatatggcccatctttttcaaagtgttgatgttggccaatccgatatttggtggcttcaaaaggcaacgcaattgcttcagttggacatcttttcgcggagtgtgcaaccattttgacaacatttggccagcagttggaattgcatttggcccgtcaaaatcatcagtcgaatcgggcaacagaacacaaaagatggaaataatgttgagatcagtgagaattgttggcgaaatgagacgacgtaaattgtccaaaaggaggtcatcaccggaaaagtccaagtagcgaatgttttgcgcaaaaattggccaaatttcacggacaaaaacaaattggctggtcatctagtgcaaaaggaatactcaaccacaaattggtgcctttgtcccaaatttgctgattggcacggagaaaagcgatcacgggatggtcaatgtaactgaaaatggatggcttttattgcgatagctaactctgattttgttgaatgacctaatctgaaggcatttgaagcgaattttgctggtcaacggacggtctggcactgaattcttgcgacgaatttcgattggtctccaaagcgttaattcgcttttgctgtcgaaatgtttgtccaccaaaacttcgaaacatggcgaaagaaatgccaatttgaggccgagttgagcatggtcaaaaaatgggaatgcaaatccaactgaaatgcggggaaaacagtttagttaaatgcaagaaatgttttttagaatgagaggaaaatggaaaaagcaaaattttttggccaattaggcttcgactttattttccaaattggcaagcgaaggcaaaggaagcaattcgaacaatttaaatttgttgatcagtcaaaggtacttgccctgtctcaaaataaatcgaaaacaataaaattatgctttatgcaaaacgaaattaaagacaacgaaataaccaaaacaaacacaatttcaaacaaacttgaaaaccagcgagaattagacacagacgaaagtaaatcaatcatacaattaactttttacttcacaatcataagaactaatcaaaaaacaaaacaaattatttaaggtcaatttgaataaacggaacgccaaaacaaacataataaattaaataattaatgaagtccaaatgatatcacaatttgagtgtgatggactttgacacttttataacttttttagaaaaaccaaattcattaaatctattatgtccatagaacccattttaaaaattccctatttgaagcattagagtggctaagtctaagacttcaccgttattgaatttcttcgaatttcccgagtgcgttgtctcgccatgttggagtcgaaaaattgaaaattttaatgtatttttttttgtaaatctttttcatacaattattttagacgaaattaaaatattctttattctctcttattcagtcttcttagtaattaatttgaaaaaaatagccaacttaggtaaattcggacgttttgccaactaatttcgtcaattcgtataaattgaatgggccatacagttttgtaggaatgggtattcaaaaaaaaacataatataataattgcattcaattcatattactaagtttttggatcctacttggtgagggaagcaagaaactcatttacaaatttagtgctttaacaaatacccaaaaacggaccagccctttttggtgtcacaaaagtaatgcaccaaaaactaaatatggcctcaaggctgcaccatatgaaaaaaggcttgagatatgaaaattggaaaaattaagcactagaagggtcgctaaatgatatgaatataagtttcaaataattagagacacctaactcatttagacccaaaaatttaaaatgaattttatttgtcaaatatcaagcatgttttttgcaaattacgtttttcattgaaaatgaagttaaaatggattgattataaaaacttgaataatattaggtactgttttataaatatgaaataattattttttaaattcaaaagacaatttatatagaatatataaatttcattaatcaatgaagcctacggatccgaccactgcacggatgccacgcatgttccggtagctgttactgactaacagccgcaactgtgcacccgttactgcctacttctcgaagggctagggacagcatgcaacaacagaaccatgcatatccttgaattttaaatgtaataacaatgtttcgctttggtataacttgaataatattaggtactgtttttggcatttggttagaggtgaaagaggtttggagttgtttcaatgctccactgtagtcttgacaaaagtcatttgagagtcaattaactggtgaagaccgttttttgggaaattggagaatattcggtttcgggacagggtcttttcgtcattgaataattaaggcgaatgaatattttcacaaccatgcatatccttgaattttaaatgtaataacaatgtttcgctttggtataacttgaataatattaggtactgttttataaatatgaaataattatttttagacaatttatatagaatatatagaatatataagactagtgatagtccaattaagaacaattaaaaacattctctataaaatcgaatatcgacaatgaagcaaagcaacacaacaaaagacactcctcctcaaccaaaacgctcaatggcacctgctctggacctggacccaaacactgccgcactcgtagagcaagaacgccaacgcccattggtgctcattggcctcccggaaagcaatgctgttcgcccatcggagcgtgttatagatagataaatttttgtaatattctgttttactctattaaaatattgaaaaagatttgtatatatttcgccttctttcaagttctttttcttgataatatgaaaagtcttactcaactgcaataatatatacaatgcctaaacaattttaaaatcattatcaatataatttattagagaaattaatgaatacataagccagtaaataatttacatttttccattggtattttttaaattcatttataaatttaattcttcatgataccgctggaaaattggaaatcaaacacgaaaagaggtaaatgaaattaattatttgtgacaatttaagaataagtgattatttgttacaaaaaaaagattgagaagccaatcttcacaacttccctagctttttatcattattctaaatttttgaatataatttttaattcagtggtttttatttaatttttcattttttacccaaattattaacttttaaattttattaaatggcatttatgcatttatttgaaattttgttgttcttatttgaattcgatatttntctcttttggtggtnttagtttttg

SEQ ID NO: 11519 - DNA, 1079 bp, Heterodera glycines
cagaaatttattattgtttcatttttatttaaatatagtttttaatcagtgttttttatatgcagttgaaattgtgttgtcaatataaacaaatgtaaggacaaaattttttattatatgaaattcatttttttgcagtcttttgaacatttatgggtgccgagtcattgcgcatgaaaacgcaaaaatgaaaacaaccaaagcaaagtaaatgaagaatttaacgcataattaatattaaaaaagattaatttaattaatttatttaataaaattattaattaagcaaattaaataaataacactcttttataattaagttatttgtaaatccttaataaatataagcaagcaattaattcaaccaatttggatatatgatatcttgaaaatgtccccttttgaggttaataaagattgattttattacataattttttatataaatactccggctggtaatttatttccattttctcattaagatttaaaaattgtaaaattaaatattttaaaataccttaacaaggtgctattgattatttgtacgtttatttttgtttgctataaaatatattttctctatgcgtactttttaatatatttttttaaatttttgtgatccaatgttacattatttttgttaagtgattcattaaatttcgattataattttattacttttgccaaaattctggtctgaagatgaccgcccacgaatccatatgctttctgatattgagctacataagatatttatatatataatataattttctaatcgtttacattgaaatttttaaaaatctcaactttttaataagttactaaagggaatgagaaactaagaacattaaatatcagtggttaataatttctttaataagtttcagtataatgcgattaaaattaataattgctcacataatattatttaattttaacgtaaattttcttttttcttatatttttcaccccaataaaaagctgcaagatattcgttcttgtcaatggcataagttcttcgaacgatacaattattgttacttaactcagggattaaaaatataaagtaatgt

SEQ ID NO: 11520 - DNA, 3343 bp, Heterodera glycines
  unsure (1)..(3343): unsure at all n locations
tcagttttgattacctctcttgctctgtgggtataggtcatagacctaccatcccaagggcaattcggtagagaattttgtcctctttctgataggcctactcaaatttttcagaaaaaatttcctaaccccctaggaatttttttctaaaattttcccgatttcaagccatttttgtcttttcagatcaccgtgaagaagtgatctgatcaagttggtgtaagagactgttttgatcagcatcaaaagttaatctaacagagattttttcagaattttatcataataaaaaaatgagttttggtcgattaaacattttgaggcattacttttgcaccgtcagaagggggggtcaattggatcatgaccaattttctcgtcaacaaagggagctatcggggcagtttttggctatttattagcgctgtaattagtgtttcttttggtgtaaataagacttttttcaccattcatttttgagaaaaccagtttaaaaaaaaatctttttttttgaggcaatacttttgcacctgactgtataactaaatttatacaatactttatgtgtgtagagttggtaatttatataacaataattcactgacaataaatatacatcacaacaaatgtttaacaatagagaccggaattttgaaatggccgggaccgggacattttcaaagtttttgaaattttaattataaatttaaataaattgcttcatcttctataatgtttaaacatatttaatgtaaaattagcataatttattggagattttatcttttcgatcgtcggctgttgcttcgcagctttttttgggattcttttttcgtcttttccagctcttcgaaatttttgacatattcagaattagcatgggnatgtgaaaaagatgcattttgagtgacttggcgctgaagtcagacagcataaattcgggaccagagcgtttgggcccccgtttttgggccccggggtcgtttgggcccctgtttttgggccccggggtcgtttgggcccccgtttttgggccccggggtcgtttgggcccccgtttttgggccccggggtcgtttgggccccaacccaaaaatagaaaaatgtgcttttttaaaaattaagattctaaaaactaagcctgagggatccctcgccacttggcataagttaggtttaattaacattcgctcattttttacaattttacttattccaaatcctattattttttaatagctaaccaatttgatgtacattctgatttggacatttttcagcaatggctaacccaattgcaaccaaaaaacaaaaagtaaaattgtcttacgaaggccacctttacaccttcgctaaaatgagttctgatgggatgacaaaattttggagatgcgagttcaaaaaatcaatttcacattattggagtttctccggggaatttctcgcaactatcgaatgaacccgtgattttttgttttattgtccaaattaccttatgaacccgtgaatttctgttaatttttacattttttattgttaaaattattgttgaatttatttttaaaatgtttattttacatttttatgctgaaatttaaaaagttgtttttactgtgatttttcatttttctgtacttggggcccaaacgaccctggggcccaaaaacgagggcccaaaaactggggcccaaacgcccccgactctaacaggaaagtaccaactatttgaacaataaatgtccaaatatttcgaaatttagatttttgcccgtatgttaaaagattttgtaaaaaatattagcaacaaatttaatattcgacttgcaatttcaatcttaaatctgaatttcgacattttttggtctcggaatctatacatccctggtagataatagcgataaatcaaaaaaccaagttgtccatctttgatcacccaaaagagttagttgtaccgtaccgcttttgattgccctaaaattattagtaagcttaatgtgatgtcagaaggaagtgaaaggagcgcccgtagctcaattggttagagcacggcacggattgttggggtcttggtatcgagtcccaccgggcgagttaccttttatgttctacagtaatacaatcaaaagcgaaatcagtctttttgcggagcttagagtcaatatttgtgggacaattaccacaaatgatcaggacaatcgccacaaatgatcaggacaatcgccacaaatgatcaggagaatcgccacaaatgatcaggagaatcgccacaaatgatcaggacaatcgccacaaatgatcaggacaatcgccacaaatgatcaggacaatcgccacaaatgatcaggaaaatcgccacaaatgatcaggacaatcgccacaaatgatcaggacaatcgccacaaatgatcaggacaatcgccacaaatgatcaggacaatcgccacaaatgatcaggacaatcgccacaaattatcaggacaatcgccacaaattatcaggacaatcgccacaaatgatcacagattttttgccttatttttttaagcaaataaatttactttgtcgttgtgatcaattgaagaaggcttctccgattcgtcgcacatatcagcagttcttggcgatgcttctgttagtgatttggctaaattttcttcaaaatcaaattttggcacttttcggcaattttcttccgaaaatttggtgccgacacttttttcttcctttttatcatccaaaaatgttgcttttttctttatttttatttgcattgaatgattttttgaaacctcttttttttcctccacatttttttgctcttcgtcctgcggcttctgctcaatttttatttttcttttggcctcctcttccttcaatccatgattattttgtttatttgaattttttcttggaatatttttccataattcgccaaacaaatcatcatcatcatcatcatcatcatcatgtccaatgcccaaaattccgtcaatgttcatgatatgataataaatcagatgaaacaagaagaaagtagcgacaagcattatgaaccgaaatgtgtaaagaatagtttttgggccaaaagttgcgttaaattttaaattttcaaataattagaaaataatttttttttatatatatatgatataaattttcattaaaatttatttgctatattagtaagggttggggcgctgcattcatttaaaatatctatttgcttgtaaaatttttattattatttttttgcttttttcaatccaatattcattcattaaacgaaattattaattgattttatagttggaaatattttaaaatacatatgttattttgttta

SEQ ID NO: 11521 - DNA, 1166 bp, Heterodera glycines
  unsure (1)..(1166): unsure at all n locations
aggcaaaaaaaagtcgtcacttggcttttaattgcaaaaattggcctttttagtgaaaatctgttaacaaatcagaaccaaattacaaaatttttcccggcggcgcctatcggcaccgccggaccctctctccttcgaccatttcacaaaagttatttggaaaaatctgccgcaaaaaattgattttttgatcccgaatgtgctaaaattcatgagttgttaattttctccccaaaattgttaaaatcgttaatgggagacgaaaaatataatatttgatacatttttgatagaataaattgtaaaaataactgatttgaagcaattttgcaaaatgtcctgactttcgaccccaaaatctggttttttgggcccgatgtcctgattttgaaaaattttcgatcgcacccctgatttaggggcccgtttgttgggtttctcctccgtttcctttgtcctttccttcctccttttcatgtttactgtttttggcatctccaaaaacggcgtcttctctccgtcttgctcttttcctccttgcgatccttccctttttcctgttcgccagcgtcggcgtcgtcgtcctactttttgagagttattgcctaaggttaggcaaggggtaatataaagggtatattcgtattcagcgaccccgaaaaccctaaaaatcctaaattagactcattttgtttttataaattttgaaaaattttggacatttcgtgggtttttactcttttggacatttcgtggcttggacactttgtgggggtgccatttactcaaattaacaattagtacaagaaaaaattcagttaactacctaacacagcaacaaagtaccgatggtagtccccctttttcaaaaaatcaaatttttgaaattttttttcgataaaaattgtgttaggggttcaagggtcggagaatccaaatctcacatcaattccgacctatgtcgaaccccggacccgaattcgagcaaaaagtagaaaattcaaattttcgaatttctcattttgcttcctgaaatggcttacatatagggaaacaaactaagaaccccggacccgaattcgagcaaaaagtagaaaatttanattttccaatttctcttttttgccaaaaaaaggtttatatgatttttattaatgaattatcga

SEQ ID NO: 11522 - DNA, 3058 bp, Heterodera glycines
  unsure (1)..(3058): unsure at all n locations
agtgaattaaaataaattgataaaaagctcaatttcttataattttaatgtccgtttttcatcttctggacttattctgcacaaactagtcaaatttataaaaaatcattagagtttttgtgaatttatcccaaaaataaaataatttaatttataaaatgaaggattaataaatggacatatttctgtggcgggggagccaagtttaaaattccgatcactttcgctctgatcacttccattctatttattccggtgggaatacttcgggctcgggatccttcgtcattttgctgcagttaacatccggcatctgtgtcagcgtcattttgtcgccatatttgaccaaaaggtccaacacagcgccattagtccagccgaagccaagctgagaaatgaacaaattttatatttaaaagtattgcaaatttgaggcatcaaacggatagacttgctcagataatgcgatgaaatgttgttatctttttggggcgaagtttttgcttgtttcattttctctataattttgtaggaatgcgatagggaagaagttaagcaattaataccacataaagagactgactcgggaattcttgggctcaaaatattaggcataatgacagaagatccacagtcaaaaaaaccactcaaaaaatacccacagacaaaagaccacaactattttatataattcttaattaattgattttaatgccttaatttcaatttaatatgtgaaaaaatattaattgacaggagaagcaaataattgcaaagtattacgttgaagactaggaacattttatgtaaatagtatttttagattggtttgacattttcacgtaaaagtgtctttagcatttgatgcttctaagacgtgctgggtcgtttcctaaaaaccgccatgtggtaggaaaacaaaaaaatgtaagacatataaattcataacttggtccattttcaaccaaattaataattcttcgtatcattcaatagctctaggtgttttctatcagaatataattttattaaattttttacttaagtatataaaaagatatggtaaaattccacaaaaccttaagtcggaattttttgtccagaacttttttgaacctcaatgaaattttttgaaattagaaagataaatagaataaatagagtacttgaaattctaaaaagaaaatttaatctatttgcttctgaaaaaaagtgtctttagcttgatttgatgcttctaagataccttttcaatatttttctgtatttgagacttttgtccatatttatatgttttaaattttggaaaaaatgaaatgtgcaaaaaaaatgttcatgcgcaaaattaagcgtgaaaaaattaaaaaattaactaaattttgtaattatatttttcagtaagtaataaataggaggtcttaattagagatcggaccggtcgattttttcggtatttttcgattttcggtttcggtttttaaccgaaaaaaccgaccgagaaatttttgagtttttcggtttcggtttttttcgattttttaaccgaaaccgttcgaccgaaataattaaaaaaccgaaacaatcgaccgacttttttgacaaatcagttggccattttttttaacaaaattcattaaaattttcctccggcggcgcctattggcaccgctggccccccaaaaacctaaatttttcttaaaaaattagccaaaatctcaaaaaaaaatttccaggcggctcttatcagcaccaccggccctaaagttatggcttgagctcgcaattaaggcaccaaaaagcgcaaaatagcactgaaataaggcacaaaaatcccgaaaaaggcatgaaaaaaggcatttaaattttttattaatgatttttagggagcaaaatacgtaccaaaaaactaaattttgctgatttattgataattcatttttataatgtttttcaataaggaaatttttaaacctaaaattttttatcaagaaaaaaaaagaattttggcgttcaattcataaaggtatattctctgaatttttttagatcatttcttaggggtgtattttttccgatttttttgaatttttaatggaatttttcggaaaaaacgccaaaaaaggcaccaattcgccaaaactaatctggggttttttagaatcaagtttcccggcgtcgcctgtcaccgccggccttccgccccgcttgttccccaaaaagtctttgaaaaaatgtgccgcaaaaaaaatttgtaaaactctgatttttttttttgagcccgattgcataattttttttacaccaaaaatcttataaacacaagctttacaatattccattattataattgaattttgctttttatttatacaatatttctaaaatctcttttcgttattcaatttaatctattaatttatgatttcattgataagtttgaatttttcttttatctgtttttctttttatttttttattaaattatgtttattctttctaaattctcatgtacttttccttttttttcaaattctcttccaaaccaaagctttataattcccatattaatagatataaattattttttataatctctttttttgttattttatgagttgtttttataaatcattagctttacaatattccataatataatatgattttctgtattatttcgttctgtttagagtgaattaccttaatatttcgcatttgtttatttttatttttagaatttttggaatttattaattatataatgaaaatttattctttaaaattattttatttacttcaaaaatttattgccaattgaaattttaaatttcatttgtttattaaaaataataaagtttctttttatttccttaacatcccttatgaaattaaaccaatcaancgtagggttttccatgttgttctatcgcatttttccatgttgttctatcgcatcgcatttaaattaataatttgtttaattttagtaaaattagtttagtaaatatttatttatatttcatcttttttttgtcattctttaatatattttaataat

SEQ ID NO: 11523 - DNA, 1707 bp, Heterodera glycines
  unsure (1)..(1707): unsure at all n locations
tttctaattaggttaatagcgaagagaaagaaaacaattttctcaaactcgttcaataaaacatagaaaaattaattcagccaacttataaatttattaaatacctgtaataaaccaaagcctacaaaaaaggaattggaagccaaaaagccgaatttttttgcatttaaaaataaagaatcaatggaaaattaattaattaatttaaaattagaaagaataaaataaaaattcgcctaatcggtcatccgaaattacgaacaaccctgatatcccaactcacaactgaagtcccagccggactcagccgcagatgcaatttcacgccaaactttcgccttttctcttggttcagttaagttttttaccaggtgcgtgtctctgcaccatgcctcaggacgcggcacctgaaaagttaattagccaattaacatcccattttatcgattttgcatttctaaattaattatcattgcttaatgctaacgttgctgtcggccctgtattggcaaagtttaatgggcttcttcttcacaacaacggtcactgatcgcttcgtctcccaaaattcgagttccttaaattgaagaagtgttaatttaaaaaagcaaatttatcggaccgtttcaatgatcggaagcatttccttgagaaattctttgtcttgggttgcctcgtaataatcgtaaaccatgctaataattatttaaaaatttattattaattatttgatgcttacgatgcgaagaagggtggttgggatcgcttgctgtagtaaattcggcctccgtttggcataaagccgaaacgtttgatcatcgaagcaatattctggcagatgttcttcacggatttcttcatccctgtgtttacagttgtttttttatttaaaaaaattaaatcagttaaattgtaatattttcgctgatcaacagcgattgaccgatcatttgtcagtaaggccatgaaaaggaggcaaattgccactccgatcacttgccggaagcgagaagtccgcgaatgatccaataggtgtcccagtagtaaaactcgcggaaacgaccacccggcaccacgaaggggttgggaacgtacaaaagcgaatgccttttgctgtctttcaactatggaaagaattttgaatataaaattggattttaggccaatggctcttttcaatgcttctcacctcatctggcatttttcttcccaattgcttccacagattgttcaaatccttggcccattccttcaaatctttgtctttgattttctcaaacgcgggcggattttccatccaatcttccgggtcatgtcttnaacaaattgcaaatttggaaaccgcatttggccaggatattagccaattaactcactgtttcagcactccctcggcttttccaaaatttttgcgcacaaatttcttcagttcgctcacttgggcctccgtcattgttttcactttaatttccgtccaatttgtcacgccaaaaatggcattgaattcctccacaattttctttgggtcgtttttcagtggacggtcagcaaattgcttcgaatcgccgttgaacagcacgccgtggtagttgaccgcctgtgattattaacggggggattccccgactcgatatccccgtcttgcgttccccgnaaactttttcccagaatcggtggattatgaatttatgaatttacattaaacat

SEQ ID NO: 11524 - DNA, 4312 bp, Heterodera glycines
  unsure (1)..(4312): unsure at all n locations
atcacaatctacggattcttttgtcgacctcaaaaggtggttggaaacgaacagacaaaacaaatgaatccctccaaatgccaagtcatttttaaaatgtctctcatttgtcagccaacagcgagtgccaagaacagtcttcgcccgccgtttcctcgggcagtgtgccgttgcgtttgttcctcggctttttggccggctccgtcgcctccgttgccaacattcctttcgacgtggccaaaagtcgcattcagggtaaagttgttggccaatttcgctgtgccaattcttttcgtttgttctcttttcccctcctttcccttctttaaggccctcagcccgtctccggccgcgtttaccacaaaacttggccaaccattcgcctcatttaccaccaagtgctttttgccaggcttttccccatttggccaatttaggagggtttccgcactttgtaccgcggtttggtgcccaaagtgatgcgactgggccccggcgggggcattatgctcgtcgttttcgagacggtatacgaatttttggcaaaacacaactgaccaacagagaacagaaccagcaaattgcgagcaattaatgccaaattaacagccaattaattagcaatcctttcgaaagttctcattttaatttgactgatttttgcctcgaaaatcacaattttttatttgattttctcaatgaattgacaaaataatgttaattctcaatttaccaattgcctttcttttgttttacaatgaattgtatctttcattttatattatctcttttaaaaatgttgaaaaattcaatcaaaattaatttgaatggaacgcaacagaaaaagggacaaaaagagggaaagacaaaaaaaagaattattggcgggagggattaatgtgagaaagtgaagtgaaaagggaatgaatgataaaaaaggaggaagacatttttggattggagcatattttcataatcaattatcaaattgatgagcggttttggcaaattaatgggttaattagtcattcgggacgtgaccgggtgatcggtggccattcaatgctttgttagggtcccctccctccgtcccctctcttttttgtctctgtccctccgccaccgtttccgtcttccgcggcaccgccggcgctgctgctgttcgagtcgaaactcccatctcaaaaaacaaatgatcaattatttggcttctgtgttcgttcgtttgtcctttgccattttcacttttcacttactgactcggggccaatggtccaacaaaagtcgcaatgctttggccgcgtgttgggcgttgagcagcgaattcgcaggattggaaagggacgcttttggggagacaaaaggcaaagaaacgggcggagaatttggaggaggggaggaagagcaaaaaagctgaaaaggacggggacaattgaaacgaattcaaagggaatggcataaattgngaaattaaacacggagaattttggcataccaaagggccgaaaacgacgctcagcttttgcgctgtcagtccgttgtgcggttcggaagcgagcaaagtgcggaaatgggccatcagaaaaaccaacgaattctgcaaaacatttgggataatgccaacgaactgcttgcaaaagtgcccttctcttctcactttgttcggcgtcgccaaacagtccacaattcgcatcaccaacttttggttttcctgaaaaacgaatgattgaatgagtcggcacaatgcttttcccgtttttgcctctttgtcgatagatggcatcacagaagcggcgtccaaaagcattgagtaaatgttaaagggcaccaaaggctcgggcagttcccgcagaaagtccttgaaatgcaatcattcgacactttccctgcacttttgcgcctcattttccatggcactttctctcaattcggcccattcccccccccccccccctcctctcccctcaccttcaccaaacatgtcaaaatgttcgggtcgggcaccggccgttcgccaatgtccgtctccgcgctgttcttctccaattgcattcgcaaaggcaacttccgttcagtggccccacaaactgaatccgaaatgccctcattgtcatctgttacatcccccgaaattagttggcacttacgaaagtaaaggccggcggtgtcgacgccgcgcctctccaattcggtcgccagtcgattcagtaccacggggactaaacagagaaagtgaacaactatccatccatccaccgaccaaaaccttcaacattttcgtgctccaccaaccaattcaacgaccgaccaaaaacgccgctgcaatcggcggaagggcgacgaattcggcaaaaagagtgggccaagtcggaaaaagcgacctttgctcggaagggcaaagtcatttcatttggggactgatcagtgatcgaacggaagcaccttcaacagaagctgaccccgggactccaattggagagtgaacatccgatcggtgccgaacccttccaccagaaaagcgtccatcagacgaatgtcgcccttgtggcagaaacgatgcctaagggaacaaacaaacaaaatgccattaattaattaattagctagctaattagttaagaaaccaatgaacattatttgcaaattgcacttgtttattgttagctccaaaaaaactcaccgaagtttgggatgccaagcgtaaatgaagaaggacgcgttggttgcgttcagaatatcaatgtcaaattgttcggcccatctgaaaaaacataaaaacgattaaccaaagttaaacaaatttgggaagagcatcggttggctgtcacctgaagtgctgttcgggcgttgaaatgcccgtccgcgccctgtgctgctcgtccacctccaacacgcagtacaactgcttggagtggacgcggtccggcactttcaaattgcgaccctcgacgatcttaaagaagcgaacgaaggaaaatatttaatttatttgtcatgcagatgtcaaaagaatctgatcaaatcagattgacatttggaatgccgaaaaatgtccattttggccactgaccgtaacactgagaattccgctcaacgaattggccacgctcaatccgtccacgtcgaagccgggcccagcagtacgcaaagggacgcggcgattggtcaatggagagacgtggagacggtccaaaatgtcctaagggaaggtagataaagccgagttcggatttaatgggaaaataaaatgctgccctttcgccccaaaggcttcatcttcccccccccccaaattggccaatgtttggcactgcttggccaccttgcccatgccgtaccgccttttccgcggggctcatccgttccgcccttgaaaatgggttttgtgccgattgttcgaaattgttttgggcgtgtcccatgaaatgcttaaacatgatcagactcggttaattcttggtttttgatgtacattcacattgtccatgagaatggctttcggcgggagtgagtttgacctcgtctgtgcccccattcggcccgccgttcccgtccaccgcgtccgacgacgccctcccgcgaaatgatcgcgactgacgtcatcctcgtcctaattacccactttgaaatgattttgttccttatgtgtgctttggtccaacttcgctcgcccaatttcgatattctttggccgagaaaatgtccgccaccgttcgtcccgtgccgcccaccaccgccccgttgncacatcgaaggcacagtccgtcctatttttgtactcaaacaaatccaaaaatgattccctctcctcactttgtcgtccgacttcgatgtcggaaaaggcaccgcccgacggaagcgaaggaacgcgcggattggcgtagaaaggcagcgaagcggcgggggcattcgacggacgggcgaaggacgccgacgggacaatgtcggcacgccctgcgggaaattgaaaaagtttaacggaattggaaaaaattggggtaatattggcagaaagagggcaaaatgaagggaatatgcgcttacagcgaatgtttgcggaattaagcggagcaaatgagtcgggttggatctttctgaagagaaaggagcaaattgaagggtgagtccatgcgaatgttcttcacctcctcggcaatgaattgcttttcgattgggcccacccaaaaggcgccgtttcgttttgagccaacggaaagggccgaagcattgagagactgaacaaagagatgatcgtagtcaaaagcacaggtgatgaggggaattacggtgcattttgttgggtgaaatgcga

SEQ ID NO: 11525 - DNA, 1284 bp, Heterodera glycines
atattacaattatttccctctcttaaccaaatttaacactaccatttttttcacaaactcttcactacaattcacccaaatgttttaagaactctttgattgtatacaacagaagtcggtaatagtgtactttgtacctccccccttttttttgaaaaagaaaattttcaaaaaaaattttcgaaacaaagttgttttatgggttttcagggtcggagaatcagattctgatatctatttaaatgactttttttaaatatatgaaacgaagttaaagtcattagtagggtttgtaattatatgcacatgcatatttttttcctggaacgtgggaggtctgaaatgcacgaaaaacatgtttttagcttgttttgaagcttctaggatgactttccatatgcatatttgtgcatattttggcatttcgtgcatattttggcatttttccaaaaaacctctaatagaacggccccaaacagacaaattggcttgaattttcgactttttgttcgaattcgggtccgggattcggaattgggcaaattcgagtgatccccattctttacgattgccatttttaaaagttgttttagtatttctaaattttccagtaaccctgcagaaacccgggaaggtgttttgacgaaatcaacccactcacaacacataaagaattagtttattcatatatgtaggaaatgtacaatagtgcgtcgcaataacatacaaaatacacagagaggcaactcagggccaagtgatatatgcatatacaattatacatggaggcaacttgggccaaatgatttacaaacatcctcttttaatacaacaggcagcacagttcgttcttcggaggtgtgcacgaatcgccatcccattcgttcctcattcctgcgcgtcgcggtatctccaggcgtcggtcggcgtaccagtcccaacgcgttgaaaatggcgcggcctccactggggtctccgttgttctttgcgtcgcctgtcctcgtcccgctggtgttgctcgatgaagcgcttgactgaaaaacaaggggaaaactaattaattcataattccaaattcctccctcccctcccaccttggttcgccatttttgtgtcgttgaagtacagagcagcggtgagatgacgccacaattttcggctttcgttgttcttctggtccagcaccttgacacattcctgtggaaattagaaattggtgcattgaaattcatttttatttgggcattttctcacctttgtcacgtcgcacttcgcccgcacatt

SEQ ID NO: 11526 - DNA, 1183 bp, Heterodera glycines
gacgtaaaaggcggagatgggcggatgatggctgacttgctcgccgatgaacgtcatctgaaacgtgggaacaaatgttagatttctcaatgagtgacgaggctatcacttaaactggacctggttggttgctgagcccgggaacggtccaccggcggttcggcttgcggacaacggcacgccaggcagggtccaacggcaacggaacacttcgcctaggatcggattgtacggcttcttcgcgtcgtcggttttgcgtgcagggtagaaggagttcaagtagtatttgaggacggcaaggaatctgaaaaattgttgattcaaaagcgttgtcgtcaaccaatcgggaataaacaccgcttctcagccgtgttctcgtaggcgccggcgatcagttcatcaggatgagctgaaatgaggtaagattgaacttggaaaaatttaaaaaagctgtgttcaccgaagaagtcggcgtacatttcgaggagagagcgtcgttccagcacgaaggtgggcagcgccaaattctgcagagtctgaccggtgccgagctgaaaagagaatttctattaaaacaattcatcgaacaacgcgtcgtctacctggcccactaaatgtctgaacacgccggcctgctcgctgttccagttgtcccgttcgtccgagttgttgtagatgtagtcgtagtcggttccgttggtgtcgtagttgccccaatctggcgcttgcattttgaaatccgctgccgctaaaaattgaaggggaaaggaaatcattagaattgatttgaagactatgaacaaaaacaactaaaaaaaagaagaaaaattttaagaaaagaaattgtggaggtggagaagagaaatcaacacttttatacagaaaatccgactgaactcagtgtttctctattaacagagacaaaaaaaaatagtacgccaaaatgggagatgtatttttctctgcactctctttttattgacacatgtctcgttttttgagtcggtgtgtttatgtgattgacaaaaaaaatatttgtaagagttatgggcgaaaacggtttgccgggctaaaacgacgccctactaaaacaacttaaactgagccggtccgaaactgtacaagtaccaaagtcgtcgtttttatgactttttaatttatatttcttttagaaacaaaaaaa

SEQ ID NO: 11527 - DNA, 2002 bp, Heterodera glycines
agattttgtaaaatcactgattttatctttgatttttcatcaagtacttgatttttttcgaaaactttaaaaaaattaatcaggcgtaaaaaactcatatagaaatttgtagagctgaaaaagagctttcgaatgagctattgaatgtttggagaagttaagtttttaattttttgcgattttttaaaatttaattactggccattacgggtcatgtgagatggggtctcgggttcgagcctgcttggcagcagtttatttttttgtgagaattgatgaaaaatcatagacaaaatgatggtttttgcaaaatctgagttcatattcgtgattagaacatttttagacacaaattcttgtaaagaaaatttaaaaaattttgaaaaaaatcaagtacttgatgaaaaatcaaagataaaaatcagtgattttataaaatctgagctcagatttgtaatcagcacattttttcaccccaggagaaaccaaaagaaaatttttaagtttattttccgtcgggaccgcaattctacacctttgccggggggcgggaccccagctgcactattaacctgaactgattttacttatatcagtttaaatataatttacaacaaatttaaaggataaatatgacaaaatcggatgtgagcactggaatggttcttttaaccggcaattcacacccagagttggcccgtcttacatcagagttggctttttgatttcttaattgaaaaccacttccctttcagccgtcttggaattgctcttggtgatacaacaatttacaacaaacctaacaaaggtattagccttacaaaaagcacaaaagaattttagcaaatagtaaaggtattcagaaaaaacttaaaaattttgactttttcgcaattttcatgttgagtcgccgaagcgatacagacccatgttgattctgccatttttttttcaattttgccaaaaaaaaacctaatcttaaatttagaaacttcggtggatatcagacagagtgtgcgtggaaagcatgtgtttatcttgcagtcctctaataagttggcactttttcatttcttttcaatttaaagttcagaaatgtcaacaactgtgtcatggaaatgcttattttgatttatgcatgcaaaacttcgatggcaaagtttccctctttttaaaacatttttttttgttaaaattcagatcaattaccgtcataatgccgtatatgccctacagcaagcagtgccgaatgtttcgtcggtcgtcagtgccaatgaaacttgtcgctgatatggtctgcaaagctggtaagaatttaccaacaatttttaaaatgttttaaatttccataaactattttatcctaaggagcgtctcgaattgtttcacttgacttataccgcaaggaaattcaaggcttttttagcattcctgtggataatcttcgcgcgtctccttttttgcttcaatacatgaaatacaatgtttgttggggcctgggccaaaattttgagtattctaaacattagctgattgagagttaaaattctgggtttttgggatagagcatggcatgacgtttcgatactaagagtccattccctactcggcttctattggaaagcattttaactttttgttttcctttttattagattcccgactacaaaaatgcggtaattgttgctaaaacgcccggagtcatgaacaaagcgacatcatacagcgagagactgagaattggcatgatatgacgtcatctgttttcatttgttttttcgtttttaaaggcattgctgtaattcacggtgaggagaaaactgacgagggagtccaggaggatggacggcaaagtccgccgccatcgccgacggacaaacgaaaaggcgtttcatacgaactttttccatgtgagtttaagagactggtgaagttctgtaatattttgcttaactaaaaatttttttgcttgcccattaggttttttctgcgtttatctatt

SEQ ID NO: 11528 - DNA, 5247 bp, Heterodera glycines
atgacattaatttgggcttattaatcaactttggcgatagttataaaatgatagcttttgaattttatcaaaaaccataggggggacccttttgttttgtaaatttttttttggataaaaatcgtgaatatacattttattcaccataattgtgctgttaatacttaatattcatcattatgtgtaaaaaaaacaaaaaaaaattttgaccaaaaaaaagttgaaaaaattttcaaaatggacctctttttaagtagcgccggaattttttttgaaggtttttgccaaccaaattggataatcttggtatctttcgaaagctcttgataatgagttgttccaaatttgtttctctatcgatatgcaaaatttggtgcgtatttaatgtgcaggaaaaaagttaaacgtcacgaagtgaatgttgtttttcctaataatgaaaatagtagatagtacgccaaaaggagacaaaaaattagagaaaaaaagataatgtttttctctggcactctctatttattggtacacatctcgttttttcggacggtgtgtccataaacttaaaagtagggttcggacaaacccccgtcttcgggggcgagacatttggtcacccccgcgactctgacccccgcccccgcgaaaagtcacccccgcccacggggtccgaaccctaatttaaatgcaacagaaggcatatacacaaaacgactgaccattatttaaaataaacatcgctagtaacaacacatttttacacggagacggattctacaaaaattttcacacaaaaaaagaggcaaagaaaatcgctatttgttttttgtcattttgatcactcattccgctgatcacttctaatatcattgcgcagctttggcggcggcggccaattgctgggcttcgatatgaggcggcggaattgggaaaaactcttttgcatagtccgcatcacctgaagcagatttaggttaagttttaaaattatggtacagatagttgcgcgcgggtgcaagcgtgaacaattgttagagaaggaagtaattattgattaggtgtatgaccccacgccacttcgccatcttcaccctcccattcccctcattcagttattgtgcccaccaatttgacctctccaatttatttctgcatttttatttatttatttcttcggcaaataaacttatttaatttgttatcttcggacataacaaattttggcgcagtcagcaattaactgcacatcaccggcaaagcaacaattcaagctttatctcgtgctgatattgctcgtgttgaaaattagaaatctcgtgttgatttctaattttcgcagatcaaaaaaaaaaacaaaacttttctctccgtgtaagattaaagtctgccgtgtgcagtttttcttcaattggaccatggacgcgcaacagcttcaacaattgctaaatgctctccagcaaatggtcacaaatgccgcaccgcaaaacgccacaccagcaaatttgagcaatgccaatttggcaagctccatcgatgctcgcctttcagcgttccattacaatccggaggtcggcacaacttttgaatgctggttcaaacggtacggaaaattgatcgaggacgacggaagcactctgcctgaggcctcaaaagtgcgactccttctcggcaaacttggagaggaggagtacaacaaataccgggacacgatcagccccacacagccggaccaagtgaattggaatgacaccatttcgcacctcaaaagcctttttgctgaaacccgctcgctgttcgtccgtcgctacgagtgtttcaaaattcgacagcaacaaggacaagatgtttcatcactaattgcgcagatcaacgcatcatgtgaaaatgccgatctgagtctgacaaaggaacaactcaagtgcattattttgatcatcgcgctcaacgatgaacatcacgatttgcgacaaaaggcactgaaaatgttggaggacgctcagaaaaatggcaccaacatttcactcaagaaaattgaggaggagttaagggcaattcaacttgtcaaagagagcgcactttcgctggtcaacccgccaattgccaccaacgccattaacacaaggccgcggcaatggaccgacccagcgcaaagacaaagtggctccaatcaacggcaacatcacaatgcaaattcaaatggaaagcaaacacgtggtcgcccaacgcttccgtgtgcatcatgtggcaaatccgaccattggcgctccgattgctcattcaaggacgccatttgcctcaagtgcaacaaaaaagggcacatttcaacaatttgccgtcaaaaaaaagcaaagtcggcaccgaacaacaatcggtcattccacacagtcaaagtggacactcattgcctgcatattagcactactcaaggccgatggtggaaattaatcattttgattaatggaaggcaaacttccatgaatggcgacacctgcgctcaagccacagtcatttctttgcaaacatggcgagagttgggagaaccgaatttgactccatccgacatcgatgccaaaaactgcaatgatcagccattcgccttgcttggcaaattccaatgcaccgtccaattttccgacaaaccaccgcaaactctgatcgtctatgtgagcggagaagtcggacacaatttattgggattgccgtggatcgaagcttttgagataattccccgccaaattttatttccgaccaacaaaacggctgatcaggcgacaaaaatgatcgacaatttttcgacagtgaaaccgccaaacaaatcgatcaatgatgtggcgtcacttacagcggcacttcaaagtgatttctcggaagtttttgatcgcgttcttcaaattggcgcaattaagccaatcgatttcagtcattgggcagcgcctatcttagccgtaaaaaagaacggcaaaacgagagtctgcattgacttctcaactggcctcaacaacgcactggaattgaaccgccatccattgccaaggccggacgacatttacgcctcactgaatggcgcaaaattgttctcaaatttgaatttgcgcgatgcatagttgcaaatggatgaagaatccaagcaattgtggccatcaacacacatcgcggacttttccaatgccaacgcctgccattcggagtcaattcagcaccagcaatatttcagcatttgatggaccaaatttgtgctggtgtccctggagttttcgcgtacctcgacgatggattaatcgcgaccaaaaccctggatcaacacatcacgacactttacacaatttttggacgcataaaagaatatggtcttctcatccaactggacaaatgcatttgcagaccgaacttttgttcctttggcatattgtgtcagcaaatggcattcgtccatgcccatcgcgttcagacgcaattcggaaaatgcccgcaccaattgacaaaaacaccctccgatcgttcttgggagctttgaattatcatggaagatttgtgaaatgcatgcgcgaattgcgtgcaccgctcgacaaactcctccaaaatgacgtaatttggaattgaacgtccggccaacaaaatgcttttgaaaaagcaaagcaaatgatgatgtctgatttttgctgactcactacgtcccggcacgcacaatcgtcgtatcagcagattcgtccaaggatggcattggcgccacattaagccacacattccccgacaaaaaggaaaaagtggtggaacacgcagcgtgcactctgacagcagcgcagtaaaattacagtcaaattgaaaaagaggcattggattttggcaaattatgactttgaaattcgctcgtcaacaccacatcatttggccaagccgacgttctgtcacggcttatcgctaattatccacgtccagaggaggacatcctgatagcaaacacttgtgccgacaaagattgctatatcaattatgtttttgaaaacagaaaatggatcaactcccagtgacaacaaccttaatcactgcagcaatggtctatgatcaaccacttcaaacggttcttcaatttctaagaaacggatggcctgccaaagtcgtggattccgaaatcagtccatattttccaaaaaagggacaaaattttggaagtcgacaattgtctactgtatgaggacagagtgatcgtcccaacatcgcttcgcagtctcatcctaaaggcattgcacatcgcacacccaggcattgtgctcatgaaggcacttgctcgtcgccacgtgtattggccgggaatggactcagcgaatgaaaaagttgtgaacacatgcgaagagtggcaatcgggccagaaaaatccaacaaaagcacctctatcggcatgccaacaacggacatagttgtacataaagaatattgaaaataacaatttttaaattgatattatttcagttaataattttttaattatataaatattaaaatataaagtgcaaattctgtcttctcatatgctattgcaaaagaaaaaatgttatgagtatagcaaaaaattgaaaattaaaatagccaatattttcctaaaatttatggtcctgctcaattctaattcgaactttttattgtatacataaaactcatcaaaaaatagctaacaaaatcaaataaaaaaatatgataaattggagactgaatcaattattcaaagtccaaagtttcaagtgcctaattattttttaaaaaagcaaaataaactagcagtgaacttcaaaaaaattcaaatggtatagtaaattatattataatatagagagaaatttgaaccaaacaaagaaaagaaaattcgtagttccagaatctcactaataaaaccatttattaaaaagaataaaaattaaaaaaaaattaatacaataagaaaaaataatataatcaaaccaaactatttttgcaaataaacataataaaaaaattttatatctgaaaaagtttgaaaaatgacaaaaagtttgtgtatacaatagtacaaacgaataattgtataaggaatataattctaaaacccttactagaatttactagctaaaatggcaaaatatgcatgaaatatatgcatacaaatccaaaatatgcaaataaaagtcccgatttttatacgcaaacacaaaaaagaaagtattttcctactatttatagcatggagaagctaggaaaaaattatgcatttgcatattt

SEQ ID NO: 11529 - DNA, 1910 bp, Heterodera glycines
  unsure (1)..(1910): unsure at all n locations
tcgtnggtgagtcgatcccaaaaaaaaaactcagtgattgattggtcattttccggaagccgatcacaccactttcggggcaccaaaagtgcctgatccggaatccgtaccggcccggttaagaacaattttttgttcagtatttcaagggctatatcccaggccggtccggttcttgatccattcacttggagcccttcatgggtcgggcacatatgccggaggaccctcagcctcgcccccgaccctatcggtggccaacccaagctaagcgtgccggtaccagcggcttttttgtacagctcgatgagctctacaaaatggtatcaatggcgtccggctgtgtctactacaaatggagaaaattggcgagaagtgacgtgaaaaattgaaaaattaaaaaaatttgaaaatgacttgcgtcccgccgtacattagggttaaccggacggcaccgtgattttgtgaattgaataattaatttatttatttaattttatcaatcactgagtttttttttggattgacctagcaccgcatttgtcatttaggtttaaaaacggagacgaagcaatcgcatttttcaacgtcgacgcggtgtaccttaagcatgaacaccaaagggatgcgtacgattttcgggtgattcctccattttcccctccatcccaaatattcttttcgctttccttaattaattaagcatctccaagtcggacttagccgtcgcttcagggcactaaaaatttggtttgtgtttcgtgcgattggcattcagcgaattcaacaatttttgagaatggtgcgtcaaattgggaaagtcaaatttgcaacattttgcccattaattagcaaaacgaattggccaaaatgttcgccgatcttttgctcagagacgaccgtttcgagctgttcgtcccccagcgtttgggcttagtctgctttcggatgaaggtaatctttacaaaggaatcactctaagtgatcgcaatttgctaatgccattcccaatgccattgtcgggcaaaaagtgccgtggtagtttactgtatgtctagtgataaccctgccgtggttactgtaggacccacagttttttatcgtagctttgttcattgtcccttatgttgagactagcaatgaactgaacgagtcgctttatttggccattaacgacgatcgacgcgttcatttggtcgcttcattcactcactgcacttttttcctccgtttcgtcgtttgcagttcaaagacacgcgaaacgaacatcgaaaaagcggtcgaagtgatcagagaaatggctgacaaagtgacgacggtggaaaaagcaaacgaagcgacggaaagggacaaagcggcgaaagcattggcggacgatggaacggaagaaagtggcacactccgacggacaaatgggtgacaacggcacaaatgaaatgccatgaattaaagggttgattaattggagcttcataattctgccccataaattgatcacttaattttgttgtcttgcatttgatcaaatccctttaaaatatgaaaagaattttgttgttgaaaggattgttgggaattagacaccaaaaacaaacttttaatttttacaaacttttaatttttaatctcttagttgagagagagagagagagagagagtttgtaaggcagacactcttaacattttccaaattttgtgaatattctggaatttttagtaattcttatgaacagtgaggacaaacgacaaatttacggaagattttgtcagttatgatggtgctatgtcgttagtcaaaaaccatcaaaatgggcgttagtcaaaaaaccatcaaaatgaaaaatatcgatttttgggcgttagtaaaaaaaaaccatcaaaatgggcgttagtcaaaaaaccatcaaaat

SEQ ID NO: 11530 - DNA, 1916 bp, Heterodera glycines
  unsure (1)..(1916): unsure at all n locations
tctagagtccaacaaaacaaaaccaaaatatttacgcactattattacntcgactaggttttttataaagttatttaaattttatttaaattcaacaacagataatttttaaatccaacaaagttaaattgtatttaaatttttttcaattcaacaaagagaaatcctaaagttgtcttttttgacagcgtagtacagaaacatttcgatttggccggtccgcgtgtgcctcttccgagttccttcgtgatctaaaaatttttctgtactaatttagctttttttaaataacctatgaaacaaatctcatcaagatttggcattttccaaatctccccaatctttttgaagaatttttaattatttttatttaactgacatcttccatttttggttttgttttgttgatgatagtttggcattaattaataatcagtgcggcaaatattttggaagtggttggcattaattgagtgttgcatgcatataggccataatcgtatagtgtataattattttgatggttttttgactaacgcccattttgatggttttttgactaacgcccaaaaatcgatatttttcattttgatgggttttttgactaacgtcccgtcaccgtctatgatggacgacaattcacacgacagagacaagcgacataattttttgtagtaacgactattcggacacaactgccaaatttgtcgttcgtaattgtgattagcccgtgatcctgcggatttaatccggcaaaatccgcaatttccaaaaaaagcaggattgtcgagtgggatcccgcaaaatcgcgcgcgggatcccgtcctccgtcgggctctaatggaattagcattaggtattttttagaagtgaatttttgtagattgtgtatattttttgcgagacatataatttaaaactttttcagatagtttattacagtgtctttacagtaccgtttatatgcaaaactaaagccatttgtatgtaaattgataaacacaaattagacggattaattttggttaatttttcggacattcattcattttttcacaaatcttctcccagtgtgacaatttcgttgatcaaaaagtccaaatcgatctcctaaattagtttttttataattttcaatccatttattagtattaaattgatttactcgaattgccgggtttgagatgatcattcggaagaagttcggacgttgtttgtcaggttggtagccaacctaagaaaatcatgaaggattattatcacgaattcgattctttcatgaaaactaatccaaaatgaacaatgaagagtttgacattttgaaacaaaaatggacctattactagagaggatgaggctctaacaataagatgaattcttccaaagttttgaaaaagggtccggcggaacaaatttttgaaaatttttaagcattgggggctgtctgggaaaaaatttagttaattacaattttggagcaatagttgagactttgaaaattttcttaacaaaattcattaaaaatccccaaaaaaaattttcccggcggcgcctgtcggcaccttcggcccccccaaaactcttaatttcttttaaaaaatagactcataatcacaaaaattggtcattttggacaaatctgttaacaaagaagaactaaattttaaaaattttcccgacggcgcctgttgatgccgccgggccactctgttctcccaaagtaacgaatacgaaacgaaaatttaatttaaaaattttatgaatgtttcaaccgttgttgtgccacgttccatcgttcgagctttgatttttggtgccacctttaaagaaaattattaaataaaaaataaataaataatcgttttttaccttcgcgggggcgcgccgtcttttctttgttgtcaatttgtttacgt

SEQ ID NO: 11531 - DNA, 1535 bp, Heterodera glycines
  unsure (1)..(1535): unsure at all n locations
ttacacttgaaaagactattttagtggaaatttttgacatcttctctatttttttaatatttttttgaagagacggtttccaaacctccggagcatattccaataaaggcctaatataagttttatataaggtaatccaaattttagaagatttagatttaattattctaaacaaggaacgctacataaataggcattcctcgttatttggttaaacatgatcggaaaattgtaatttattatcaatatttattcctaagtccctaattgtatccacagcatttattgtattcccatcacatttataagtttcttttgggttttttgaacccaaatataatacaaaagttttttgaattgaaacctttatttgcccattcgaataagttatgcaatgctttatgcataatttccgtttcagtttttgctttataacaaatatattttaacatcatcagcatataatttaatattcactcctgatggtatgacatcaggaaggtcgttaatatatataaggaataataaaggacccaggacagagccctgggggacaccagagcaaacttttttaacagaggataaagaatcccctattttaacgctaaaagcctgttaattaaaaatgcttttatccaatttagcaatttaccccgtataccaattttttccaacttatataaaagcaaattatgaggtaccgagtcaaatgcttttttaaagtcaatataaatacagtcaacttttttttccattaataattgcttcataccaatcttcgacaactgttattaattgattcgttgttgacctatttctaataaaaccaaattgggactctgaaattttattattttttaatagaaaattgtaaatatttttgctgaaaattctttccataactctgcatagtgagcaggttaaagaaataggcctataattttcaggattgaatttatccccttttttaaaaagaggaaagacaattgattccttccaaattatttcaaagggattgacattgtgtttttgaatgtatttaaaaatagaattttttccctttgaaatagccttatattcaattgatgccaataaatgttgtggatactttggagataagtctttttttagtaatttttttactggaatacactcattcaaggcattcaacaaagcgctattgaatgcacagtatttttcatttattattcacaattttaaaaataaaattttttttcaaaaaggggggcaaccatcagcagtattaccataagctgttgttgaggctttcagcaagtctaagaaataaataactaaagtaaatacaaattattttgtttttgctttttaattttttttttttttggcttgataggccgaaacacaatttgtgcatttattaattttggaagagccgtactgtcgagtagagcccgttctagacgggatcctgcgcgggattttgcgggatttatacatgcgggatcccgccctgcaaaatttttgagtatcaatccgcagcgngacccgcaaat

SEQ ID NO: 11532 - DNA, 3284 bp, Heterodera glycines
  unsure (1)..(3284): unsure at all n locations
gtttgttattagagcccggcgcgggattttgcgggatcccagtccacaatccctcattttttgggaaatgcgggatttgcgggatttatacctgtgggatcccgtcccgcaaaattttgagttcaaatcccgcagcgggatccgcaaatctgacttttttgcgggattctgcgggatttcttgatttttaaaaattttaatgtacagaatgccaaatattttagaataaacttaataataaattcaatcaaattcaaaccatttttcatctaaagaaaatttattttaccttaatttaagctactatgagtcacccaatttttaaatcggtctttttaaacgaattcccgaaaattcggttgaatgtttgtagtgtaaagataaaaacgccagtaattttgctctaaaattatcacattggaacatcagtttattgtctctatgaatttttaaaatttacttttaaattttttcgaaatttacaaaatcccgcaatcccgcgcgggatcccgcaaattttaattgcgggatttatacatgcgggatcccgtcccgcaaaaatgttcagttccagtcccgcaacgggatccgcaaattcgaaatttccgggctctagttgggagcggtggggtcgatttagtcggatcggtttagtcctgtatttttaggtttttaaggcaaataaatactgagatgataacacaatttttaaagaagttcagaatctttttacattgtattcatagctattttttgtaaaatcaaagaaaaaaaagtttaaatccaattgcgtttattcaaagacaaattgttcttcagcatcgctttcttcgtctgtctcccgccggtctccaatttctcgttgttcttcacgttcctgaggtatgggaattttatttggaacccaattttcaccaaactgacccgcttcatttcgtcgagttttcctgtgtcgagaagccaatttgagacaaaagagagttccagcaattgacgcatttaatcttcaccaggcattgtcttccacagctgttccaaccgtctccacaccgaatgcaataatgcttcatctaaaaaaaatttacctataattttcaagtatttttatgaccctgctcgtccaaaaacgccaaaaattgatgtgtttggcgaacgacacgaaataattgaacagcaagtggacctttggcttctatgttgcggacctgctgtgaagagagatgatcgcttgttcctgctggacggacacgcacatggcgcctgatcggagtggtcgacaatggccttgggcttgaaagtggaccttaatcaaacttaccataaaaagggtgcttcataacttacgaaggccactagtcgatgatggtggtccactttcggcttcctcagtcgatgttcccggtgaatttcatcttctccaccaattttcttcactaattttcactcaaataggtaaatatgatcaacaatatatagcaattagtttttgcatggacaaaaaatttttttcgcgtggccgttttcgcgtgggccgttttcgcgtggccgttttcgcgtagccgttttaacgtggccgttttcgcgtggccgttttaacatggccgttttaacgtggccgttttcgcgtggccgttttcgcgtgggccgttttcgcgtggccgttttaacgtggccgttttcgcgtggccgttttaacgtggccgttttcgcgtggccgttttcgcgtgggccgttttcgcgtggttgcatataagagaattcttaactctgttatatttttccaaaatttgttcactctatttagcttcgggtgcttaattcaatctatatttacagtcattagccgtaggataaataatgatttatccttattatattgttttttgcaacgattgtttttcgcgttaatttaaaatattttgatgcttcatttaatttttcctttttattgttgtcttcgtgttctctcaagttttttatatattttttgtgtttttgaatcattgtaataaaactacaaaaatttggtgcttttctccgtggactgtcatccaacaacaacaaacgcccaaaggcttaattggtactgttgtttgagtttctaattgcaattcaccttattctctaattccttgccagtaaagtggtgttgaaaattaagtaaatctttccttgaccccaaaatctcaacccgaaccccagcaaatcccaaagtccctccccgaatatacgccctttctccaacgtggcgctcctgcaaaagcgacgtaaaatccaacctttcgacgccgaattgcaaaccgattttgtgcaggcgacatttgaaatttggtcaacaccaattttggaggatttttgttttgaattttttctttctccttttcatttcaaagtttagaaatgtatggagtcaaccggttttcagcaaagatataatttccgagtgcgccggccgattaattacatggaacaagaggaatcgtcgcattctcgccacagccgacgaaatggcactgaacaaaacaatggtttgaatttggcccctcaaaacattttggacaatgtgcaaaacccaaatccatttccgcgaaatttcgaaaacagtatccctcagcaagtgggagtgcaacaaaatgtcgaagaacaaatgcagctcgcaatgttccgacctcccaaccaaaatgctgcccaaagtttcggaaattcccgggctcattcaacccctcaaaatgtttcaccgcatatttcgtacaatggccaacaagaaaatttcgaacaaaaccaaaatcggaatccggatgcgaaccgatatggaaatcaccgccgccaaaatccccgaattttcgttaactcgcaaatggcgaacaaccatcagttttctgcacgaaattcccaaaattttgtaccaaatcagggaataagggcacaaccggttcggaatgctcataatcccgggtatggagaattaattggtgagcaaaatcgaaatgttcataatccaaattatggtcgagaaattgggatgaattaccccattcaaaatgtacgagattttggaaacggtccaaattttccaaattataatccggttcggaatatgaatncacaaaattatcagcaacaaccgaatccgaattntgaaaatatggcancccagcccaatcaattccaaccgttttttgcagaccgatttccgaatgctcnaaatttcgagtttgtccctcagcaaaatttccaacaaaatcaaattctgatattgtaatggaattacataaaagtactct

SEQ ID NO: 11533 - DNA, 4949 bp, Heterodera glycines
ttcacatcaatggaaaacaaatacaccgatttcgaagctaatggagatgcacatattctgtctcattagaaacatatacatgcatttgttaggtaaatttcaatatcatcataacatatagccaattatatgtcaaactagaatatatatttggtgaatttgctgtcgaaagagctaggtattttaggttagcaggcgagatattcaataggcgaaatgtccagtaggcgaagtgtcagtaggcgagatgtccagtaggcgaaacgtacgcacaccctttttgaaattttgcatgctaatagaaaacaactagagctattgaatgatataaagaagtaaaaatttggttgattttaagtaaagatattgaaaaaaattgctacaattgatggttttttgaccaacatcatagcaccgaccgaagaaacggcgagcagaaaaagggaatggcacagtgaattggaatggaacgcaacagaggagaggaggaccactaaagagaatatttttcaaaattatgaccatttgccgggcgttttaccttatccccccacccacaaatcaatcaatcaaataatcaattggacggatagagagagggaaaggatgaaaatagcattggggaaggaggagagacggaagagaaagagaggaaaaggaaaaattcgaagcaagaaggagggggagaaagaggaggaaaaggatgaaaatagcagtggggaaggaggagaaagagagagagagagaaaaaggaaaaattcgaagcaagatttttgccatttttatacgtccgatttatttaccaatttagacattattcatcaaaaaaggcatttgatcactgatgattatgaccggtcggtcattacttaattaattcatttcttcttctactgaccactgtttttgttcgtttgtccctcactcatttcgccctttgtgatgctttgtcccgcttcttcgtcttcacttgctggtggtggcggagacaaaggcctaaattaagcgcaaaattcaaattcggataaaaatcaaatgtttttaaattgctcacccgatgcaattagtgccactaaaaagccaaaagaacacattgttacaattgttgtcccaatttccgtctttccaattgaccgctgccgtctctccaattttgcagcgtttcattatccaacttttgtccaattcattttcatttgctttggccaatgtcagcttttcctttgtgcattcgttcaccaattcaaatggcaccatttccattgatggcacatgaacagaaaaatgaatttggtaactgacggaagaaatggcattggcacggagaaaatgctaaacaatttgaaaacaaaaatcagtgatttttcgagattatggccacacctccttgaaattgttgatccattcaaagttcccttgccaacaacgcaatcgcttgggttggccatcttttctcggagagtgcaaccatttggacaatgcttggccagcagaaattgttagacgcaaattgttttgctaaaaacggccaaaatatggactgaaaatgcaaaaatcgcgaaatatggatttattcccgaaaacccccaaaatatggatttatatggactaaaaactttcttcaaatcaaaaaattttaacgtagaaatgctatttttgagcccctttcttcatagcatatgcgcagaaaaaatatgcaaaagcatataatttataaccctaatgattattcatactacatttagttattttcgagatttttatgcttcaatttaacaaatttgaagaatttgtgaaaattttgcccccaatttggaaaaatttatgtgcatatttttcacttttatgcgcatagtttaagattttatgtgcatttaattaccagccctagtaatatcatgattcattttcagatttttatttaaaattttcttattttaaaaacaaagttgtgtcaaaatgtttccatcccttccatttttggcaataatttttcgtctcccattggcacattgtctaacccatcggtccattttcgtgccttttttcaatttttgatgcctattatatgtaaatagtccttttttcgcgattttttggtgcctttttagtcgtgtctacaaataactcattgaattaataatcaattcgaccagttcacgggaagcggttaaattctgaaaatggggtgtgtcctgattttaatgacaagcactgtactgttattggaactataaattgcgtatgaaaaacttcacaccctgaatttttctttttaattgatacataccagggatggcattccgaggccctaaaaattttcgaaaatcggaattccaaccccaaaaatgtcggaattccgtgccatccctggtacatacccatgggatgcatcgagaaagagagagaaaatttatattttaacggaaaacaacaacaaatcagagagtaaaaacgagcataaaaaatggtcagatcactcttattcatcaccataattcaaaatgatcgaacatttctcaaatgcattaaatcaccttcaaataattggacaccatttgcgacgtggcgacaaaggcctaaaaattcggcacaattttttaaacaaaatcaaatgcttttttgttgctcacccaatgccagcttcgacgtaataatgaaactcgacagtgctaaatccgtccaaattttgggctgcccattgaaccgccgccgtctcccaatattggcaccgtttcattacccagcggtcttcccaaacatttgcgcttgctttgatcagtgtcagcttttccttggtctgttcgttcgctaattcaaatggcacaatttgcgttgacggttgctgaacagtaaattgaatttggtagctgaccgaagaaatggcattggcacggagaaaatgctaaacaatgggaaaacggacggacattaattaaatgcaaacgaaatcagttggctaacgaaaatatggccacacctttttgagagtgttggcccattccatatttggtggctccttcaaaaagaaatgcaattgcttcggcatgccatcttttctcggactgtgcaaccattttgacaacatttggccagcagaaattgttgcatttggcccatcaaaatcatcatcaacagtcgcatcgggcaacaaatcaccggaatagattgaattcaattggtcgagatcggtgagaattgaaggcgaagtgagacgacgcaatttgtcaaaaaggatgccattgcaaacgcccaagtggcgaatgtttgccgaaaaaattggccaaatttcacgcataataacaccccaaactggctgctcatctgctgttgcaaacggaacagtcaagcgcaaattggtgactttgttccacacggcgattcaattttgggctccaagtacaattaccgtatttgctctttttatatgccagtctccattagtctgccagtctccaattatatacccccttctgagaaggttgaaaaataatataccatggtatataaaaagagcaaatacggtaagttggttttttcgtcttagtggtctgtgagttagtcaccaaaaggggggtcccaggttcaagtcctccctatgttgtgtgttaatttcaatttcttcttttaacggcataatttcgtgctgcgcaagaagacatcagtttgtcagaaaccgccgtccaactatgcagaagcggtggcaaaattcatcaattttgttgaacaaaggcgaaaggcgaagaacaattttcccggcggcatctttgcaatggacgagacggccgtttggttcgattgcccggacagccgatgtgtggacaataaaggcgcaaaggatgtaagtttttttagataaaatgaacctattctaacaaattaggtgacagttgtgaccacaggacatgacaaaatgcgggtgacggtgtgtcttacagcacggaataacggacaaaaactcaagccgtacgtgctggtcaacagaaagcgaccggtgccgcaaattgtcaaacaatttgctggaaaattagtgatcaatttcgctgggtcgatatggatgaatgatgacacaacggaggactacctgcacaaaatcatcggggcaaagctgtttgttggcgaacgcctcttggtttgggatgcgtttgggagctacaagagcgagagaacgaagaaagtggtgaagggattgggaatggaaacggtttttatccctggcggctgcaccaaattcatccaggtaacaaatcatccttctcaatgaaattcttttttcttccctaggctcccgatgtctcgtggaataagccgttcaaggagcgaattcgacacttctacagcatttggatgtccaatgaggcggaaaaggagttcacatcagcgggcaatccgaaggcacctgctcttcatgtggtacttgattggatccaccgatcatggcaggaaatctccaaagaagtgatcatcaaatcatttaagggtcagttaaaaaattaattcaggaaaaatgtctaaacttttaagtctgtgggctgactacgccattggacggaactgaagacgaaaaaattgcttgcttcaagccggaaggagcaattggaccgatagggataaaatttttgcgcaagtttaggataaatgaaacggcgaaagatggacgaaaacgatcacgaagaagacggcttatctgatgacgatgatgcagggctggatggagtcggagatgacgacgaattgttcattttttgagccccttttactgttgaatttattttaatttttttggaaaatgtgccaaataaattattaaaaaattctatttatccccccccccccgggcacataaatggagactggtatattatttttcaaccttctcagaagggggtatataattggagaccggcagggagactggcatataaaaagagtatatacggtacttgtat

SEQ ID NO: 11534 - DNA, 4637 bp, Heterodera glycines
aaaaaaaaaaaatttttttttttaatgaaaaattcgattttttcaaaaaatggcaattcgttttttcaccccccccccccccccctcgctactacatacaaaatgatgaattcttcaaaattagctgttcataattagtaacttcgctcatccctcgcgcgctgcttttaccgttaaaaattagaaccatcacgcatcgattttacacacatataaatgtattttttcggaatgttttaagccataaaaatagtgtgtaccaccatttcattattttattttttgttttatttaatattttattttttaatcctgtcgaatgtcgaactaggaattgacaaattatttggtcaatgactcacccctccctccccctaattgtttaggcctgcttgacggtgccgaactccgtctgcgcatgtccgacttggacctgcgccgggttgcccagtactgccgcaacttggccgacttggtactgatcagcgacctgttgcccaccattgccggtctgtacttcaccgcccaggtggacaccaaccggtccccgttggacctgtcccaggcgccgctgtactgctcggcgtaggcctgcagcgcaaaatggtcgaaacggtggccaacgaattggcactgtccgccagccaaacgcacgcgctgttgaacaaggcgatcagacggtgggtgagacggcggaggatcagggccaccaagatggatgaactgtgttcctgtccctacccccaaccgcatttcaattggttcctccaattcttggcaaaaaaaaatttaaaaatccaaaattctttagaaaattattcgagaattttttgccgaaattcctaattataagaaatttttaaatttaaaaaatttgcaatcctacaaaaaaaatttaaaaaaaaaatattctaaattcttaggaacaaattttatattgataaaatttccaatttaccaaatttcaagggctattattgcttttttggattctaattttgggtttttttcagtttgtccgaatatttcgactcaatttgccgtgaggcacttgaacacaacacaatgccaatgatcgccaacaacaaacagaagcagcaacagaatcagaaggaaaattggtggcaaaaacgaaaagcgacgaatgcccggcgatcaaaaaattgaaaatttcacactttgtcaaatgatacagtttttttttgttcttgttgtttttatttgttgaagggagaatttgaaaggctttgcagttcaatataattatctccaaatcaagaaatatgagataaaaaaatttagaaattttagtgtttaatgggaaaaaaatctttaaaaattcaaaaagaatttgagcattcaaaacattacattcataactatggctaaatgcacaaaaacccaaaataagcgcagcagatccgaaccgggtcaactccgtcccgccaactccgtcccgccaactccgtcccgccaactccgtcccgaccaactccgtcccagccaactccgtcccgccaactccgtcccaggccaactccgtcccgagccaactccgtcccgagccaactccgtcccgccaactccgtcccaatacaaaaaaggcccaggccaactccgtcccgagccaactccgtcccgccaactccgaaccgggccaactccgtcccgccaactccgtcccaggccaactccgtcccaggccaactccgtcccgccaactccgtcccgccaactccgtcccaagcaaaaattcaagaattttttaaaaataaatttgagtttatgaacaattcataagtagagaccggatttttatgtttttacatatttttttgcggcttagttatggcgagagaagcccaaaaatagcattatctccgaacaatttttgattttagcacataaaaatccggtctctattcataagtcttgatttcaatgaccgatttagtttttatttatgcaagttcctaatttgtgaaagaaaaacttttaaacaatgacaacttttattttcagggctcccaagtgtgcttatttctaagatttgtgcttattttgaggggccggatcttagaaacctaaaatatgcttatttctaagatttgtgcttatttcagcattacgtgcttattttgggatttgaaaataaaaaatgcaaaatttgcgtgcggacaaaatcccgccccgacaaaatcccgcctcagccaaaaacgacaaaatcccgcctccacctaaaagcgacaacacattttcgtacgagttcttgtacaagcgtcagattcaaatagaaaaacttaagaactaataaagccaaaatttatcattttttgtttcccattcataaaattttgttaaactcaaatttatttttaaaaaaattcttgaatttttgcttgggacggagttggccttttttgtattgggacggagttggcgggacggagttgcgggacggagttggctcccgacggagttggcctgggacggagttggcgggacggagttggcgggacggagttgacccgcttcgcatctgctgcgcttattttgggtttttgtgcatttagccatagttatgaatgtaatgttttgaatgctcaaattctttttgaatttttaaagatttttttcccattaaacactaaaatttctaaatttttttatctcatatttcttgatttggagataattatattgaactgcaaagcctttcaaattctcccttcaacaaataaaaacaacaagaacaaaaaaaattgtatcatttgacaaaatgtgaaattttcaattttttgatcgccgggcattcgtcgcttttcgtttttgccaccaattttccttctgattctgttgctatgtgttgttggcggtcattggcattgtgttgttgtactcggcgtgttgtcgttggtcgaaaaagcggtgcttgaggccgtcgtctcaagatgtaatacatcaagagacgggcggacctcccgttgccatccaaaaatggatgtatatacacctgaaaagagggagtaagtgatcgactataaaaagggttacacgggtccgcttgaggttccgagcaagcgataagaattaatatttttcgctgcactcaatttaaaatttttacaccgccggtgcaccataattcctttttttaaattattctaaaaccatgaaagcattaagaattgacaattggagtagagagagagagagagatgatagagagaaacaatgagtgatagatagggttagatatatgcttttgcatattttttctacgaatatgctatgaagaagggctcaaaaaaagcttttttacgttaaaattttttgatttggtgtatgtttttagtgcctataacagcatatttttgggggtttcgagaataaatgcatattttgccatttttaggtttttacagcattttcggccatttttaaaaaattgtcacaaggaaaacgcaaaaaaagcgaattaaaatttagaaaaaatttgtttatataaaaataattttgttttagcaaatagtaaaattttaaaaactcgaattgcatatatataaatttcgaaaatcaaaattttttacaattgtcaaaaaggcttcttatttgttagctgttttggtgtttttgaagataatagacaattgagaatttttacacaatttttggctttttggatggttaaaaaacattttgacgatttttagtgcaaatttgggcattttaagggttttgagggcatatttgagtgattttagtgcatatttatgcgcatatttggcattttttgtgcatattatttttacccctagtgatagatggaggaaaataaatgtagatagagaaatagcaaatgctttcaaagaaaatgagaaataacaccaaagaaaaacatagagagggagagagagaaaagaaagagaaaaagagagagacgaagaaaaggtataagagagacgttgaaggtgagaaagaaagaaagaaagcgaagaacactgggatagcgagagacagtgatataaaataatcgcagaaataggcttttcctttttttattattggaataaatgaaacttgccatcctaatatggtatttcgcagcaacaacaacagcatcagaacccggcgcctcgagctccacgttgagtcgcctgatgaactcgcgaagttcagtccacacttgcggacctacggtgcatcgtctgccagcaattgtcatcccgccgtgtcgccgaatgaagcccccggctctggggttttgcagcacaagtgcctcggagttaatttccatgagtgtctaaaacatcaatgaattgatgctgcttaggtaccaaatttaaatggaaaaatatttgattttttccatcggagaatagtcgggaaggtgacttcgttatccgttatcgaatccccccccccttggaaatttgatatgaatgatatctcattaataacatatttagtcaatgtttatttcaaaccaaccaagctagttattggaccaggttgtagtttgccaaacaccccgatatatgactcgtcttcgtcaaagtatgttgacgggtaccgagtcatattacgggcacttaggaagtctctctgaagagatgcttggaattccatgtcggaaa

SEQ ID NO: 11535 - DNA, 4039 bp, Heterodera glycines
  unsure (1)..(4039): unsure at all n locations
cctaaagtgggcaaaaataggtctgtcttggacaaaacgaatcacatnttcggacgacacagcgcacgaaactttgttttgtttttttctgccatttaaatataaatgatcggaattgcgttttttgctaacaaaatttccgtccattttcatcaattttgcagatacgtcgatttggatgtcattgcctttctgaaccgaatccaaaggttgctccaagatggtgagatgactttgcgcgttcggatcttccaccatcagcgacgcagcttgcaaattttctgcgcccaaatttggccactcatcaacaaaaacatcgtcaccgccgttgtctacccatcgatttggctcccaccgctccagcaggacaacgcgcaacaacaaaccacgctcaacgacctgcccaatctgaaattgctggagtactgtgacgtatcgcccagccaggaggtgatcgattggctgcacaattcgagcgcggacggacggccgaaggcggtgcgctgcgggttacctcgtcaaatggtcgacgaactccgagcggtacagttttgttgaacatagccaattctgttgattttctatgcttgttgttcatttttggcaatgctgcactccttttgcaatttttttttgtcacagacccccccccccccctctaatttgattacaaatgttttttaatgtttatgttgatcggaatacagtgggcccttttttggaaaaaaatatacccaatatagacgctaactcaaattccaagtttaaaattcaaatagattttcttgaaatttaaatggaacagtcaagaaatatgacttcaaacatgtaaaaaaatcactaggtccttttttagcgatttgttgctgcatcatcgccgacaattttcattgttttggtccattgtttgcaccccattgaacgcttccaaatcgacaacgatgtgaccaatgagcgaatggaattgcaactgttggagaatgcccgccccaacaccactgaactccatcatcggcgattgttggtgcgatgtccgatcggccgaaacgaggaacagtgggcgcaattcgaggaaaatgctcaaaattggaagttggccgagcagccgttcctgttcattgagctcgacgacaggcatcttggcgaagagtaggcagaaaatggagccctgactcttctaattgttttaacacatgcattttttgtagcatcacaaatgagggaggcgaaggcacgagtaaccaatgagagcgatgtaagagaatggcggggggacgacgacttttttttttaccttttgatcaaatctctttttttcattctcgagaattcatttctatttcaaacatagcataaaaatatcttattttttgaagtaataacgttaaatacatgaaaaatatttaaatgtatgtataatgccattattttcttgtaaaacaaaaaacaagttctaagtccagcccccaaaacccgcatattaatcctgcttgatcccttacagtaaaaattttgagttccaatccgcagtggctgggactcgcgaatttgaaatttcaggactcatatatatatactagagtccggcggaggcgggagtcccgcgggggtttacgggagtcccgctcccgactcccgtacttttttgcccaactggatttttacgggagcgggagttttacgggattcccgctcccataaattttgacccaaacacgggagtaaaaatacactggtaagaattgagttttttggtaaaactattaatttttgatgaaaatctgttaatatatagccaaaatttcaagaaattttcccgccggacccttaaaagccttaattttcttaaaaaagctagctcaaatttgcaaaaattggtcatttttggacaaaatctgaacaatggtattgtcttcaaatattcaattttttttttcccggcggcgcctatcggcaccgccagccaccctcctcctccctggtccccaaaaagttttttttcaaaagataagctgcaaaaagttgtttaaattaataaaggaagtcgaaaatataaaattaataaaaaataatttgttattattttttacctgtctctaatatgtacatactaaataaagtacacttttgaccattgaaagtagtgctttatattgccattcttcaaattaaacttttgctaaaattccatggacgaatcggcgaaaaagacgctaaaacaatattccacttcttaagacaaatgcaggaccaaggtaaataaacaaaaagtttacgtatattaaagtccaaaaatgagttaggaaagtgaccgacaaatttcgtctcgagactgccaaaaaaaatttttctggttttggataggaaactcacgataatttattttattaacccaaatatctctgcaaatttttttgatattgctagagacggacccctttggcttgaacggttgaaggaggagtacaacagtttgatcgcgttcattgagcacaacaagcagggcgatgccgactggtttcgacttgagtcgagcgcggatggcactcgatggtcagtgaatttggcatgtaaattggtgatgattgttaactttgtcttcccccccctttcttacaaaaatgtttcattttttcatgaaatccttgggtttccgggatcgctgagctcgaaaacgacattgattttgtcggacggatttttcgaatttaattttggtgtgaaagcggtttatataatgctgaaagcatttttcgaccttcgtccgtttgtccgttggcactctttcccttgactaaacatttgtgtctatgcccaaaaatggtgtcaaatttagggccgcttttcaaatccgggaacaaatttttagctacctatgcgcctgtttatccttttttaaagattgaaaaaacacaaattttgaatccaattttaaacatagaaagcaaatgtcgggtggtaaatgtccatgagcggcatttttttggcattaaaatttaatttccgtatgttaattctacctattgctgagagatttttgtacggatttggagtgccccaataccatttaattttgcgggcgcgaatttgagggactttggacaaactatcgccaaatagtcacattttcggttccatgtatttttggcccacccaaaaaatctatataagattagaagtctaaaattcaagcgaatgtttataaagttagatgtaacagtcctaaaaaatgtggattagaaaagcacttttttagcgatttgttgctgcatcatcgccgacaattttcatcattgtgttccaatgtttgcaccccattgaacgcttccaaatctacaacgatgtgaccaatgagcgaatggaattgcaacagttgccggatgccgacccccgcaccactgaactccatcatcggcgattgttgatgcgatgtccggtcgaccgaaacgaggaacagtgggcgcaattcgaggaaaatgctcaaaattggaagttggccgagcacccgtgcctgttcattgagctcaacgacaggcatcttggcgatgagtaggcagaaaatagagtccttactcttctaattgttttaacacatgcattttttgtagcatcacaaatgagggcgaaggcacgattcaatgagctgttcaaaattttccacataaatgggcttcatccgatcagtctgttccgattcgtcgtcaatggctaattgcagttccggtttgtcaatgcgtaattgctgccattccattcgattgtcctccgacatgacaacatatttcattgttgctgctttcgctgcagcgactttttctggcagtcctccaacgccatgaatttttcgccgtcactcaaatccaccagcaccacagtgtcagcgaaacaaaggcggttgcttgcgagtccaaacacggcgcaaaagacggcaccggagcccgaactgccggccactaaatcagtttctggttcaattcgcaacttgactccgtaatggacaaaaaaattgtcggttgtcgccgaatcaannatgcaagac

SEQ ID NO: 11536 - DNA, 804 bp, Heterodera glycines
  unsure (1)..(804): unsure at all n locations
atgtattataaaataatgataggtaaatagaatttactttgagtcttgttccatttttgaaattctacaaaaatacgtaaaaagtgttagacattcgaactcagaaggctgtgttgggttccagccagagtttttggattttaacttttttctatgtcatccaaatcaaacatttttgtatcattcgaaagttaatgtggaaaaagattcagtcaaggtgaaaggcttcaaacagtaaatgattgaatgaaatggaaaaaagcaaagtcaaactcttaaaagactagtgattgaatggaatggaatatttaaattatttacacaaacggaattctgacgcgtgcagaaccatccaattccttaccaaaaattctatttacctatcattattttataatagattacatattttattcaatcataaaactacttttaaatgcaaccaatcaacatcagaagagaagcattcctgcaagtaatgcggataatgcattaatttcattatttttcattcttgatttaagccgtaggggttgcactcatgaatgtagtacgtaccgcaagttccgtgcccatttggtcttccatcaccgagaagctccgctaaaaatcaatcgaagaggaaccgagtatccgggcgaatgtatcagtgtgcaaaggatgctgaacgagcaggacatcccgactgaaggcaaatatattttataaacttaaaaaagtcagattcatataggagagctttacactgtgaaagcgaaagttcaaagcccgggcagtgttcacattattcgnggaaaaaattcg

SEQ ID NO: 11537 - DNA, 1044 bp, Heterodera glycines
atttttaaattcaaatttaaaattttgaattcttttgtgattgtccagtaaaactattttagatgtagatgtgaaaaataaatgaataaatgttatttgtatttgttttattaatcttttcttttatctttttattttggttacctttaattattaaataaatgtcttctgaaatcgaaaacatcgtccccaatggcgcaatagatgaccatcagaaagaaatgaacaaattttcatggacattgaacgatttcgaaattgggaagccacttggaaagggcaaattcggcactgtttatttggcgcgggagcgagaaacgaaatatttaacggcactgaaagtgctgttcaagaaggacatggacaagcacggagtgtcgcatcagatgaagcgcgagatcgaaatccaataccatttgaggttggtggctgagttttgctggctctttccgtcttcgattccctttgctctcccccagttaataattgcttttatcctctcttagacaccctaacattcttcgtctttacggctatttctacgatgaagaccgcgtttacctttcgctcgaattcgcctcgcgtggctccgtctttcaacttcttcgcaagagcaaatgcttttcggtgccttactccgcccgtttgatttatcagcttgcggacgcattaatttactgccattcgaggtaaaatttagtgaaatttggtttaaatgaaaaagtttaggaatgttattcatcgggacattaaggtttgtgtgccgggcaaatggggttaaactcacaaacaaattcaatttaagtttatcagatcaggtttttgacaataggcttttttagtaataatagttttaagagttcaaaaatttccatcgacaccgtcggtcaataatttcatttgttttccaactcttaaaatgatcaccaaaattcttaagccggaaaatctgctgattaatactaacggagacctgaaaatcgcagactttggctggtcagtgcacgcgccttcctcaaagtgtgtatttgtgatttttgctct

SEQ ID NO: 11538 - DNA, 5328 bp, Heterodera glycines
cgcatgacaaattcgtcacgcttttgtctttgtctctttttgctgtaccttggcgtttacaaattcgttttaagaattattccttcccactcaattctttcgtccttattgctaggtcgacaattggtccgtgggcgtccttctatacgaatttctctcgggcagacctccgtttgatctcgaaaaacacgtggacactttgaacaccatcagaaaggtggggaaaatgaatttgagtgaccgtactcttttaaaaacttttttttttctgattttccattgcgcaattaaatttgggcaacggtttagagatcattggtgccgataattttctttttatttcgggaatattactaggggtaatctgaagcgctgagcacgaattggccgttggtcaatttcggacccagaatccggattcaaactttttcgtcaaaccataaaacaatatctttttatacaatgtttaaatgccatgcatttacaaagaaaacaaatttgaacggcattcttaaaaagggaatctttgagggtgcttttcactaatcagaaacttcgaatgaataagtgagtgcacaacatattcaggtggcctatcaattcgcgagttcgtttcccgtcggcgccagagacattgtgagcaaagtaaggaaggaatgaattggaaggactaaaaaccacgaggagaaggaccttttccaaaccaatgccatgccaaccgaaacttcctttcccctctttagctgcttgtcctcgaccagtccactcgcatgccattggaggagctgcagaagcacccgtggattgtggagaatatgcacaagagtcagtccaatgcgccatcggccgattccgcgaatccttcggaccacaaatcgtccacttcgtcataaaattaatgttcatttgtttggtgtgttggatttgttggtgcatttatctatttatgttgtcctcattttttatttttgctttttaaatatatcattaaaatttaaccgtcccaagagggcaaaatatgcattttgtaaataaaagttgagtttttataatgaaataagggctataaagcagggttcggaccggacaaaccctttccagggacgggtataccggtttccaaggacaaggggaaaattccataaaaatcaaggacatataaaaatttaatcgtatgtaaggaaaaatgattaaattttatatatttgcgccggaatgaatttttataaatattttttgattctggtcatttcctcacttcaccgcatattcatttttttagcggtgcgctttttccaaaaaatatctaggaacaggtgggtcaggctcaaggacgaaccgaaccctgatataaaatgatacttggacgaacagccaagtacagcatttttctcttccgccgagctcttctcttccttctcccttcccaacggcgctgctggtcacatcggaatgtcttagctgctcctgctgacactgttcttttcaatcacgatgccgttcgaatgtgtccccttgccccctcctccccttttctaaggcatttgaatttaattgaaggttggaattttcttagagaatgtaaacgatcctgtctcagtatttcaggtgatccccaaaatgttcaattaacagagttaaaattgacaaaaaaaaatttctgaacaaattaatagaagaaattttgattcatggtttacggaaaataaaaaaaacgataaaaatgaaataaaccaaacaaaacttaaaactaataaaataggaaaaaggaacagaaagagaaagaaccaggaagagaaccagaaaagaaaaaaaggtggaagagaaagaggaacataaagtggaagaggaagtgaaggagaaagaggacaggaaagatgaccagaaagtggaagagaaagataaagaggacaggaaagtgaaagaggaaaagaaacaggaagaggaacagaaagaggaagagaaagtggaagaggaagtggaagagaaagaggaacagaaacaggaagaaagaaagagcaggagaaaatggaagcgagagaggaagaggaatggaaagaggaagagcaaaagtaagagattttaagtggtcttattaaaagttagagtttaaaataaataattgaattcccgtccattaaaaaacccatttgccctcttataaagttttttggcgcggagcgccctatagagactgttaaatagcgaagctatttcaatttaaaaaaataaattaattcgtctttttcagtgcccgtagggcactggttttactatatttttgaaaaatggggaccaaatggcaatagatgtaattttttggcgaaaaacggcgcaatatttagtaaaatacaccccataattcgggatttcaaaaaacgaaatacactcccctaaaaaccgaatttttgaattcagcccccccccccccccgaagccaagggtctggctacgccctttgtcaacagtgagcttcactgccgaaaccttcagaaatttttgatttgcaattacaaaaacaaccgataaaatttatgaggaataaattttttaaattaatttgcacccctaattttcaagttttttgtgcatatttggtgcatattttgcgatttttgtgcatatttggtgcatatttcacgaatttatttgcatatttatgcgcatattttggtcacttttcgtgcatattttttgcagccctgattatgacaaatcacagtaatggttttcaattgttttcagggagatacctattgttaccagtatgtcatggtaacttacgatttggaatgcgacctgacgtgctctaaaattgtcgtcgacgcccaaaatagaaactcccaaaaatatttcttcaaaaactggcgctcctatatatttttaaaatttaacacttactattctacaaataaatattaccgagtattccgctgagtttagaatataactgtctcgcagaatattcatcacgatacggcacacgagtgcagccaaaggtaatttcacaacaaattattgttaccttaacggcaaatttaacaaaaaaagaccattttttgtttgaccaattcaatcagtgatttgctataaactcattaaaaccaaaaattattagacccattgcatttgcgaatggaccaatttttgggtttcaaaaatttataatttttctcccatccaaacaatttggcatttgcatcttagacataatttagtgaagaataacaaattttccatattttaacagcatataattttatattaaaatgccgattgtttgaatgattctatgcaataccatatttgccaacttacggatacaactccgtccgagtattttgcttgccaatatatgcaagcgtgtccacattcgtgcgtcgctcgaactttgtcagagactagttgtcgtcttttttttctgaatcaaaatccttgcatagaactaataaagaacaataaatctacatctaaatttttcatgtgttttttcgtgctcaactccctctcaaaacctctttattctctctttcttgcttaggagtgcagaaagaataacgaacgagcacacaatcagaacacgaaacaaaaataaataacacagaaaagacgaatagaaaaaaataaataaaaattaggattgcttcggcagcacaaaagcaaaaaaggacgtatgagtgaatgcttcggcgaatccaaagcgtgcaaagggacagagaagaatttcagcgttccctttcattagtggctcaaaggagcgagtaagtaacacattacttcggccccgacaaatttgtagggagactcgacccttctgcgaattctacaatcgatcaggtcactttcaaaacgaatgttggtattgtcctcgggattttcctggtcccggaaaatatgcaaaagcgaagaatcatttgagaatagtgccaaagtgaatggactagagaaacccaggaattgagagagttggttgaaggtttggcttttcaatctccgaaaattgttgtgttggacgatcaaatgaaaggttgggagtgattgcagtgagcatgaaattttggtttaataaaaaagtaaatatataagaaaaatagcaaaattgtaggtatggttggaggtttaagagaggtagaaattcattatttgtcttgccaaagcttggaaatttaactttaacatttattttgtttcgcatttaatttctcgcatattatactgcccttttccgaccgatggttgatcaatcatatttcattttcacatgtgtttaatgttcgccttccattctatgtatgctcagtctcccgagaacaaagccacttagttgtgggaccagcaagtgtgggaaggcaatcctgggcttgatcatcccgtgaacccctccttcgggaatatgtggcactttccctttcccaaatcttattcgaaatccaattcccaatctttaattcaatttaagaaatttatattattattaaacaaacaaattgaaaataaattcccatcgattgggggaattgagccgatgaaaagatatggaaaaaccaggaaggcaaatcattaggccattttaagaatttccatcgctacatcaaaagaatatttaaatataatttttcaaattctttccttttacaccaaattctgtaactaatttttcactcagaccactattctcaccactgttagtgcatttaacttgtatattataacactaatgcatgaaaatgtctatttttctattttcccatagtgcaatcactttccaattaacttctagaagtaaatattgtccccgtaatgattttattcttgagatattattttggaagcgaatccaaaagtcaggtgaatatgcaaaaatgacagtcgaaatattgaataatttaacccaatttcttttctcatttacctcagctgagtttggaccacgtgaagttcgtcgtttgtagtgatcgtgatgggttgagctttgcagctgggatcaccacttaagccgcaagcgtaggaagtataatcgaccttgttcagggtggagatcttttacaagatatataatgatttttttattaatttataaaaattatcatattattacatttacattaaagccttgattacgcaaaacatattcgatgaaaattcgcttgggacgaaaacgaggcgagacgaaagtaaaaagtggcgaaaatatcgagaaaaaataatttccgtttaaacgtgattaatgctaaataataatatttgtttaaatgaaaaaattatttcggtcgatccaatcaattggatttatacgcgtatacgtgacgccgaaaagtaagaaattcg

SEQ ID NO: 11539 - DNA, 1072 bp, Heterodera glycines
gagtcaaacaggtgttaattgattgtgtgatcaacccagggcggagtacatactgatcagagggcggaattggggcactctttgatcaaggtgtaactctcattgataagacagagttattacttactaactgatcaggatgttgggatgggcccatctcgcgactcagttcagtcgaacactaaccaagacaaaatgccaatggaaattaatcaaaaatctcttaattttgatcagattacaatgggaaaaattgatctaataatcattagcaattctttgttttatagctcacaacaagaggacatgctgctcaactttttgttagacaccgatttcaaggcgggcggtggcggcgttttctctggtacgccttgaaaaaatgccaatctgttaattcgaaagaatatcccaggactcggcatcctccatgaatgccaagaacatgcttggaaaatttttccagtgttcgggttcgaacttgaggattagtctcatttgtcaggcaaaaaaatgccaggatgcgaaattccggcggcgaaaaattgctagaatgaaaaaaagctgtggattcattcttgggttcgaattcgtccttggatgccaaggacgtccttggaaaaaaaaccattgaatttattccagagttcgggttcgtacttgaggagtggtcacaggcaaaaaaaaacaatgccgaaaaacgaaaattccggtggacaaaaaaatgccgaataaaaaaagtggggattcattccagggttagaattcgtccttggatgccaatgacgtccttggaaattgggtttgatgccatttaattcttgtttcaaattggctttcatccgaaaaacaaatttgcaaattttagtttatttattattcattttgtgttatatttacactttctttttacgcatttttccaccaaatacaatggcattttgcagaatgccaaaataggcattttttttgtttgtttgtttgcacacgcgcaaatcttgaattccgcttttttttgttttcgccccaggcggtgccgtggaatttgaccccggctcaacgacgtcacccc

SEQ ID NO: 11540 - DNA, 4214 bp, Heterodera glycines
aaagaaataccgtagccatttgttcgacacataaattctatgatgattgtttattgaatgtaatgactacaataatgctaatactttcattttgcaaatattaaaataatacataaattttttgctggaatactgtttaattacgctgataccgtatccttcgtttaacaaataattgatggcatataattctgctggaaaacggtagtcccatatccatttggctacagtatccatatcatcacaaaacagatattttgtgatcccttccaaaaatgatatgttgctaatgagttgattcattcggttgagtttgtgcttttcagttttgtgccgatcagtttggccgaccagcctccgcccaccattttgcagaagcaatgcgcaaatacgtgttgatgtgtgccgactgggtgaacgcgttgttcatgctggccggcctcgacagcccgcaggaaaaggtgtgggcaaaaggccaaacattcaaatttaaaaatggggccacataaaaaagtgccaacaatgaaatcactatgcctttattgatcggctaatatattttatatcgggattgacattaacccgaaatggattaatcatggtcagaaactcaagattaaaaactcagttttttctttgtttccgctaaattttggcatttaatccgatttaagcgccattcacttcttttaagacaatttgtaaattgtctttgatgagctgaaaagatttgatcaaaaactgttcattttggtgacaaatgatcaaaatgtattcgcgtaataaaacaatcacttaactgagtttttgcagaatttattaatgtaaaatgactaattaactcagcaaatttactcattaattaattagacgtttttaaacatttaatcaaagcgtgatttatttttcttttgatctggtgataaaaaacaagtgaatcctcaaggtcgtgcatcatcattaactttgtcagatcactttccagcctacagtatcacatcgttatactgtattttaaatttaaattttaaataatttttcatttttcagttgacactgatcaagaacgcgttcgtcgccttctacacgtttgagcaggccacgtgcacagccaaagtgtgccgaaacgcggcggcaacatcaaacgctgcgagcgcggccggcggcggtgcgttgctcggtggcattccgccccaggcaatttgcttgtgcaacggcactctggtggcacgggacgtgccgcaagactgcaccaccaactgcttgctggccaacaacattgtgggcaaagtgctggacgagctggtgacgcctttgcgccggctcaacctgtccgagcaggaacgggtggcactgaccgcgctgatcctgctggacggaggtgaatgattgatggggctaatgtgttcaggggattcggaaatggcaccctgatcaacattgtgatcagggaattcgggaaacaaatcagccctcattaggggccagattaactattgacagcacaaataatcaataggtgcatttttgaaatctccgcttacattctacccatttcaaacaaaaagggacttttctagctaattactaattcatgatcaatcaggtccagtgttgtctggtcgccattttcttgacccagtgaatttgtggcatttttatgtcgtcctaattgcccgctttcccctgcctgatcagacagtcgcagttcgctgggcggtctcagcagcgactccagcgacgacggcacttccgctggcggcgattatggcgccggcgccggcctgtacctggtcaaggacaagctgcaaaacgcactgttccaacatgtgcgcgagcggtgcgaccagtcgttgaaccgggcggcgtcccgtttcgccaacattttgttgctgctcacctcggtggccaaggtggcatccgtgtactacgagaatgtgcagatggtcaaaatgtttgtgcgccaatccatggacccgttgttggccgaaatcttcgactcggaggtgtgaagccccgtccggtggtggtgatggtgggatatggaaaaagccgtgagcatttgttcaacatcaaaggatagactgactaattgggtgaaaatgccgaattttgggcgggataaattccgaaattgtcaaacccgagactattttgaccaatatccgcccattcttatgtcaatactatttcggaacagaaataattctgttcgtttgattaccatccccggattgttgatctgatttcttatattatttagtttccagaactttgatcgattttttctgatcaattttgaagtcggcacaaaaaaagcgaaaatttgcaatagcaaatctctatgatcaacatgatagaatgttttaaagtgatctgatcacttacgatttggaatcttcccttgtgggtattccgtttcgtaatttagataaattatccattttgggctaatcggtatcccgtttaatcggcttttcgttctttgggattatcagatttaatttgggtcccttgttcttttccgattgagctgactgatcaaatgattttaacaggtgtcacagccccagggcctgttgacaaacagttgcacaaactcagccggctctcccgccccgatctcggccacctccgctgccagcctacagcaattcggatctcaggtaatcaagagtgaaaactgtcttaatcctcgagaatccaaggcaagaaaatttggtcgagagtctcgaatttaaagattttttccttagggattttgcccttgtcggcacaaattatttattgctctttcctaagattgagatcataataaacatggtatctggtgtggtcaaagacgggatcattctcagcatcgagagtcttgggcaattaaaattaattagtgccggaaaattggaacgccttttaaggagtttgagccgctgttgctcggctttgacgaagtgcgacggcgtcagcagcaacaccatcaactccatcagcagcagcaacaacaacagcttgacgacatcggcgtagagcagcgcccgcggcgaatgtctgccacggaaatggaccaactgttgttggcaccgcttttcgtcaacggcggcggcggcaacttccaccaccttcaccatcagcagcatcatgagcaacaacaacaccaacaacaacaacagaaaagcaacaacaacggcacgggcagcaacgagttactgctttcgtcatcatcgccggagggcaccggtggtgccgcaacagtgacgacaactgcggcaacacaaccatcgtccgcggcggctgtcacaacgggaggcggtggcgattctgctgccggggcggcaaacatgtactttggatgccattccacaacaaatgttgacaggagtggtggtgccaacggcactgacgacggtcagtctcatagtcgagaatgggtgtcaagaatttcgcaagatccgggccagcattctctgccagggttcaattcgtgacgggtttttacgaaattaggattatttccggagcaaaatttgaaaaattctttaaaaaatattcttaaaaccagtttttggcttaacactccctgccatcacttctggacctcttagcgatgtatagtttaggcagacacaaaaatttccgaagcgcttcttgaaaattttaaaatccggaaatcggacccagaatcctcaaaaattttcggaatcggacccaatccagttaaaatccggacactgattatgatcaacccatgctcagatgggaccagcagttgtacatcgacggcgacagcgcgtgccgcactgttacttgcggcacaacaacacggcgccgtcggccaaacggcgccatggcctggcgccgccagcaacagcggcgcactgatggaccgctgcgtggcacgggtgaacagttcgccaacaatgggcgtgtcagcgatagcggcgtctgtcgctggggctgacactgttgtgccagccggcggtggttactactcggccccgctgttggcaccgcaccatcatcagcagccgttcttcttcggcaccggcattggcggcatggcattggccccgtcgtcagcgaccaacatgggtgacagcggtggcggcacagtgtcatcagtggcggctggcacgacgccgttgatgcaagccggtgccgttggtgggtcagcatctgcggccgcttcgctggcgacttcagctctagagatcccc

SEQ ID NO: 11541 - DNA, 1258 bp, Heterodera glycines
  unsure (1)..(1258): unsure at all n locations
tatttccaattctcagttaaagccgtgcctataatctttggaaagggaggagggcttctgctgactgttaccgagttctcttctgatcagacactgcttgctcacgcgaaacgagtgcatttttgatctgaagtccagcagcttttcgaacaattggactatttgacgtattcgacaaaacgacggcgagttgttgaatgaattcaggctagaaaaaaacaaaaattttttttgagaccggtcagaattattttaaaataaattttcaccaaaagaaaacttacaaaattaattcgtgcggcttcatttaaggcggtaagtgccaattgctggtcggcataacctcaaaagaatcaaaccaataaataaatgtgcacaaccaacttggtgaaatcgttttctctaatatttgcacaatgtcggccatgtcacaaaatgtaaaatcgaaaaataaaaaataccgcctggggaaaaaatatttaattatggaattgttgatacataaaaaaatttgagttcgacacaaagtccgaattcgaataaaaagttcgagaattaaatttttcaaaattcacatttatggtcaaatctgataaaatgactagtgaagtcgcaatgtttgtgactaatttttgcttgttttatcgattaaaacacgtgcctgaaaaattggaaaaatagaattttcagcgctggttatacctacctaattggacattttgaattttattaaaaaccaagggccttttggtttgcaaatgtttttgaatacgtctagtaataaaattgtttctgtgattattgaagttcgggttagggctgaagaactagtcaaaatatatgttaaattcgtatcaggaatcaggacctgataatcacaaaaaaaaaacaaaacaaaaaaggtccacattaggtatagagtacgcattgtataaatcgggcactggaaatggatagaattgaaaactcatttgtcagctaacaaacaccatttttaaaataaacatggcgccaaaaattttaaagaataatttattggagggaattacagtatcttaaacggaagaaaaatgaatcgtttcatttctacttacctcactaattctattagctcaatttttccgttgggttaaatttccctttgtgttgttagtctccgtttgattanaaaagttaattaatacggtctgtatanaatgctttaaattgctttcgtcttttctcaccttttcccttgattcgcaagtttaatttgtct

SEQ ID NO: 11542 - DNA, 4526 bp, Heterodera glycines
agtgggtgccgctacaacccttcggctgtgatgcccccccagaattgaatgtgtgttccattgaaatcaagcacgccttgtgatgttttgcataagaagatttgtgatgtttttacgtttgctcagcgtttgccttcgcctggccgtcgcacattcagtcacgaatgattttttcaattgatgtgatttctctcgttattgatgaataaacggtgtgtatcacaaaagcattcattcatttatatgaggcgccttagtaagcaatttgaaaatttggcaccattttgttgccgacgcgttgtgcgcccgcgtagtgccttccgccgccacgggtgacgcaaatcgaccggttgggctagcgataaaatggtctttttatgtaaaactgttatcacaaaactaaattttcaaaattgacttaagaattgttcccctttgggcctgccgacatcccccccccaaataaaaattttccaaattcacattggttgcggtgtcaagtttgactatttcgtgcttgagttgcatacccgcccggttcaatcgttgctgaccaaacgtactacgagcgggtgatcgaagtgcgtcgtgacccaaccgaacgccgtacattgcgctggtggccggagtcaaggttcactcttttcaatggattagtgcaaatccaacctttacacaatgctttttacttcacttaaaaatttagtgctattttcgatgttctttgaactcgaacgcaaagacttggagttcgtcaaaggcgaaagccaagcagacattgagcaggtcgacgggaagagccaaaagtacaacggtttcttgatcaatctgatcgactcgcctggccacgtggacttctccagcgaagttactgctgcgttgcgcgtcactgacggtgctttggtggtggtcgactgtgtgtcaggtttgtcttgaaaactatgttttttgatttgcacaaacaaattcgcggttgcattttaatttcaagtgcactagagccactatttctacatccgctctttaggtgtttgcgtgcaaactgagacggtgttgcgtcaagcaattgccgagcgtatcaaaccggtgttgttcatgaacaagatggaccgtgcgctgctcgaacttcagcttggccaggaggaattgttccagacattccagcgcattgtggagaacatcaacgtgatcattgccacttacggagatgatgatggaccgatgggtccgatccaagtggacccgtccattggcaatgtcggctttggctctggacttcatggttgggctttcacattgaagcagtttgcggagatgtacgctgacaagtttggagtccaggtttgaacacagcttgatattttgttcaaatttgcttatttttagattgacaaattgatgaaaaatctgtggggcgatcgcttcttcaacatgaagaccaagaaatggaccaacaaccaagagcccgagaccaagcgaggcttctgccaatttgtgttggacccgatcttcaaagtgttcgacgctgtgatgaacatcaaaaaggacgaagtggcgaagttggtggagaagctgaacatcaaactgaccttggaagagaaggaacaggagggcaagccattgctgaaaacgatgatgcgcaaatggttgccagccggtgacactatgcttcaggtttgtatgggattagcccactttagtcttttttcgtcgggaatttcaaaataacagaattcggttgtaaatcctgtttttatgcagatgattgtcatgcatttgccatcgccagtcacggcgcaaagataccgcatggaaatgctatacgaagggccgcatgacgacgaggcggcggttgcaatgaaaaactgcgaccccaacgggccactgatgatgtacatctcgaagatggtgccaacctctgacaaagggcgcttctacgctttcggttttaccttttcacaaataatgaacaaacaattttatgaaaactcaggtcgcgtgtttgcgggcagagtcgccactgggatgaaagcgcgtatccaagggccaaattatgtggtcggcaaaaaggaggacctctacgagaagaccatccaacggcaagcaacaattcatttctggttttcatttacattcaatccccgttttctagcacaattctaatgatgggccgttacattgaaccgattgaggacattccggccggaaacattgccggactggtcggcgttgatcagtacctggtcaagggtgggaccatcaccacctacaaagacgcacacaacatgcgcgtgatgaaattctccgtgtcgcccgttgtccgtgtggcggtcgagccaaagaatgcgggcgatttgcccaagctggtccgacattttcatgtttcaacaaatttaatttcagatttaaggtcgaaggattgaagcgtttggccaagtcggacccgatggtccaatgcattttcgaggagtccggtgaacacatcattgccggcgcgggcgaactgcacttggagatctgcttgaaggacttggaggaggaccatgcttgcattccgctcaagaagtctgatccggtggtgtcctaccgtgagacggtcaccgaagaatccgaaattgtgtgcctgtccaaatcgcccaacaaacacaaccgtctgttctgcaaagctaggccgttgcctgatggactgccggaagccattgaacgcggcgacgtcaacccgacggacgacccgaaaaatcgtgccaaaatactcaccgagaaattcgaaatggacgcgaccgactcgcgcaaaatttggtgtttcggaccagagggcactggtgccaatttgctgattgacgtgacaaagggtgtgcagtacttgaacgaaattaaggtatgaaacgtttaaagaattcgattccttttttgctattactaattttaacggaaatttaggattcggtagtggccggcttccaatgggcaaccaaggagggcgtgctctgcgatgagaacatgcgcggtgttcgtttcgacatccacgacgtcacactgcacgccgatgccattcaccgtggcggtggtcaaatcattccgacggcgcgtcgtgttttctacgcttcggtgtgacggcaaaagtgcgtctattctccttacatatatgtattgcttccaatttttcaagtttgaaagctggtattatcgcttttttgggattgtactagattggttttttctaaaagtaaaacaaaatctatttttcatgggatgcaaatccatcctttacacaatgctttgacttcgcttaaaatttagtgctacgcaaagacttggagttcgtcaaaggcgaaagccaagctgacattgagaacagttcacacccctttttcttaatgtgcccattcagaaaacatattatttttgtatcagggactggaactccaacgctcgaaaattttcccgaattttctaaatccgatggtctgaattttttatttcagcagaattctgaccctaaaatggaaatctatttcatcgaacagcaaaatccactcttggaacaatattaaattgaatatattttatttatcaatcatttcaaaggctcgacattctgttgacctgcaatgtgttgctgattccgtccaattcgttgaccgaaccgcttcgaattgtgttcgacccggacaaggccagaattgctgcacacgccggcaaagcatccaccctgacaatgggcgtcattccaaccattgaccaggcatgaaattaattttttaacattttaaaatttccattttgtaccaaatctaacttaaaatcattcccgggcacgcggatttgaaccgccgctgtttggtggtgtggttgatctatactctgggttcctcattgttttggtgtgggttcgagttcgcgtgcctgcaaaagatttattttttgctcgttctcatgaatccaaataccggattcctaattagacaaaattaatgcgaatttgtgattgatatgttaatcctgcctaaaaaaatttccgttttaatccaaaaaagaataccccccaaagaaaatgaatatgaattttatcgtctacattcgattacagccatcccagccattttttaaatataaattttcgtccttttccacaggtggtctgtgccgaactgagtggcgacgcgtgtccgttgcccgcccatcagttgcgcggtgcgctttccgacatgtacgagcactgtttgacaattacctaattatttatttattttgttgtgtccattacatttctgtttattatttgtttgtatattatacattgaaattgcgatggacactttgtttgacgtgcgaaacaacttttatttgggcgcttttcaacagtgcatcaacgaggcacaggtttttgttttataatgggcggaaaaggccgatttatagggaccgaaaaacgaaaaaatggtgttggaatgtgcaaaaagtgggtcacaaaagatgtgttggcttgtgaccccatgttttaaattctagtaattctatatggt

SEQ ID NO: 11543 - DNA, 3538 bp, Heterodera glycines
ctctgagctatatgcattttcgaaatatcagttctaacctgtatgcagacatttgcgcctcgggcatttgcgctccaaacacttgtgcctatgtcaaaatctggatttaattttgtgtttttcaatcctggagttcatagacaacataagttaataaaacaactgtcttttggttcattaggaacaataattctgttgtttgacagataatatttttttcaaaaatttgcagacgttcaattaattgtcgaatagaatcactttctatcgcttatataaagctgttcaggccatccgggatagaaaaaattcgatttggaaccgatttttgaaatatgcgcaaatgacatgttaaccttctagccatactgatcagtagaacccgaacagaaggggaaagccactgattagaacaaacgaaccaatcaatgcatttgcttatttcaggtgaaactgatcctcacctttgacaacgacaagcaggcggtgttcaaaccgatgaggtcgaatgaaaacaaagcaacgattttattggtctttaaggttcggcagagactacgaaacggacccaaaccatttttattttggcgattttgaacgacacaatgccgagatcgcaaccttccacttggacaagtcactcactcattgtgccctttccatttgccattgcttcttcagaatcctcggctatcgccgtgccgtgccaacggtcggccgagtgatgaatatgaccagtgagctgttggaaaaggcggagaggcgtcttcgcaagactttcttcgtttccccaggcatttcgtctccctttggctttaccccccccccatttttttttttgcttatagcaaagaatcgctgtttcgtcagcaaatgcgactattattgtgacacgacacatgcaatttgcgggtcgcccgagttgaaggagggatcagtccaagtctttctgcccgacgacacgagtgtgccacggaaacacaacaaatcaccgtacagacggtacagtatgccaaccaaagtgaccgtaaccgttagattgttcaggacatattcaaagaagacacaactcgctgcctggcagcaggacatgaactattgtcagtcgaaggtgaaggggatgaagcagtacgcgcacggaaggcgactgcttgacctgatcgacttgcatttgatggattatctgatcggaaaccaggaccgccatcactacgagacgttcagcgttttcggcactgacattccatcatacgcaattcatttggacaacggacgatcgtaaaaatgggggggcgcgatgccatggactgtttcttcacagatttggccgtactgactttgacgatgacgacatccttatgcccttccgacagtgctgtctgatcagaccgaaaacattgggcacttttttcggcttttacagcggtgtcaaagggctctcagaaacactgcacgagtgagtcacctttagggcgtccgtccgtcggtcattcgtccgttcactacgtttgttcgttcagttccctctccaaagaccccgttttccccgtgatcgccttcaaacattacgccgccttggaacggcgcctctacaaaatcatggagtaccttctcgaatgtatggacaaacagaatggagacctaacccaaatggttgtcaacgaatttcacaatccgacggtggcggagcctttgccgggcgaagagtcggagacggaggaggacgaaacgaacgacgccccggcagggccaccagcggaccaacagcagaagcaacgggaagtgggagcagcaccagcggaagcgcagcaccagccggcggatgaaaatgaaaatgcgaaaaatgtgttgaaagcgccagcagtggaaccaattttaaaggaggagcaacggcaaagtgccgaagggcatgggaaattcccgaagccaccggcgatgttagcataagaaaattgccgggagagcaaaagcagcgaaagtgcgacgccattggcacgggtttttcacttcactcacttcgttgaccactcaaaccattctttttgtgatcgctttcgctctttgttgttcctccgtgcagagcttatttcagcttattgaaaattcactttcttaaattccaatagccattggcgctaataacccaaaatccgtctccaaaaccattgtgatgatcattttgttcaaaagaattgcttgtttgtaagtgtttcggtgtcggattgtcattgttcttcagtttggccttaccttcggccttcgctttcgctgctcattcattcattggtccaacccaacagttaattgaccaattaattctctccgcctttgcctttgctttctatgatttttcacttttccgtcctctctttttgtgtttgttttccccgtgttcgtcgtactcactttctttcatcgttccgctgctgtccttttattccgtccgcttttcctttccctcctccgtttatttacttgtgccccgtacattttcaatttcacttcgactgtctgtgaacattatttgcaataaatccggtgctcagccatatcccactttctaaatccttttttgttcatcaaaaatatttaacagtcgcagatttatgttttgaaatttcgtgttttttatgtatttagtttgatgctttttaaaaaacgattataaaaagacagtttattttttaaacttttttataatttaaaaattcacctaaaataatgctttttgttcccaaaagttgttttgtctgccaaaatatttttaaaataatcttcgagctttctaaaagtttaaacaacgtttgtatactcataagcgaattgtactttttaaggagaggcggaaggggtggggaggtccggatgctggcgttaacacttctaaagataaagccgcagctgtaatataagaccttacggcatgaatgactttgtaatgctacgtgactggatgggagaagggggtggccgatcatttcgtcactgagaaattattgaaaattttttgctttaaaacttttttataattgacatttgggtaatagtttagatggtaccccccttttttaaaaatttttttcaactttcaaaaaatcataaaaacatgtttctaggggttttcggggtcgctgatcacgaatccgacatccatttcgaccgattccgaacccctgacccggattcgaacaaaataaaaaattgattttttaacaaaattcacatttattgctaaaaatcgattcaaatgcacgaaaaagaaaataatcaatgttcgcatggataaaactcagagacatgcaaccaaaaattgtaaaacgcattttcacggtctccaaaacgctgacgccaaataaattctgggaaataggtgtcgtatgtttcagtcttgttcccaaattgctgtttgaaattccttttcaatttcttccacatcgattcaacattctgggtatgggcaaggcgattggctgggttcacaaagttttgtgaatggttcactgtccaatgaacatagttttgcaaaaggttaggaatt

SEQ ID NO: 11544 - DNA, 2897 bp, Heterodera glycines
  unsure (1)..(2897): unsure at all n locations
agtcactatttaagtttagatttttattaaaaaagtttaaatctaaaaaattatttaaatgaaatcaaaaaaacagaaatttttttaaataacaaaaaatttattattaattaattaaatacaattagaggcgccgatttcgatttacaaaagaatcttataataaatgcacattcattcattctgaggatggatcttaaaaatccaggacatattaatccgttgactatccgatttaaggatttgtcacacttgtaaaaaaaataatttaaaaagaaaatttttatataaaaattaataacagtacataattaatgcaaaaattaattaaaaagcaaaaattaattaaaatatattaaatattaagttacaaaaaatggcaacattaaaaaacccaactgtttttgtaggcatagcattgggcacgcgtgccgaaatttgttggcccgaaggaattcgttcattgcactccgccactcgcgtgccacctgcgcagtgcgcgcgatcagaaacattccattgacaatgacctcaaaaagcgagtaaataattaatgagcggatttttttcgtaaaatttttcctcaaattttaataattaataaattcccaaatcgatcgggacccaaaatctcggggatgaactaaataaagcattttatggcattgatatatggatcataaatttgatcgagaatctgttcaaaattgggcagtgtttggcggtacgtttccagacaaaaaaaaacttaaaaaacgaaaatttttttttccaagaatttagctttttcccagtaaaaaattttaatttttttttttttttgaaaatgaggataattttgaaaattagtatttttggaccagaaacaattgcatttagaggagatttaggtgtatctcgagaattttataaagaatatagagcggcgataaggtagaaattatccgcagtaaaagttggcaatttaccgtcagtttatcggtcctttattggaagaaccgccgatttaaaaaaaaaacccattaacagtaaatacagaggcacacattaaaaccagagaatcccgagtctcaaatcgagactctcgaaaactgaccaggtcaagaccataggtcagccaaactgtccgctcctcaagtgtctcgcccgccaggccgcacctgccgcgctgctccaactcgtacagcacgcgcccgtctttgacagtgccggaaggccgtgcctcccacacctttgaagcgagaaaagtgatcaatcaaaactgatcagtgatcgggattgtaaaaaaaattttcaaaaattgccctgaaacctatgcaagaagcgctgaagattttcatgttccttataaaactgacacacccggccctagcatttaagatttttggagcttgacaggaatacgcttatttgttagggaaataatatgtttcagtaaatttcaaggaaaaatttaaaaaattctaactatcttttcaaaattttatggcaaaattaagtttttaaaaaattaccaaaaaatcgctgaaaatttttctgaaatttttatataaagatttactaaaaaaaggcccctcttgaaactatgtcatgacaaacattgaaattcaagagggtcgaaaattgcagattcgagagcgaaaccccaaaattcctagacattttctcgaatcaagactctcgacaccatggtgtttaagagtgatcaacagtcaaaaacctcacttggttcatgtccaaaatgccggcatctttgcccttcggctcccacaccaagtagaagccgtactcgtccagtcggaccaagcagcccgggtccaacgagtttgtctcctgttcaaaaaaacaatcaatatcaatcattctgatcaatcattatttccagcttggcattgattaaaattttgaatcgattattcccgatcaataccacttcaccgatcaatcaaatattttttagcttgcattgattaggttattaccggtcacttaatcaatcaacgtcaccatcctcatcaatcaaatatcgctcttatcaatcaatgtttccctctgatcactaatcaattatatcactacccttatcaatcgatatcgctctgaacaatcaatgtttccctctgatcacttcggcccatatgttatatatatatatatatcattttatcaattattatcaccgtcctaattaatcaatatcgctcttatcagctaatgtattttcctggtcacttgtcaattaatatcagcgccctgatcaatcaatatttcactgatcagcccttttcttcttacatcgtcataacggtcaaacacatcgccacgcagcagtgtctccggtatgttcactttgttgcgcaaagtccataactctttgttgttcatttgtctgctaatttgttcagcagctgctgattgcggcaccaatttttgatttatgttaattcaaaattttataggcaattgtatgtacagcaggaaattgttggccaaaaaatggtttgggaagaagccaattcgcacgctaattatacgccaccaattaggcacggccgatcagttaattagtctgtgcgcgaaggatcagtcgtcaagactctcgagaggagagtggtgttgttgtcgttgtcgtcgtcctctcgatgattgatttagtgccgccaattttatttgattgtctgctgacaagaaaaggggggaatgaatgatggatgggatatcagaaaaacttcaaaaattaaaaaacgggtttttattttttaaaaattgtaaaatttttatcgatgattccgatcttttaacattgtaattttattttagtgattgngtacacacacattttaagtgctgtgattgagtcggngcgngccaataaaatgtaatgtgatacccatcaa

SEQ ID NO: 11545 - DNA, 711 bp, Heterodera glycines
ccaataaaaatgtaatgtgatacccatcaaagagaattaatggttaattggcctgcccaccgcccccccccccccaaacattccgccaatgatcggtccaactgattttgatcagtaaagtgataagaggagcagcaaatattttgatggttagttagttggaatttttgatgatcaaaaaaatgttagaaaaaaaaaattaagaaaaaattggcaaaaaaatggacattaaatttgatgagtggcttataatgatagcataacaactctatcttatcggtggtcagccaaattggtttttgatcagtgataggagaaggttaaaatttttgattgaaaatttgaaacgaaaaacggttattaaaataaaaatggaaaaaatttagcattaaaatgtcatccaccaattaagaatcgagaagatttttctgatcaaaattaaaaaataaataaataaatttaggtggcaaaaaaaaccgtattaacattagtgcttaatcaacaccaaaactttttgatcagtagcgataagaacagaaaatttaatttggatggaattttaaacaaaattttttttttataaaacggtataattagtgataagtgcagcaaaaattaatgggaattggaatttttgatgaacaaaaaatttaaaaaatgcaataaaaaaaagaagggatggccaatttcataggatttttaaattttatg

SEQ ID NO: 11546 - DNA, 692 bp, Heterodera glycines
  unsure (1)..(692): unsure at all n locations
aaaaaaaattttttttgtttagaatatttttaatcccttacctagnttttcaaaataattttttattatttttacataccttttccaaaaaataanagttttttnnatgtgtncgtncgtnncattcattctcatgcccaattaattgttggacgttttgtccgtccgtaatttgtcccctccacccaattcattgttcatccaccgatgctccgacgaacaacacacgcgggcacttttgagccctgtaatttggcacttttgttcatcagaggatgaataatttttgggacggacggacggacggacggacggacggacaatccgacacccaacaaatttgcgctttttgttcacaccgccacattcgcgccgcggggtgtaccgggtgaggcggggggtaagagattatttggggtgggattaacgggatttgttggaggatatgttgaaagaaaatgtgttgaaacgggcaaaaaatttcaaaaaatgaatgccaaaaaaagcaattcaaatatttttgtttttagaaaaattaacgctaaaaaaatgtagcaaaaatttatgtcaaaaggattaaaataatttgtaaaaaggcatcaaaaattaaagagaaaaacgagatataaatatctttttaaagaatgcttataattattaattgatccaaaattttaatttaacttctcttc

SEQ ID NO: 11547 - DNA, 4015 bp, Heterodera glycines
  unsure (1)..(4015): unsure at all n locations
gttaaatgattaaagtgtaaaatgttcaaatatatccgcaaaaaaaaaaaatcattgatatgataaagcgtttaatgatttaaattttggcaattttgaattgcatgaaacatagagttcaccaaaatattagcggttggcgtgggatttggttaaaaattcatttctttttaaatatttacagaaaaaaccagttttcatacagaatttttagcgtaagtttttgcatttgtatatttgcaaaaatcgggggggccaatggccaagcaaaagccggttctttttctgcagatggagtgtgtgctttgtctgttaggggttggttggttcatttgtcgctgcttctttgcttaatacccaatttttcgggctcccatttgggcggattaatttttaaaagaaaatatataaattaaaaaaagaaattatctttagtatttttaaggatgaaaaactaaaaagaagacaataagtgaacactgataaaataaaaatttaattgtcagaaattaattaaatatgtaaaataaaaaattattaattaataatttcatcaaatggatgaaaaattaaaaaagaaagaaaattaaaaaaagacaagaagtgaagaataataaaatgaaaattaaattgtcacaaattaataagtatttaaaataaaaaattgttaataagtatttttcatcaaatttacatttgggaggaaaataaataaatttaaaaagaaatgcgattaaaaatgtattgaatgtcagttaataaaagttataaaaaaattctaaaaatatattttaatcaaatcaaaaaaacaaaccattttttaaacaataattgaaacaattaaataaatgtaagaaataaataatcagaaaacagaaaataaatttaattttttaatataaaaataaacacttaaaagtacgaaaaaaaaagaaagtttaattttcatttgtttaattcaatcgcttgaaactgctgatgttttggtgtgggctttggcggtgaaattggatggatttcttccaatcggcccccttaatttgagttgatggtttataggagtcgggggggggggggagacaaattgttttcgcaacggaggagcaatttttaattcgatcgatctattcaattcatcacaatttatcggaaaaatttatgtggtccggtgtcgtagtacagcagatatgtacaaaaataaaacaccaccctccgcagaaaaattgaacaaaaataaatttaaaaaataatttttaaatttgttaccgtacttcttacagttttctgggggggggggggctaaattgcctgggaaagattaaataattttaatgaaaataattatttgaagaaaactgaagttatgatttatgtctgtaatgcataaaaaataaaattctggcgttggccccttcaaatttaatgaatttttgaagaatcagagaattcaaatcaaaactcgtttaaaccaaagcaaaaaatttggacatacaaattaccctcttaaaatttgataggagtatcattcagagataatttgtcattgatcaggtgatctcactaattgagagttttacgtgattaaatacattattaaatcaattaaataaaagtaatgttcatttaatttaagattaaacggcttttcgacatttttaaattatcatacatttattatgtattggaatcgaatttaaaacaggcaaatccatcaattaaatatcccaaaattggagtaaaaggaataaaaacctcccgcaaaattggcgggattttgatgaaacctattaaatcataacagtaaatttaaaccattcggagcaagagaagaatggaatcaagtggattttgagttatagttcatccagctctgcccgccatttttaatactatattaaaatattttgaaatgaaagaaagaaatgcaaaaataagcgtcaaaataattacgaaagaattgggaattgggtatgtgctgtaactcttttcaaatggaaaaaggaatttgcttcaattttgaacaatttgtgatttttgttaccatttgtgatttgtttatcaatttttatgatatttttatcaatcataatgtctcatttgtattttcttcttcatcaaaatgaaatttctgtttttcattttttcgagtttttataaaaaattttggaaaatcatcaattttttggaccccaaaatgcaggtgaaattttgaaaattcataactcacttcactgttgggcaattttaatgcaataaagctttaaaaatagagaaaaataagtattgaaattttttgttcttgaatatttaaaaaaatttgcacttttatttcagttctgcttaattttaaaaattcttgtttttatttggaaattattagaaagttttttgtatgattgcaactataccaggaaaacccaaaaattagcgacaaaataattgctaagaaaatgaaactggaaaaagaaagtcgcattaattttaaactgaaattttttaagtgcaaattttttttaattctatccctagagaatttgaatattatatttgaaatttttttttctgaaaattggcttggcattccgttccaaaatcattcagccgacgaaatggtaaaatttgcgcttcccaccagcagccgggcaccgaaactgcgggggcccaccacacaacggacaataataataaatcagtcagatcgaattagccatcaaaagccattactcacagcaggtgtcatcaacaagaaaaaataaatattagtccctcagggcatggggaaaataaaaatttaaaaaagtaaaacaatttaaaaaatgataaatgattaaagaaaaaaggaatatttttaatgaatttttgcaaaaaaaaaattgaattgtgtttatttatggttctgaataggacggaatgaacatgatttttatgatcagatgctttgatttgcattgtttcatcaatttttagccttgttggtttgtatcttaaaatatttaaaaataaattattttattttctgcaaaaaattagattaaacaaacgatgacagtaaaaaataggtcataaaatttgcttatttgatttgcttacaaatttacatgaaatgaatgtaattaattgactcaacttctgctcaatttgttggcggagatgggaacggaaaatggagatgaatgcaattataattatctttttgtcggatctttgcaaaaatggaataaagaaaattgttaatggaccgacggataaatgaatgaatgggagagcggtacaaagtcaacgataaaaaaaaaaattaattttgtgttaataacataaaaagataataattgtaaatatttattataattagtaatgaaaaaaattattttttttttgcgaaagctttcggatacggagtaactgataaatggcacacttttgggatggcattgcgcggtggtatatatcatttttttaaaataactcggccacctaaagccttttataaaccacgtcattttaatgattttttattgccccgtttgactctcgattgtctccatgagcattgaattataaaagttttgttaaattttattaaagaaattatgctaaaattttaaaccgagaactgggcccctatcttggtctgcaggaatgtccccaaaaaatgggttgcggggatattgtggagaaaggcaactaagaaaaaaattatatcggccaacaaacaaattaattactgaatcattagcaaacactaattacccaccattacgcataccttttcaaacacattaacatataaatacgaaaatcaacagtcagtcaaaagattttctcaaagatttctttcatatctgactgttggctgaagaccgtttgagcattcattcacaagtgatgggtaaacaaatgcaaattgggcgtgtgtgtgtcggtcggacaatggacgacgccgggagggacaaagtgtatttataaagtgatgggggggacagcgccggaggggngggggggggggggagagaag

SEQ ID NO: 11548 - DNA, 2830 bp, Heterodera glycines
aatttggcttctccaattaatggtctccaattgaccaccggcccgcatcacacgaacatttttgacatggggccgttacttcggaaatctcgccgaatcaacgactcatttctttcggctccgccagtttcattcgcctttcgagctctaccaggaacagcgaggatactttggttggagggctcgcacgcttcgccacttttaacggccattaattacccccttaattagatgaagtcccacccccaactcaatgggcactctctcacgcctcgtcattccgcaccgggcccacccgtggcccatttctccgtcttccgtaccctccgtccccgcatttccaccggccaatggatcgtcccgctgcgttggcatttcttccgacgattggttccctttacgggtcaatttcgggtacaaaaaatcgcagccaaaaaccaaaatgtcctcgtcaatttcaaggagtactcatcgttttgatgatacttttggttgcgctttttggttctgctctttggtcatgccgaaattacaaaaagaaatgtgaacaaatgacggaggagagagaaccgttactgatcagaaagagtaaagtgccacccgagcaaatgatggcaaactgatcagtgaagccaccaaacaaaacattgctactaaactaacagatgatcactgatcaatcacttttaagctttgtatttttatttattttataaatataaaacgaatttgtcaattatcataatgaaggtacattttgctaatgattataatttaaaataaatacaataaaatctgatgaaggacaaaagacacttaaaattgagattcctttcggcaaaatgagaaggcgccttttgccttggcaacggaagtcgctcaaagatcgtttgcacccgaagaattgaaatagggaggcggcggtgccatttgttcggccatcggtgccaccgttttacggaagccgggggcaacggaaaggaaaaagcgatgccaccggagccgattttggtggagggagtagaaacggtaaagcaaaagagcgccgagaatgtaggcgagaacgaagcaactaaaagaagaaaggggtcatgaaagcatggagagagaggagaagcagtgatcagaccgacgtaatgaaagaatgatcagacagaaaacgaagcagtgatgaaacagggaatgaagcagtgatctaatgatcagacaaaagcaacgatcatcttattgtgatcagacagaaacaatgggaatgaataaatattgagaagatatggagtgatcagagggaaaaatggaatagctatcagtgagtggatgaaaatgaccttgtggtcaagcagccgatcagaaaccacaagacgccgttgcgcacataagcactcagacaatcgaccaaaaaggaggaggaccgaccagcagcagaaaagtcaaggacaaccgaattggacaattgtcgccccgactttggcggggccaagaaaaattcggaagagaccgaccgaccgacgaaattggccgcttcacaggcgaaaaagccgctttgattggccgaaatgttgtggacgagcagagacccatttggcaacatttgcatattttgggaagcgaagtcaatgcgatcgccattctgaaggaatggaatgattgaccagtgaaaatgccaaaatgcaacgaaaactcacgaaaagccaattgatcaccggcgacggcactccgcgagtctttggacattccaaaagtgccaattggctcttctcggcactatgcaccaacttcggccgttgctcggcttcaaatggcatcagaaaggcgactttgagccgtgtgctctccccccgctgtccattggccacattttcgcaccaatattcgccttcgtcttccggcaaaatgttggtgatcaccaagaaaccaatcttcggaatcgggtccatttcgcgctgatcagccgttgggtttgactttggcgttctctcagtgcccaaaattgcattcgaatgcctaattaagaggaatatttaatggcgaagtaaatttatgacatttttgctatgttttaattatgatagagaatgccgagacaaaaccaattctctgtgccaagattgggtttaaaagccatctttgccatccatcacccacccgttcactcgtcccacttctctgccgtccttcatccatttggcctcttcttcgtcctccgattgctcctgttgattgaacaccggttcgcagatcaatgcgctggtcgaattgatcggaacgagcatttcattatgacgggactgatcagaagaagaagagggagaaaaatggccaattggagacgaattggaagaagggaaaagcggaagaaaggcacagaaacggaggaggatcgaaacggcgactgaccaaaccgaaaacggagcgaatgttcgtagtccaattggcaacattccatcaattcaatcgtccgattggcaaaaattccattagataaatacgacgacggaagtcccaaataattggcagtgcgaggagagaagcattttaagcgaaaataggagagaaatcattttgccgatgtcggcaattaacctggacggaaatgtacgcatattaaagtgagtgattcatgcaaccctcggggggagtaagcagaagcaggaaaagaactcagagttaaatgggactttgacgggagggaaatgcgccaaattggggggggggggattctaagatttaattgcactaaattctttcgcaatttcataaaaactgaactgctgcagtggaagaaatgcatttaacgggctggaaagggtcagtcatttgaaagggcact

SEQ ID NO: 11549 - DNA, 1196 bp, Heterodera glycines
agaaaaaacggaggaggagaaggatgagattgaatggcaaaagccgtgagaaggaccaacggcggaaggggggggggcaaaaggggatgaatggccattggaagaatgaccatttggtggaaaaaaggaccaatgtgatggacaaagtgccaaaagggcgaataaagtgccaaatggacaaaatgatttatggcccggcccttcctctgctgagagaacacttatttgttggctatttatgggcagtgcggtcattaatcattattacacaatatcagcagaggcggcagtggaatggcatcaaattgtgccgggtgtttcgctgtcggcagcggcaaagtgtaaataatccccgggggacaagtggacattctcagcggcgcgtcgatggagtggacacactgccatgcccactcgctaattgcattaagtgcttcgcgccaacggaggcgatgcgttcgtcgttcccttcggcacttccttccgccgatttgcaaagagtgctcgcattggcatggcaaacagaaaatttattgaaattgcttcaacgaatcctctgagaatttaaatgaaccctgggggagggacaacgaacgataaattggcgaaatgggaggaggggggggggggattaagcaaatgaaattgaggtttgtgttgttgtgctcattagcatttgtgggggcagtgaacgaaaggaattaatgggcaaaaaagtcaaagggacggaaaacaccgaggcaaaagcaattttaggaaattgcgaaccgagctcatccccattccggaaataattttaaaaaaaagtgcagtttcattttctgaatttggcatttctttcctcgcggcattttagtaattgccggacaccgaatggacggagggggaggagaggaggggatgtcatcgcgaattccgtggctaggcacacgaaattcccacagggtcggcacttttttccctttttgcgtgaattgcggtgccatcaccgcaattcaaaatttgtagaaaaaagcatgaaaagggggaggagtgactttttagattaattatattattttagaagaagagaatggaagcattcactgcatccaccgcttgtttatttggaatggccaaaggaggggcaaaacggagaaggaaaagttcggccattcatccttcagaagggggaattaaaacggcaaaggaaaatg

SEQ ID NO: 11550 - DNA, 5748 bp, Heterodera glycines
ccttatccacctctgtgatggttggggccgagatggcgccgcatcatttgctcctccaccaccgccctgagccgtctcttccgattcgccgctctgttccgctgattgcgctccttggcctcagcccgcttctgctcctcttccgcctcccttttgtgctgctcctccgccgtttgttcggccatttccgtcttttgctgctgtgccgtccgttttccgcgtgccgtccccccggcaacagacggcacagtgccgtcgcactcctccgccgttttgccaatgtccaacgcttcgtcctcgtcccatgccgcgtccgttgtgctccatcctcgtcgtttcggctccccattctctcgcttcacaactccgtcaagcacggaaggagccgttgctgaaaaaagagggaggcaaaagtcaattaaatatcacttaaaagtcgactaacgcatctatttaggacaaatgtgcaattttcgagactaaaattgcgagacgggaattctgtcgagtccgcaagccttttgcaattgtccctaccttccctctctttcttcctctccctcaccttttccgttcgtcgtcctctttttccccgctgctctcttcttctgcccctttccctcgcccgtcttcgcctcgcttttcactgccgtcactttccgtggcagttttcttccgcttttgcggctgctgaacagccactgaactggaacagcccggcaatgagtcagcagtgaactgttcggcgtcgtcgttgtcgtccccactcgccgagtcggaagaatcctccgacgatccatcggaggaggacgaagcggaggaagaggagaagtcggacgcgtcggtgtcctcctccgcgtctaagccaaccaacgaatgattctttcgctgacgccgcttttcctttctctaaaaaaagggatcattctgtcacttgtccgtctcaaatttttttaaaagtaaatcgatctccaaaaactgcgggtgttttcgtcgtcccatgccaaaatgcctcccccccacggccccatttttgcctgaatccgttggctgatcttcagcatttttttctcctccgccaattcgaaatgacacattgagtaagcgaggttgatgaactcatgttggacgatctaaacagaaaaaggaggctgaaatgggacggaaagagaaaatagtcgatgcccacgtgattatcatagagcactctgttcaccaaactgccgcaagattcgcagagaatccattggacatccttacggggaatgtgcaaacggtcgaagcgagattggacactgaaaagaggggaaatggatgaccaaacgaaaagtgaaacggcaattaaggactaatgagggacagagagagaggacaaaaaggaatcacagatttagaaccatggacaaaggaaaaggactaaagcaatgataatggaggagacatgaataggaaagaaacagataaaacggcccataatggaaaaaagagacaaaaccaaaacccacctttcaaatttggtcacgccgttcgaccgattgtcgaaaattgtgagataatcatccataacaaaactaaaagtttctcaccgtttaaatgcgcctacaattgacaaaatatcattggccacccattcacattgtaaagcattaaccaacttaaaattcaaatccgccaaaaatcttccgttaaatccaccgtatttatgtgtttaaattcttcaaacaaatgtcacaattggaattgttctgtgttcatttcaattcgtttcgccattaatttccgttctctctctgttcgttttgcatttgttcaccaccaattgggccaaatcgctgaactgtttggcaaccggcgagtcggcaaagtgttcgaaataagattgaccctcgtcaagacttttagccagccgtgggtccagcggcaattgagccaacagttcaaggctcaaatcggcacacattttcttggccccgccggtggtgttggggaacagttgggaggcggtggaacagcacggacacacaaattggcacatattctcaacgacacccaaaacgggcactttggtcttcacgcagaaattgacctgaacagggaagggattgactaaatgtaagcagaaccaagaccgtattcagaaaacttggctatgtaaagtatagggatttttttaatttgtggacggatcaagacaaatgtggtattaatcaaaagtttattcgcttctgatcaacccagacttggattctgtagtgccggcatttacagtgtcaaaagaaaagaaaaattttccgttttttcattttagggggggggggggggtgaagtgcgttccgtttcccctcttttggtatttaaaaatagacaggcgaattagtgcagtaattgtttggcacctctttgcgcacatccaacagcgaaatttcctgcggagtggtcacaatgacagcgccgtccaggcaagaagcttggagcagcatttggacgatggaaatgtgttcgtccgaagtgcctgcagcaatggcaaagcaatgaatggaaaatttgtccctttttttttgttacccggcggggtgtcaatgatcagaaagtccaactcgccccagtcgacgtcccgcaaaaactgttttatgagcgcattctttcggggcccccgccaaattatctgacaatttgtgagggatgaatgaatggttattcaatgccagttttttgggtcatcgctcagggaattagttcgcctccccccggtaaatgttgaaaaattttttctgaaaagtttccagttttttatgatttttttttaaagaaatcgggtggggaaacgatgtgacacccaccgcttcgtcgcgagtgtccaataaaaaggcaatactcatcacgaacagattgttctgcacaaaaatgggtgtccatcctggaaatgaaaagtcaacgattaagaaataacttagaagaaattgaaatttttaattaagggagtcaatggcaaatcgcattaataaagttatttgaaacaatttattttttgttgacaactgaaaacccgaacacctcacaaattttatatttttttaaagctgcagtggtaacaatttttttgacttcttttttcgacaaaatataattttgcaattagtttgtaatggtatcacatcaattgctgttaccctgatcactgttttgtacgctgttctcctcacagccgaacatccgagcttgggaaggcccgcaaatgtcgacgtccaacacggccacataaaagaaaaaagaaaattaaaaaacgcgtgaaacgacgccaaactttgaacggcttcgctccttcctgcaaattggcaattgcgtaggccaaactcgccgtcactgtgctcttcccaacgcctccctttccgctgagaataagcaactgaaaattggaaacgacggatttgccaaatccacaatgatcaattcactttgtgtttgacgcccgccaatcgttctgtgattagcgcaatgtccgggtccaccgccctttccccggttgagcaggcactttggttgggacagccggcacaggcggacgttttaccagcattggcactggcagtgcctggacaattctcattggcattctctggtacgtcagacattttaaaacaaaaatttgtaaaattaaaaacatataaaaatggcataatttaaaaaatggcaatggaattgaataaacaatccaaagaaattttgctgttttttcaatttttattcatttgttgttgctgtctttgcaatttgttctgttggattctggccaattcgctttcggcacttcgattctcagtgaatttgaacgtttcgatgaattcggccgcctcctccacggaatagcaaaggaccaaagaaacgtccattcggtagcagaacatgttcaggtcacgaagcaaaaaggaagggtcttcgacattgacgtaagccaacagaacctgaaaatgaaaatcgatgagaaatcatggggaaaaattgtcaatttaattaaatttgaaattgtgcagtcgtaaatcctcccacctttacggggtacgccctcagatcggtgaaacgagtctcaatgtacccgcagtggagtttgtggtatttcagggccaggtaaagaagcccacaattaccagaacattcaaaatcgcatcttaacggcggaaagttgctcaaaatgggacaaaaagtatgttccaattcactttacgtcggatgaccattcgtacggcacattccgaatgtatttgagcaccgggttgccctcttgtcggcgccggtttatttttaatgtggacaaaccgaacggatttccccttgggagtgccggggccaatagcgccgatgtttggggctggtcattttcagaggaagttgttgccattgaacgtaaaaaattaattaaactgagtgggaaatttgtctcgtctctctcctcgctaatttgaagaagggattcattttgggcgctctttcattggttttttgaattctccctactttttggcattttgctcattcttttattttccccgacttttctcggttgttttcgatttgtctcttctcttctttgcttttgctgtttgttattatttgtttggtgccttttccctctctcttataaattcgcttccccttctacccattccaaaactcatcaaaacaaaacagcgatttgtgctgttgtgccttttcttacacattttcttttcgtttaaaatttttttgttttttcagctttttcccatttttctcaaaatgttccgtttgcaatcttttcaaactgttggcaaacagtttcgacaggcaatgtcaatgcaacaaattgcgaaacggtaaaagcattgaccgccccttcctaccagtaatagtttctgggaatggactttttatttaccccctttgggtgtgtaccactcccgccgcctgggaccgtctccccccccccccctgtacattcttcgctcttttagctcaatttccgcttccgccgtgcgtcagtccgctttgcgtgaccctttcttccgcgaccccatcgacctttggctgtacgaccccttgcgtccaatgcgtcggatgctccgccgtgcgtccgatcccttcgcgatgctcgaccatttcttcaacgaccggtgggtccctcaggtgaataggaaaagagggagctgtgagaaaactgttgtaattcttgaaacaatttaattgaaggtccgcgacaacgcggccaaattgggcatcgatgagaagggcaatttcacgtactctgtggacacttccggatatcgcccggaagagctgaacgtcagcatcgaaggggacgaagttgtgatccaaggggagcacaaggagacggtggagggtgagttcaaacgaaaaacaattaacccctatttaagtttcactgcatttccttccgtcttaattagccactaattgttttcagatgagactgtccaccgccaattcgtccgtcgcgtccgtatccccgacggtttccaaaaggaggggctgaagtgcgcgatggacgacgcgtgccgcatgtgcgtcacggcgccgaaggcgggcgcggagccggcggccgaacgccgaagcattccgatcgaagtgaaggcgaaggcaatcgacgaaaagaaatgaaaaacgacggacaaatcgagaggaattgtttttttttccattttcacacctgggggagaaaagactcatcctttaagcttatgaaatgcattaaag

SEQ ID NO: 11551 - DNA, 5103 bp, Heterodera glycines
  unsure (1)..(5103): unsure at all n locations
tttataaaaaatgttatatttcaaaaagttactttttgaaacattttgttcaatttctaatttattggcccatctttcaattgtcgtataatttacaccaaacatttgtttaatttctgctctaaattcttcccattcttttcgtgaatgttttccattttgcataaattcattttttattttaaaatatttttcaacagtttccgttttttcatcattaattttttgctttttcatcgaattcccatcttttaattgtttcttccatttataaatagttttgatatttgtgcccaaatgttttgctaatattttttgacatttttctctttttccatccaattttccttttaatttcgattttatttggccatatatttgatcaaaatgtcttaatatttcaagtttttcctcatccgaatatctgtttctaatattcaatccaaattcttttttccattcataaattttcttttgagttgatcccaatttttttgcaaattttctttcaattttcttccattcttttgctgaatatttgtttcccatttgcttgattttgtcttttattttatgaaatttttcaacaattcgtttattatgatcataactttgtccattgttttcatttaattgttccaattcatcacaattattggacatttcttcactatcttctttttttacttccaaaatttcatcaaaaaattgatcaaattgtcgactattttgttgaatttgattattctgatcatcaatttctccgtgaattttgtgatcaattcggcagacaatttcttctgctccatcgtcacatctttgtccaaatatttcatcaaagctttttccttgttttaatttcacttgcacggtctgcttaattgtatatagtaggatcattaatagggataataataataataatttaaatttcatttttctataatttcttataatgttaaaaataaagaaataaaattgcaaaaatgcctaaatataattatttttaattttatttgattttgccacgaatgttcaaacatattaacatgtaaaaaaatgcacacaggtgtcctggtttttcatagttgtcctgaattgaaaaaacccatgagaagaaatgaataaaatatatcccaaattttctgttttaaaattaaaaaaaaagcaaattcttgaatttcgctaattttttgaaaagttcgaaaattttctaaaatgtgtggttgacaatctttttcaaaaaaaaaaaaattttttttttggctctttcgccgcaatgttccgcactatgggcatttcgtaaaattgccaatttttacagttttttccgagaaaattcaaataattttaaaaaagttgttacataaaataatcgtaaaaattttaaaatatttcaatgggggggcgggtaagacgaagcaggacaaaacgtcgtcggccgaaacatcgtcggaagactttttgaaccataactttgttcattgtcaatcaaattaagcattgttggtgttgttcgatagctctgtgtatttattattaatagcttacaaatatcttcaaaacatccagagctttcgaatgatatcatggatgttatggttggtcaacaatgaaaaagttatggcttcttaaacttggctgggacggagttgaccgaaccctaccgaccgcccaaccgagcgggtaccggaaggacccatccaaaatcccgcgcctattgaaggtgtgttttcctttgaagatgccgccttagtattattaccgcaaaatcccgcgcctattgaaggtgtgttttcctttgaagatgccgccttagtattattaccgcaaaattccgagcctattgaaggggtgttttcctttgaagttgccgccccatcaaaaaaccaggatggggacgaaccgaaacctattggactccctatgaagttgccgcccaaccaaatccgattctccaaattggtgcgggtgttttttgcagtgccgcgccgtgcagcgccgcggaagttcatcaatcatccgtctgtcaccaaagtgacaggtggaggaaattcaattcttgaaaattaattacaaatctttttgctcgcacgcaaaccttttgggcggttttattttatgaaatcctgagattttttatcctgaaattaaactattttgaaaatttgctaaaaccgtgcggtttttttttgcatatcttcccttcgccgcgcagcgccccggaagggcccctccaaaatccgaaacctattgaaggggtattttcctttgaagttaccgcccgcttgcgggggcggtattttcttttgaaattgccgctacgtgatacttccccgcaaaatcctgagcccattgaaggggtgaaatccgttggttgatttgtgaacaggttcacagatcaaagatattgtattagtttaaccctttaaagtcgccgcccacgtaaatccgatttccaaaacattgcgggtatttttttgtctccatctccctctgcgccatgaagtcgccgcgccgcgcaccgccgcgaaaagttaatcaatcattcccctgccacaaatgtgacatgtgaaaatactttcaaccaaaattcaagttcttacacataatatcacaaatactttgtcgctgttttttgaatgctgttcattaacatttaataatacgtgtttaaatttaccatcaatataattgaaagcatcaataatttgggtaatagtccaaatgcataaattttggagcggtatgatcctgtgaagttgccggcttctttacgtcttccccgaaaatttcaaaacctattccaacaaaaaataaagttcaacaccgttcttcttacagcaaattcaaaaaaaattgtttttttgatattcatcattattttagattttggatttagggaagttaaaaataattactcttatgtctttgccacgtaattctcgttgttcttctttcatttcaaatttaattgaattcccaaactcaatggtaggggattttcatctaaagttttcccgctgagctaatttatatacaaataattttgcatttaaaaatttgaaatatttcaataaataatttaatatgaaaaggcaatccttttgagttcccgaaccttttcttttgaatatatattttaaccgttctacatttttgaatgtttaaattataatattaattttcttcccttgaaaatgctttttttgtgacataagatggtatacagcttttgaaaatgtctagataattgaaaacacttcccaacttagaccttttaaaatctccaagcttaaggcattgaaaaagatcgggacgatattaagatattgattactcatgtaaaaaccccaattaatattttagtaaaaacaaaaagctttaaaatcgcaaattttgtccaaaaattcattttaatgtaatgattttattagattacacctaataagagtatacatttcctgaattaaaatgctcgagtatctcgttttcctcattaaaccttgctcgctccattcatagattggcagagctatgacagaaaattaattaacacctgtgtagattcgaagagcctattttgccaacagccgccagcaaaatctttaacaaagattaaaactaaaaatagtatctggcaccgaatgtaattctgagcaggcttttgtgggattccaatctacaacgatatattttaggaatatttgaaaaaaaagaatgaaaattccattcatttaaaataacacttttatagctccctaaaaaattattttcgatcaaaaaagttatcaaaaaatctaggaacaaatatttttaaaggtttcaaattttcaaatagaattcgggatttttaatatcgatgaaaaaataaaatatatctttctttcgaccgactgtttattaaggggtaattagtatttacatgactttaattatttttcgtaattttgcaaatttgtttaccgttctcaaaaagtttcaggaattaaactaaaattaacctttttaaggaggttttatatttaataaaatttcaccgaaaaataatttttttaaaagacatccaattttctagttatgaaccgtgaaagggatttaaattttttcttcttttgaatattattgcattgcgtttcactaaatttttatcaatttctgcaagtttattgttacaataacagacagatgaataacattttattatgttaataatgtataaataaaaattaattgcaaaactaaatatctttaaggcacaacaattttgtaaaatgaataaagaaagaaagcctagaggaagacctccggaaaataaagaaaaatctagtgaaacatttaataaaaaagataatcctcgaatagaaaagaatttttcaaaaattttaaagcccaaagtccaaaaagaaaaatccaatgaaaattttaataaaaaagtaaatctcaaagtagaaaagaatttatcaaaaattttaaaacccaaagtcccaacttaatgggaaaagaaatagaaataaattcagaaagggacacaaatgccgttcatactaaaataaaacttcctccgatttatgtaagattatagatgacaaggctaatatttcaaatatttatgattattgttcatcaatcacttcttatcaaaaggatttttagcttttgacaaaatttgcatacgatataaaatacatggacaatggctgcttgaaaaggcagaggaaatagtatgaaaagtaaaagaaaaagcaattctaaatacaaggtgaagagaggggaaagtcaatgggatactggttaaatgtttacccgaaaagggaagagagttgtgaaactataagaaacgtctaatactattgtttcatagcgaaaagagatgaatatgcaacgaaaaccggtgaaatgagaatgaaaaggaatgatgatacaaggggatagatgaattatgtgttagtatgtggtcaaacaggcaaaggaataggtaaaattctgtgataagtcatgaaaagcaaatatatatggtgannagtgaaaaggtaaaagcatgaatgtcctgtggtaagtggtgaaaagaggtaaaaacaaattcgacaggtgaaatgtctt

SEQ ID NO: 11552 - DNA, 3781 bp, Heterodera glycines
cctgttcattttgaaattattacgcaaatttaatttcacgtaatattgacaatcatttgaaattgtaaaaatatatttcattcccgacttaatcaatcaattctctaataaattgtaattagttcattttaacgattaataagcatcgaattttcactcactgctaaagtaatgaacttttcaaatccaagccagcggctcgaagatttaaagcaacgttcgaattttttgctgaaatcctcccccctcttttgagagataattcaaaaaatttgctgagaaattgcagaaattttcatcttaatgtcaattaaattttataaatttaattgggggcaatcttaatgattataatgcatttggcaatttttggttaaaattcctcagggtgcatatcagacggtacactatttcctccttcactccgcttaccatagtatgtatgtggaagaaatagtgcactgtctgccggtctgtctgcgtttaaaaaaatttgacaaaaaagtggatacaaactcgcgtagtacctatttttgtaccagtacgcatttcgtcgttatcactagggcgagaattcttaggtttttacttattttttctgcggctttaactcgacgagaaatgcacgaaaaacacattttttgttcgaaaagctcgtaaattcgaccctaggaatccctattttggatcttcgcccttaaaaatccttatttggatgttcgcccctaaaataagtttttgcccatattttggcgtttcgcccttatttctcgatttttgggaaattcgttaacaagaatgcaataaaaacgaaaatacacccctaagaatcaacccttttatcttatttgtaactgcaatcagtgaataaaatggtttgtgttttggactctttcgcccctaaaaatcctcgccctagttatcactcaaacacaaaaatattccaaaatattctttagtaaaatagttgctaagttctaattcgaaaactgtcagagaaatacggttccatgcttctcatcaagaattatccgcaaaaaagggcgaaaacctaaaaatcctaacacaggtaatgctgagaaaaatgggacaattgggaagtggggtactgttggacccaacagtttgactcgaaccgaattcagggtttttttcacccgaaaataggcgggcccgacttttgtcttttgcccaattccgttttacattctgtgcggagttcgagtagcagatggacttcttcgacattttaattcctttggacaattttaatattaaactcattaattttaacaattactgaaacgataatttaccgttttagcgtctcatcgactttttaattagttgtttaattgctctcaatttatttctgaaaaacaactcatgtcgagaagtttggcggatcggatgaaagtgttgttgagcacagccaaaggggcggacattcaatttttggttggggagggagaggaaagagaggcgagttgaaaattaaaaaaaagcttaaaaaacattaacttttatttagctttttaaagcccataaaaccattcttatgtctgcctcggaagtgtttgagacgatgttccgttatgatacccaaaatcctgtgaagattcccgatgttgaagttggggcattcaaagtgattttaagctttatctacacggatgatttgagcggattggacggagacaacgcaatggccctactttacgcgggtgaaaatggcgggcgggggggggggggttaactccgacaattttttgcaaaacatacctgtgcaagggggtgggagggggtgggggagtcagtgaaggcggaaacaagacaaaacacagccggggaataaatttttaaaatttttttctaaattttagaaattttccaagaaaaaaagtcttagaaaaatttttcttagaaaatttgaccaaaaaagaattttcaaaaaattttccagcgattttttcaaatttacttatctatgcattactaagttttttcaaaaaaatccaaaaaaaatcgctgtaaaattttgaaattttccttcgaattttataagaaaaattattttatcaaaattttgaaatttaccttcgaattttataagaaaaattttgtcaaaattttgaaattttagtaatttatagatgattttaccttttcagcaacattcgtggaaaagtgagcctgaaaagcccggcgggaatggtgtccctaactccgggcattcttctgatcaaccccgggaatgatatcccgaccccgttgaaagatgggatagtccgtcttctgaaaaccccctgtaatccccagcagttgaaagattatctctcttcaggcttttcttatcccgatttaatttgtgttttttaatattttagccaaaaagtacgacatttctgatctaatgatcgtcctttgttcgcgaattgaaattcaaagtctgcccaatgttatcttagcctttgtccaggcccgccttctcaaaatagatgtgggaacaacatgaaaaacttgaacgagcttatctcttaacccgtaaattttagttttttgcccagcgatgtttgcgttacatttgtcaaaatgcgggccttttgttgggaacagatgactttttggaaagtgaccaggattgtctttgtgaattattcgatcgtgatcaattgctgatcagcagcgaatttcaaatttggaaatgtgtaatttgaattcaatttttaaaaatttattctgttttaatgaccattttttcgtttaggcactccgttgggccgacgaaaagtgccgtcaaaatgccatcgaatgcaccgctgagaatcgtcaaaatgccatcgaatgcaccgctgagaatcgtcaaaatgccatcgaatgctccgctgagaatcgtcgttctgtgcttggtccggcattgttcaaaattcgttttccccacatttcagctgaggagtttgataaggaaattggtagagaaagtcagatataataatgtcgagtttgtttttttaattttcagtgccctctggcgtcttgtcaaaagacgaagtgatcggcatttaccaattcaaacgcgatccgaatttcagcggtgtgcccgggctttatccactaaaatttccatacaaagcgcgcgtgtccgattggaatattcccaagggcaacagaggaacaatagcgatggaaattgagaaattgtcggaatttgcccgagccgaagaggggagtcaacgttacagcgaagccatacaaataaacggaataacgtggaaaatattggcagaaatacaaaaggaaaataacagcacagaaaaatgtttgggcttttaccttttttggtgcacctcttcagaagaaggttggaataaaatttattttgatgaatattaattttaaataaagatgaaaattggagttgcatttgttctgcaacatttcgaattgtttctcaaaagagcggcacggaggatttaattgggaaacgcaatgattttgacaagacaacacctatgaagggattctcgattttcatcgctttttctgtgagctttcattaagcctttactttaaaatgaaaaaaaaaaattaaggaattaatggacgaaaacaaaggattgtatgacaaagaggaggacaaagtgacgttggcaattgacgtttttgtcgaggaaccaaaaatggacaaattcgattcggactcaaatcaatcaaacgggaaaattgtgatggaaattggcaaattgtcggaatttaagcgagaaatttgttggagtgaacg

SEQ ID NO: 11553 - DNA, 2143 bp, Heterodera glycines
gaaattggtgttcgtcggatgtgtcgtcttcatcaatcaaaggcatgtataacggaaaaagttaaaatcccaattccgacagacattcagtaaatatgtttagtccgtcatatttttcataatattcgatgacctctttttggttcgtctcgtcctctttccttaagaagcccttcacatacactggcaataagatatgaatcgcgttttccgtttgcctcaatacagtcttcatcatcgaaaatgtagagtggattcaacaatgtcaacgaacgaatcatcatacaaccgcttacacgataatcacgatgtcttctgtatgctggaggtagtatcgtaaaacgaaagacacattctcaaggagtgctattggcgtaaagcagcctcattcacgaccatattcaactaggattggcacacatgggctgagtcggaattcagaattgaaatgttacgctcttttctctcaatagggcttctgagtgtaaaataggtaaattaaattaggaaatcgttatacagtacccactacgtggaattatcgaacctctcacagcccgacatgaagcagctttgatgattcgcaatgcattgctctggtgttaaaaatgtatatagatcacgtgcgcgaagcgcccgtcctgaggctgcgatgaatttctaaataacatcactttctagcgacgcggcgaagccgcgtcccatagcgcgatagcgctttaaaacatcacactaatgcagaattaatgttttgtatgttttaaaataacaaatgagagccatatattaccaagccacgcatgcacaccatagccaactgggcaccctagtttatatataactaaagaaacagtgagtttcattgctaaaactaaaatctcgggaaccgctggcggaaggggctcgggagtgtggcattgcttaagcaactttttgaggcgcatccaggaaaactataggcattccgttccggaggccaactgagcgccagcggcgctgaaatggctttttggggaaaaatgcatgcagtttttgggccaaaacttttttcagggaagccggagccaaaaacgtctgctgggaggcgactaagttggaatgtttgggaaatttttttcttcttgggcgaggccctaggatcaaagccctggcctgcaaaaattcgcaaaaatttttttccattttttcggtttttcggttttttgggaataactcgctgggcattgtgctgagcgtgttggcgccgctgaactttttgtacagctcggcgagctctatcttgtccattttttaaatttctgaaattttcagaaattttcgagctaggccccctcatcacttttgaggtttttgaattttagtattttttacagatttttccggggaaaacggagaccactttcaagcaaccgtttttgatgctctatcgattggtgtcattttcagaaaaaatttttaaaatttttttggaaatagaaaattttccggaaatgagggcttatttcagtttggggtctataagttgtcaggagttgattttagcaaaaaatcttctatgacaatttttgtagggaatttaaagccctatataatgtgctttatatcatctcattatcacgagtttaaaaaaagttataaaattaattgtgatttttaaattcaaaaccataggggggaccccatggttttgcatttcatgaaaattttttttgctcctaaattagccaaaatgcatttttatggcctaatttaaggtgctgaactcgaatatatactttatttttggtttcagactttttggtaggtgtttaaaattttttgaaaaatcgtcaaaatttgagccccggaaaatccagtgaaattttgaaaattcataactctcttcgtttttggtcaaatttagtggaataaagtttgaaaaatagcaaaaaattaggagaattttatgagatttatttggaatttctatcttccaaaataaaaaagttattccagaatttctggaaaaattcgatttttcagaaaaaaattcctaactcccttctgaaaaagtattttataaaaataatatactcaaaaaatccgcaattttttgctctatttcataaattttattttagctttttatcacttttttgaaaaa

SEQ ID NO: 11554 - DNA, 2285 bp, Heterodera glycines
  unsure (1)..(2285): unsure at all n locations
ggggcggtacatctgtcaaagcgtacgcagggtgtcntaaggcgagctcagagaggacggaaacctctcgtagagcaaaaaggcaaatgcttacttgatcctgattttcagtacgaatacggaccgcgaaagcgtggcttatcgatccttttgaatgtgtaaagtttccagcaagaggtgtcagaaaagttaccacagggataactggcttgtggcggccaagcgtccatagcgacgtcgctttttgatccttcgatgtcggctcttcctatcattgcgaagcagaattcgccaagcgttggattgttcacccaccaatagggaacgtgagctgggtttagaccgtcgtgagacaggttagttttaccctactaaagacctgttgctatgatagtaatcctgcttagtacgagaggaaccgcaggttcagacatttggttcatgtgcttggtcgatagaccaatggtgcgaagctaccatctgagggattatgactgaacgcctctaagtcagaatcccgcctaggcaagatagcaatattcttgctccccggtgtcgggaggcactacttatgcgccgcttgcggtgcagcacaaatgccccagcatctggcccgatgtgcgtgcttaattgctcgcacattgccaaagccgtagcactcgtgtgccatggtggaacgtcggggcgcaaaatcacttgtatacgacttgactactggtcagggggttgttagcagtagagcagcttttacactgcgatctgttgagacttagcccttgatcggatgatttgtcttctttttccccctttactttttgtgccaacaacattttaggtaaaggtacatgagaagagaagggtctctcttaagggagtcaaatgcctcgttaccaccgagcccttgatcggatgatttgtcttctttttccccctttactttttgtgccaacaacattttaggtaaaggtacatgagaagagaagggtctctcttaagggagtcaaatgcctcgttaccaccgttaagtcaggtaggcaaatgcctcgtcaccattaagtcaggtagccaaatgcctcgttgccaccattaagtcaggtaggcaaatgcctcgtcaccattaagtcaggtagccaaatacctcgttgccaccgttaagtcaggtaggcaaatgcctagtcaccatttagtcaggtagccaaatgcctcgtcaccctgaaattaggtaggcaaatgcctcgtaaccatgaaattaggtaggataagttcttgactttgctttttttccatttattccaatcgactagtgctttaaggttttgtctttaactttgctttttttccatttattccaatcgactagtgctttaaggttttgtctttaactttgcttttttccatttattccaatcgactagtgctttaaggttttgtctttaactttgctttttttccatttattccaatcgaccacgttaatcattctctatacatttagtgccttatttcatgaaattatatataatttaattttaaataaagaggctaatttttacagaaaataaatagacgctgactaattagctaacatttataaagaaagtagaaatttgattaaatgcatatacaaaatattacttttttaaaatttgtataaagttcctagtcgtatgtgctttgcgttggttggttggcgtgggtgagtgtggtggttgggccgtttttgcgatattgtggctggaaaaaaaaatgcgatttcactgtggggagcgcggccgtctgggttcaagtgcttgcttgcgcttgtgctcggcattgaacggtgatggctgctgctggggtgccacctttgtcgtggcctcagtttctccagcgtttggcagctgtcgaaatgaataaaacatgcagctcgtctgtgtgttaaagaaatttggcgagttaattgacttgtgtaaatgtggcctaaggcacaaatgctgtggggaactcagcactggggatgctgaacctaaagttggtggtggtgttggtatacgagtgagtggcgtattgccatggttgacaagccctatgagttcgtggatcggaactccttgcctggggaccagtgtgcttgcattcgaaaaaacacgaggcataagcgcccgaaggcctttggcctgaggaagtgtcctaaccggaaaatccggagtgctcgtgtgagtgcctgtgcactgccctcggagctgtgtccagcggcgagatgttcttcacaagtccgggaagctcggatgcctggccagcgctgt

SEQ ID NO: 11555 - DNA, 5136 bp, Heterodera glycines
gcctgacaaaaagagaacatgcctagcaaaagtctcttctccaattgctgtcttttcttccggcgacgatggaataaaacaaaagaattcgcccagaagcaccgaagaaaaaccatcggatgagacggagggaacttctgcggcttttccttcttgggttgcagggaaagcgcagagagaatcagactatgctgggcattgaattacgtcgaggggggggggggcaaagagtctcactgtgactatcattcggaatataaattaatcctaaaaatgagtaaaacaactcaattttaatgacaaactagtgaaacatttttaatggcaactcgtacacaaatatttttattaatttaaaaatttatcaggttgaattctcctaaaactataattccaggggcctctccagctaagtttattccattggaagacctcatcagaatgagtgattgcatggggaaaatgaacattgctcacaaggtgtggtgccctttttttgttccgccattctttctttgactcttcccataaaaattcggccgatcattttttccttagatcgcaatggatcaaaactgcaaagttgaagactttgaagcagctgatccgctttacgtgtccgtgaaatccaacatgagaaaagcgtactgggatttgtttagagaagacttggcaaaagagcctccggaatttggacacgccttttcactgctgggggacctaaaacaagttcaaaaatattattatgctttgtttattttttaatcgttcaagatgcttgccgaccacttggaaggtgaccacttgaagcattcccttaacgccgtcggagagatcctcgacatgggcaaattgaagtctcttgccaaccaacggggcggcctcaatttcgaaatgggtcatatttgttcatttattgtttttcacaattttgttgtagtaattaaagatgttctcgatgtagtgggaagactgtgtgctccaattcgcgatgaaatggttgcaaatttaaagaaggaaacagacattgtcaaactgttcgagtaagcgattgtttggcaatttttgtcttaaaatttgtttcatttgcagcggcgtattttctctggtggaaatgatggaaatcgacatgaccaactttaaaatctcacaaaacagacaacttatcggctcttattctgcacaaatcgaattcgaagaatttgaaaagctaatgcaaatcgatgagagttggtcatactttgcttatttaacaactaacaatttctcaaggttcgtcgcaaaacactaaacggtggctgggcaagattctcgacgactttctttcttcacctgacattaagtcatgtgctgatggtcagaaggacggtctgacgcgagcccaagtgaatgaattaattgccaacttttacttggctttgttgacgacgaatccaaccgacagcgaccgaattccgttccccgaaacactcaaattggatgaaaaacttttggacgctttgaacgagaaatttttacaattggagttgacaatatcagcgatttttatctctgctaatttagtggggagaagcgtatgcgaaggaaatgatttcaaatcgcaattaaagcgtgatttaattgtgatcctaaacgacgtaaattggaggtgggtttgtgttcgttaaaaggatcaaaggcagattgaaaactgggatttatggtttaagcaacagtacacagaaattaaacaatgtgtacgttcactgtgagcacaaatgcagagaagcggctgctgaaaaaggatggaacgaagaacgagggaatactctccggcgacaattggacggcctttgcagaacggacgacccaatcagagtgatttcgagtgagggggacgtaacttataaaaaatattggccagaggaaaccaaaatgaccactgtaattctgccttgatttaaaaacacatttcaggaaaacgtttgtgcgattttgttggccaggccctcttacgcaggagcagccccatgcgaataccgtcaggccttagcacaattcagacggagttggcatcactcacttcgcagttttatgctattactgtgcacaattggaatggatttggtcgattttatggacaattgttggatcagttttatgaatccaaatggaaaataacctcgcctcattaaaattaaccattccttcgttttgtgcccaattgtcttcttaatattatagatgaggtcataaataaaaccgtcaaattatgctgctaaataaactcctaaatccccatttgtcgtgaattttaatttacgtagcaattcaagataccatggttcagcaagagagaagttggaatgatgacgcggaaaatttttatttttttcaaaaggggttttccactatacgccacaaatgaataagtaaacaaaatctcaaaaaccggaaaaattagtaatggaaatcaaattgtttatgagatattgtctcacgaggctttgatcgtctctagcaactgatgactcaaaaaactgatcgccatctgcacgtaaataacgtacagacaacacattttctgttccttcttttttttagtgaacaaatttaaaaatttcatgtaaagttagaaaaaaaaaatagggggctggaaaaaaattcgctcactggtcgccccactcttgccccgtcatctcatgctcactaccggcgggcactccgtacccttgttggtgatccttaatttagcatttatgctcaaaaacacatttatctcgatgagaatcatcattctcggctcttaaccccttatcttcacttacttgacttttaaccatgatatttgattatacagttaaacattgagagtgactatttagacccaatttggctatttttttcctaaaaaaatgatgaatgaaatgttatgcctaaagaatataattgaaatttctcttccaaaaaaccaaaacaattctgatggaagttgtcgatggattgatgttcttattaggcatgggataattatctataccgccggtcgagtgtacccgatacctgggcaaatatttcagtatctgatcaaaccaatgtatacgcgaccggtcggcccttttccgaatgcttgaaaatttccaatgttctacttaattatacattatatagccttaattatgcaaaaatctcaaataactttcgcgcccgtttcctcttacactcttcggaaacaaaaaagacccatcagtcgttcaactgaagagccgccacccgttcttacaaagggttcagaaaccgaatttgacaactgtgaggagccaccgccgccgttgttggaggcagaaacagcaacagacggagatggtagtttttgttttcattttttaatattaattatagtaaaacattaggatcggagcatgactttgtccagaatggttcgattaaatcagtaagagatctctccgtgattatgacatcagctgcagaaattggtagggcagcggaagacagtgccgccggctgtgaccctccagcggaaccctttattttggagagcaggttttcacattagggacattatttacttcagcctccttgattgacaggcatttgccttcatggttccgaaattgccctggatgtcatcccgatcaaaattccgaacttctgtttcgtggacgaatcgctggtgggcctcagtctggccctattgtctcaatcgaatgcgcattttgtggttcgccgatttataacagcgattgtcactgggaacggcgaccgacgagggctgaaagtgtagaaaagaagagcacaaaaggctcacaatcagcctgtgatttgactgacaacgaactcgaaccgtcgacttccgcggcggaaatcggaggaaaaacagctgataaaactcaagcgaaattgacgaccaggaaaaagaaggagattggcttcgatcaaaattattctcaccaatttgggctgagttttccggtgatgttcgaaaccgaagatggccaacggaagagccattgcgagaggatcacatttcgtggattcgtctactgtcatgttgtatgttcatgtttgttagttttcttcgaaaaattttattttataattttttcggtccgtgggtgcactacgtccccccccccccgtatcgttttcccccgtgaaattcaaaaaaaaattactaacttcgaaatttttcaagaaaatggaaacggcgggtgggggggggacgagctgctctcgggctcatagcaggggacgacgtagtgcacctgaaaatttagtccatcccccccctaaaataaggtcccccttccgaggggaattgaaaaaaaatcaatggtggttcaattttaagaaatattgtatgaaaatttaaagaaattgacagcacttgaagcgtatggtcaagctcgtaagatttgttttgaagaccaaaacggatcgggtcacagattggccattttggcaattcgtcgtcggatttgtcgacgacgtcgtcctttggcgaacaaactcgcattacttcgagccatttttcgtcgctaaattccaagatttagaaaataaaaaaaatttatatgaaataagtaaagttataaactttttgactatttattggcgcttaaaaaacgacctttcaccactaaaacatacccatcaaaaattttttcgtatcttttttcattcatatggacaagcaaatccacaaggtcaatcgtattcgatgggcctgaaaaattggcatatttaattaaatgaatttaaatattttcttttcctttttttcaaatttatttttggattttcaatttttttttctattgtactttatgctttccatctaaatttttttaatgtgcaaaatatcaaaatttggcgctaattaatctgctgcaataaatttctaatttttttttttatagtactttgcttatctggattcttcatatccagtgaataagaacaatgtcctccgtatttttctttcactacaatatctctggaaaagtcagtgcgaaaccaatgttcatttttaaatattcttgtccatccaaatgtgtagtcgtggaaaataaagtcgtgggcacagcacttaaaaaaaacttttatgtgtgaaacttaaatttattgagttatgaa

SEQ ID NO: 11556 - DNA, 5964 bp, Heterodera glycines
taagttatttttctcacttctaaaaattaacataattcatttttttttaacttttaagtagtgcatttttgaaaatttaaagataaaattctatgagtgcatttcaatttttattatatttatgttcaggaattttttttaaatcgtaaattcaaaacttaacgaaatctttttttaaacctaaaaattctcactatataaaagtgaaggaaaaagaatggaaaaaagctctcaccgatagcctgttctatgaaaacaccttttgttttggccttgatcacaattattctcttgtctttccgtccaccataaattataggcagctattaaaacaattaattagttgcgcattaattgcccgcggaaaatgacaaaaaaaaagtgatcaaagaaacacaaaacagtgatgggaagtgatcgccatcaggcacaagaagaaagtgagtgagtgtggtgagtaaacgtatcacaaagctttttgtttgatcaatgctccctaattatctttagccacaattgcctgcggccgttctcactctgtttctctcgttgcctctcccttgcacactctctttttaagcctcttcgtctctccttgtcacactgttttttgcctaactatccctttacatactatctcttcactctctctctctctctctcctctctttctcatcactcttaactctctttccctctttctttcaatctcatttctttcgctgtctctcataaatgtgtacattctctcgctgttgtccccatgaattccaatcagtcagtcaattgatttggcttttctctctctgaaaagcatagaaaaaagcagaaatgaatacacatatgtgaatgtgtattatcattaggggtgccaaaaataaacaacaaacaggtgcccatcccatggccaattaatgcccggcggctgaaatacagggaaaggcactctgattgagatatctatttttgtcagacttattggcattggcgaagattaacgaaagaagagaaagtaaacagaaaaaaactttttgccaatttcatttgcaggttttagcagtccttggcaaaataaatttcaaaaaatgttaagaccaattttacgtggaatacaactgttgcattttggattattggctagatttttaatcaaatcaattattcctgataattgagaatgtccgtgccgatgttcgcgtcttccagccgaaattcgagcaaattgtgcatctcctcctcgcgccatgcttctcgctcccattgcgcccactgctgctcattgcgcccaattggcgcccgcgtcatgcaatatttgttctgccttttcttctcaaccaggcgcagcgataagcgttcgttggtccgcaaattgtccatttcaaagtcttgcgggtcgtacccattaaaatattgttcaaaacagacgatgtaattggccggactggtggcagccaaaaagtcctcaaaagtgcattaaaatcagtcattagaagcagaaagggtcgatttttaatcattatcattaaattatgcttttgcccattttccgacatgccttcgtgtagtaaccaataatggatgtgcaaatattgcgatacaacacttttggacgcccatcgccgcgcggcgtttggagccattccctcatgtttttgcctggggcgttgccgtaccttatcaaacgatccatgcctttaaaataaattgatcgaagattggggcaattgatgaaaaaggttgaggaggtgcgcttcagtaactcgcagatgccgtgtgggctgcttaagcggagaaagtgcaaaagcagtgccaaagtcgagaagtttaactgaccattggccaatgtacattgcggtgatgttagcgatgccgaccagggggataagctgttgggcaagcagatccaaacttcgagtttgtttgaagtcaatcgtaaaatgcaaagtgattcccatttcgaaaagaggctttaagcggcgcagaaatgagagcacagcgccgttaacgtagcttaattaaagcagcaaaaaatggaaaatatagccacttttcgccaaaaaatgactacatttttgcactttttgggtttcaaatttcaaaaaattaagatgaaatggggttccggcggtgccgataagcgcgccgggaaattttgaatttttaatgcattttgttaagaaaattggttaaatttttttttcaaaattacattttttaagttttatacccggagggagggggaggcaaactgtaatatagggggttctctacagaagaaacatatacagtatatatgtattttttggacccgcgtaaagaacggagatgacattttccccgtccaatccgctcaaatcgtccgcataaatgaagcgcaacatggtcttgaacgcatcaacatcaatgtcagtgatcaaaatcggacttggcccttcttctgaaagaaaaacaagagaaattttgaagaatcccaagtttttattttcagaaaattttacacgagtttcagttattttaatttaaattgtgttcgtttcacgccattgaaattggtgccgcctattccctttttttatttaggtaaagtaaaatttaaaattttccaaaattataattactaatttatatgtgatcattttgatgttctaaatatatatatatatatatgtatattataaataaaataattattaatattttaaaatatacctaataacagttcaaaaaaagccaaaaactatttatcaaaaaaaaagccgaagactaagaaaaattaattatatgcagtacttgaaggttaggtgcaatgtcgttatataaaaaacatcaataattgcgttatataaaaaaccatgaaatgaaaaaaaaaatatgaaaattttcaaaaaaaattgcccataacttttgtctgtcaaccaaactaaacattcttgattgcattcgatagtcttaagagttactctattagctcactcgaaattcaaaaaatttcgtcatgtttgaacaaaatgatggccaaaaatacccaaggaaccaggtgctcagacatttttgtcataactttttttaaacttagccaaattttttgaaattttgcaggctactagaaaacacttaaggctaccgattgataccaagaatatttaatttgcttgatttttgacaaaatttatgggcagttttttgttgaaaattttcatttgatgattttttttcactaacgactcagcaccgagtacagacagtaccactgatacggactgaccaacaacaattttcgactggcgctttttccgagcatcccgattgaaactccaattaaatcgaatcttttttcgaccctttccgttggcgttgtgttttgttgctgcattttgggcatcaaaacgaaacattgtctcgaacacatccgaggcggccatcagaattgttttatgggctggcagaagcttaaattaaagggggtctaaatttttgattcatttcagcaaacaaaaaaaaagtaactaaaatttaatgcatggcgctgatcggcatttggccggcacagagtgccgccgatcaaggatatttttttagcacccacatggattttattattttgaaaattccgagaaattttttggttgaaataaaatctggttccggaaattctagccggcagagtaactaaccaatttcctcccattccggtgctaattaaagaaaattggtcctcccgcctcctcatttttaaaaatgcctaaagcgatttgggccgcttagaatggtaaaaaaacaactctgaaaaagcaagccaaaataggccacaaatgatggctctgttccagttaacgtgtccaatgaaaagaccatccccatttcttggccataacttttttttcttaaagcttaaactctcggggatttaggactaaacaaaaaataattcttaaatattctcgaaacaaagcttacttttgtattttctcattgtaatttttttttcttaatgacagtatttgcacttttctgcatttacaattctcgagactttaagctttcatttgataccaagaatgtatgctttagccaataaagagcaaagttatggctgaggatggtcatttattggaagcataaactggaatagagcacacaagtgagtacctaattaccctattcaagtaggacagtcaataaaaaaaattcttaatgaatttaacaataaataaaataaataagcatttttgcgcgagcctctttctgctgttgctgatctccttccccaaatgcaaattgaacatccgccccgttgccggtgctcaacaacagcttcatccggtccaccaacaaatttggttttgccatgacgtattgctagcaaaaatattaatttatttatttggatattatgttttgactgtaaaactgatttttagtgctacttttgtacgaattaaacgaatttttcagaacaaaattcataattggcacactgtattaatgggtttttatgggggattagattatttcgcattgattgttgtcccgaaaattttgagcccaaatcgcgcaatgacaccatgctaattttcccataatgctagcaattaatttgaaaacaaagaatttttctttctatcaacccatgctaaaaatgataaaaaataataatgataaagttcttagtaaatattaaagaatttatggattttcgaatgacaaaaaatggaaggttttggattttaagattgaaaaaaatggaaaatttggattttcgattgacaaaaaaatggagaacaattaatagactgtgctgaactaattatagggataagaggggcaaagaaggatgagatgagatgggatgggaacgatgctgaatacgacgaatggcaaaactgtgagcggcgacaaatggtggataacggtgatggaagtgacctcataaaatggaaaaaagagcggataaagcgaaaatgggcaaattaaaatcaattttttttttattattaaaaattataaattgttttttcttatacgctttaaaaaagcaatttaacgattaaatatacttaaataatccatgagatattttaaattattttaaagttgactcaaaaattaaaataattttttttcccaaagttgcaacaaatgaccccaaaataaacaaagtgagagcatttaattatcaatatcagctttatctccatttatctcatcccgtattgcctccatcttgcgcttattgctgtggaggatattttggttgatgtggcggaggcggcggtggtggcggagaaggcggcggtggtggcggaggcggcggcggtggaggcgggggcggggctccgtagcttgggggctgcggtggctcatagcttggcggttctggtggctcatacgctggaggcggtggtggaggcggtggtggcggaggagctggctcgggtgctggcggtgctccagacgcgtcgcgttttcctctgccgtatttgccgtatcctttagatggaggctgcggttgaggccttaaaataaatataaattttaataattatttatttttgagtgtttttactgttgtttctttccgcaatctcttggatagttgcacactttgttcgcctggtcgaacacaagccctttcgggcagttcagcttcgtggacacaccgcctgagcatgcgtagtaaacgttggacgcgcaatatttcggcgccgacagtccctctcctttgcctaaaatataattaatggctgctttaataatcaaaagaaacaatttacatttttgtggtggtgatggtgggtacggtcccggtcggggcggcggcggagctccatagcctgtagttggtcctccgtagcctggcggtggcggaggcggaggtggtggtggcggggctccgtaagttggtggaggtcctccgtaacttgacggaggcggtggtggaggcggtggtggcggaggcggtgg

SEQ ID NO: 11557 - DNA, 958 bp, Heterodera glycines
  unsure (1)..(958): unsure at all n locations
agagtgaattgaccagcaccnagtcgcccctcgtgcgccaaattctcgagccaattgctccagcgccctttgacccgctgtccacacacgaaaatccatcgtcggcccatcaacaaaagtcaattggttggtggtatcccataaattcacaacaaacaaagataaaacatacacaaaaacacataaaacaaaatcaaatgggcggaacatatttgcaatcaattaataattctcttttatcgtaccgacggcaaattaatgggagggcattaagggtaaatgagctgaacatttacatttataccatctctctcaatgaataggacgggggtatcaatttcaggactttctgacaaatgtgatttggaaaacattgaaagctcgaaatttgggcaatttataattagtgccaatagttttctccccatatcggcatcgcaaagtttggctttgtacataaatttaaatttgcggtcagagtgacgggggtatcaattacactgttagtaagaccaccttaacaacaaagccgggcacagcgtgatttcttcctgctattatttttttgttcttaactttggcccctcttctgggcaaaagaggggtcaaatgttcggcgctcagccccgagggtcaaattgactcatttggcgactgactttctccccgaggggcagtgagtgcaatgctatggatgagaaggaaagtgggggacgagggggggggggggataagtgtttatttgcatagaaacacggaagagactgttgaatggggaaaggcgagaaattgggccatttgagtcgagaattgggggggggggcgggagggtggccaaaagagaaagtgccggaggagccaagcaaatcggcaaaaatttaataagcagggcaatgaattcaaaattaaaaatgtatgaaaaattggtaggcacaaagctaatcatataaaaagcaaa

SEQ ID NO: 11558 - DNA, 2807 bp, Heterodera glycines
tacagtcagccgattaggtaattaatcgccaatgattttgggattaatcaattttagattgaccgcagaactatagtcattattgtgccgcaaagtacacaaacatacaatgagtggtgaatgagtgggtttgattttgcctaaaatattcgaagcaaatgcctagaggggcaacggaagaagaaaggatgagcgggggatgggggcgggatatgatcagtcagcgagagggatttgtgatcagtcagcagtggtgggatcagccaccggatgggggggggggacgagcgattgaagatagaccctgcggcgatgtagcagggattgtgtgcttttccgcaaattgattgagcgacggggggagtggtggcctctcatcagcagcagcagagacatgttagccccgggggacggggccacgattcgatgggatgtgctttctgctgttggcccccggggggacagcacatcgacagaccgacggacggacacagggcaataattaaagtgaaagaaatcaattgatcgcttaaacgtgacggattggggactaatgggggaacgaagttgaacggaagaaaatccaatcacagcgcaaacgcaaacaacaaacattatgtaaatgatcgaaaaaccgaacccaaaaaaaaaattaggaaaaaaacaagtattataattggtatggattatcaatgggtaatttgggtgagaaggtacattaattaataaggagaaatattgagctatgtataacacgaaataaataaaaaaagatgtgctaaagaactcaaaatatattgctaaataaagaaataaaaaatttattaaaacactcaattagatacctatgtgctaaatgcagtgaatttttttaaattataatttttcgtgatctcgtaaataaaaattggaaattatttgattgtttttatatgtctttttcttgacaattttttcgaaaaaatgttttcttgaaaaaaaatttaaatgctttattttttaaaatttcctcatgactttttgtcatgtctgaattaaaaactttttttttttacaaagagattgtaaaaataataaaaatgcgtcgccaacagcagaaggccatcacacatcatttacaaagaattggtcatcaccacagcagaaacgagcagcagaggaggatgagaaattttcaaaaaggggctaatgactttacgaccaaacgcctgccaaacactgtaaaagtgggggacaaaaaagggcttctggattaaaatttaaatgaatggtaaaaattttggtttaaaattaaaaaataaataaattattggaaaaaagtgcagcaaaaaaacagtaaagagaaaaaatatataaaataataggaagcgaaaggaataaattgtgtcctgatttggccaattatccaaacaattcatttgttttgtatagaaaaagacgaaaacatttgattcaaaattggccaaattattgaaattttttacggatgccatttttaatttaaaataaaataaagtaaataatttttattttttttttatcaattatttacttcagagttttagctgtgaaaataaccatgcaattgcttgtgtaatccatgttttttaatctgctttttggattaattcttaaccgaaaagtgcgacgattagttttttgcgaagaaagcaaagctttaaaacaaataaataaaaaacaatttattaaatgatttaatatttttgtctttaaataaattttgcaaaaaaaaagaataacataaaaataaactgctgtcggacagcacagcaagcagaaaatacgacggatgggtggacgaaaaggccattccccagggggattaatgtgccgttttccgccaatgtgttttatcggactatcgaaaacatttttacatacaataaattcaccttaaaatattggcattttattgtctaagaattttgaagtgaaagaaaattgggaaaaatttttgtctttaaaataaaaaatgttttaaaaattttatgccaaaataacaaataaaaaaaaatatgatataattttggattaaatttttaaaaaaatagaaaattaaaaggacaaaaaaaaacgtttaaaataaaatagacgaacttaattttttgctagatttccaaaaaattaaagtcttaacttaacttcactattagctaattaggctaattaggaatgccaagaaaattaaataaacatcgaccatttgtcttaatttaaatttatttctttaaaataactttggacatatgacatataagccaaatttacaaattgctgctgcttttgagcagaggctgggcgggacaacctttgaattcccatgagagtttatttttgagaccaactgaaaattggtattttcacaaaactggggaggaggagaagcattgatttttgcatgacttttgcactttaaaagcaattattaaaataaataaattattaattaacaactattatcacaatcatttttgaactggaattgaggagtttgaaaatgaacctataaatgaatctaaataaagcatcgttatacggatagacaactaatttaaggcctcgaattttttaaaattggttttaataccagaattttaatttttgtttctaatttgtgatttttgccaatgaataattttttggttcacgtgctgaggattgaactgtctaaaaaataattttaaaaaatttcaaaaatttggtgttgaattatttaaattttttcttatgtgaattttctgggataagccgaactcagtttatattttatttaaatgcctcttttt

SEQ ID NO: 11559 - DNA, 4849 bp, Heterodera glycines
tatgaattttcatcttcctagcaaatttccaaggaccaaaaaaattaaaaatattcttgaatttttaaaaaattccaaaaaatctgaaacgtaaaataaacatcatatttgtgctcaggaccctaatttaccccagaaaaatatttttcacaccctttttcgaccccaaaaaaatttttgaaaatttctagggggcctagctcgaaaatttttgaaaatttctgaaaatgaagtaaaccgttcgatagagcttaaaaagctctacaattttgctcttaggcattttttgtctaaaaccgacccctgacgagttatgggcccaggactcaaatgtcccgctcaggccaaaaattttttctatttcctggaaaaaatcgaaattttttcaaaaatatcaccaatcgatagagctcgaaaaacggttgcttgaaagtggtctccgtttttctgggaaaattcgttaaaaaatcctaaaattcaaaaacccgaaaaccgttttttaggcctagctcgaaaaattttcaaaattttcgaaattttaaaatttggaaaaatcgagctttcgaagctctacaatagtgccgctggccaccctgcgctcaggtcaaagcctaatgagttattcaacggggactgaactggacaaagttggtactgaatttttgtagaagcacacagaccagggggttagagatagaggcctggaattttttttaacttttagccaacacttcaacttagggccctcacagcgagcattttttgatttgagttttaggaaaaaagttatgggccccaaactgcgagaaaaagtaagaaatccttccctgggactcagtcgtccgcgctgaatttttttctatagttttcccggatgcgccgtgaaaagttgtaagaccgatgcacaactttcagacccctaccgatagccgttctcgagattttggttttaaggatgagttgccttgtcaatataacatatatataattaaccagaaaggtccttttttgacccagcctaatttctgcacaatattttgctttttatagtatttttaacaaattaattgaattgcaaccgggcatcatttcttatggaaatattgaaaataagcttaaaaatcaacaaaataacattttttgattcataataaatgtatttttctcaaaatttgattgctttcaaccaaaagctatctgtcactaattgccatttcatcggctaatatccccccccccccgatccatcgcagcaaattcgtgtggcgcgtgggggatgagggtgatgagcatctaaaataattgttgataatgaaggacgaagaagcaccacggatttccattggatggaaatgtgcctgattttgacacgtcatatttttgctgtgaatggggcaattttctgacatttaaaaaaatttcaaatacacccctaaaaaccaacttcttgcattttcaaaaattttttttatttattaaaaatgccgaaagcatacaaactgaattcttcattaaattctgctggaatttattcaattgacagcttccaatttcaaaaaaattatcaaaaaaaggactatttcccccgaacacctcgaaatgtatttgatttgcaattgtgcgggcgaaaataataaaaaatgagatttttctgggatttgtatgcataaatacaacggatttttccaattttgagcacatattttattacatatttcagaatttttagcatataaaaatccggtctctattcatcaagtcctgggctttatcttgaaaaattcttaaattatttaccagtgaatatttaatcggccttttcaagatgtttggaataaaatttacaggaattcttaattgatgatagcattctcatcttctactcggcattgcttcaacgaggcggaacagaaattcaaatgttaaaagaaaattcttcgttggtgctaatatggtaaaatgatctcaccacaatttctggctaattattaattacataattaacccccagggcaattctgttgcaaaagatgtgttcaaaaatggcaaaaaatggccacaaaaatggcacaatcttttggcgtggcctcaaattgcgcacagtgccaatgcaaaaggaccaaaacaatgaaaatattattatttttgagtcatcaattgcctcaaagaaatagttagtttttttattaatgttaagcaaaagtgctaaactgctgagccattcactcgcttttctttggaagaaaatggtgagaatattattattttatatattttaaattgactttctcggcttttccaaaaatgccattctcagacttcggtggccgtgccatgcaaaatgatttccttcgtttaaatggtccgtcgtttttgtcggattatgccgacctttggcttcttggacttgacatgctgccgatggcacaccaaacagaagagcaaaaagaacagctgaagatgaagctgttcagcagccgcagctccaaatgcttcattgaagcatgggtaacgatcaaaagggaaacattttttgggtatttgccaatttttctgttttctggcctccccctttgatctcagatttatgataaacttacaactcaattttgtaacaaaagtatccatttgatcaaatttaattctttaagtttgtccaaccatcgcattaccttgagccatccgatccaaaaatgcaattcgccttatagcagcatttttgttaaaaatttggacaaaactaaaatatttgaaaataattttttcaaatattttgtctttttaggcactaaaaataaaaaaactcgaaaagcatttttgttaataattttggaaaaatgccaaaataggcaaaaataagttctttcaaaatttttttaggcttttaggctccaaaaataaaagcctagaaaataggcactaataactcgaaaagtagcttaacaacaaccaaaaaacatgggtttcattcgtttcagcccactgggagctaaggaaaaaattagtaaaaaaagcactgtttaacaccaaagtggctcaaaatagcatttctgctttaaatttttttgttttagtgaaggtttttcgtggtttctggtagtttttaaggcatattttagtgcatatttgagcatttttcgggtttttaaggcatatttaggagggttttaagcaaattttatgcacatatttggaattttttttagtgcatacaacatatcacccaaataaatccattttatttaaataaatataaataaatttccaatcttttcagaatgatcagtcacacaaattttgtgtgcacacccgcaggggagattttgttaaaagaggttgggactcgaagaaggaacctacggagaaaggaattgatttgggatttgaatatttaaaggtgattcaaatggcgaattgtcagtcatttcttcaaaatttaggaaaaatttgacaacatttccatttctgttgttttgcttggagaagacaaacaatttttggcgaatttatcattcaatcggcatgtaaataattgacatattttattactaaaattaattaaaataaattccctttctttttttgtcttttgccaatgtttacgtgccgaaaccaatgccaagggctaatgatttggcttttgccgttttgtcatgcgattctttgtttatctcggcacaaacgtcaacttttgcttggtggattggctatttgatgccggacgatgcgaccattctgtataattccgatttccttccgggtcaatttttaatttcgttgaattttaaaataatgagtaattctgttttaggccttcatacacgtgaccattttttgcctgaatggattccgatcaaactgatcaatggcacaatggctctcgattatcaagcggagtgaaatggaagcgattttgaaaaattgttttaatggaagtggaaaaatgctaagaatgtgttggataggatcaaagatcacttacacctcatcactgttattgacttttcccctccccctttctctgtcttacattatttccattgtctccctctctgcctatctcctccacatttctctgaccccgcgtctttataagggtgcccattccctcactcatggctctccgctccattcattcgcattggacatttatttattattttgttctcctccgccgctgcactcctccgacctcaccattttgtgcatttatttttatttgtttattaataaattgttgatacacaacaattttggcgcagtcagcaggatcagataaattctgcacatcatcaagccaaatcaaggctaattctgcaaaatcttcaagccaaatcaaggcatattctgcacaacctccaagccaaatcaaggcataattcagcaagcctaattttggcacttcaaaagcctgggcggctttcatcggacatcgacaaaaactgatcacctgggtggtgtaagttccgctgggtgcggtttctcatagacaaaaactgatcacctgggtggtgttaagttccgctgggtgcggtttaatcaacattcaaaatggacgcacaacaacttcagcaaattttggacgcggctctaaaaaaatcagccgaaatttttgccgccgcactcaacattcaaaatcaaaacccaaacccagggtcatccacaacggcatcacttgcggcatcaatcaatgcccgcctcgaaaaattcaattataatccggaggttggacagacatacgatgcttggttgaatcgatacggaaaaatcgttcaacaagacggcgcttcgctcccagagcagtccaaagtccaacttttggtcggaaaattagacgaggaggaataca

SEQ ID NO: 11560 - DNA, 2960 bp, Heterodera glycines
ataccaccagacgaagagggggaatttgaccacatcgcttttgaatcatcgacgaatgactgcgtttcatcagaccacgaatcgtcaggggaatttgaccacatcggaacggaatcatcgacgaatgactgcgtttcaccagaccacgaatcgtcaggggaatttgaccatatcggcacgtgagcaaacgactgggaatcgcaaaattgtcaatgtacgtaattgaaagaaatacattatacgaaagcggttcatgctcagaagtacaatgtaaaagcttcagaagctcttccagtttctcgcaaaattttgtcccgggattgaaaagtaatggagaaggacataagcgcagagttgactttccgccctatgtcaaaaatttgatttgggttctagtcggttttacgcgtcccatgacatttaacgcgtcccaacagcagtttacgcgtcccatgacttttgtatcatggcggggatcaggggtggagcgcgcacagaaaagaaccgcggccgcgcatcgcacattcaaattgccgcggccgcgcaccgcggattgcccaaaaaaaaaaccgcggccgcacactgcgcatccaaattgccgcggccgcggatcgcgcattttttaaaatttttccattttttaaaccattttaaaaattttttaaattttcttatgtaaaaatttgttaaaatctcggtgtacactgtagactggaaatgtgaaaatgacaggaccggcccgggctcgggcttagacaattggccgggcgcccgccgggccagggcttttttcaaaaatttttgaattttgattaataaaatttaaaaaaatttacttttttattttagctttgaattatatcaagccatgtaaatcaaccttttttgctttttaaaaaacttttttaatggcgcattttttcaaaaaattttggggtacaaggggggggggggtccgatcgcacatcgcgcatcgcggcgcggccccagccctggcggggatggcattccgagcctcataaaattttcagaaatcgggattccgtgccatccctgtttccatggtattttagccatcctaataacaatgaggaaacctttttttgtccagtattcagtaatcttttttaaataaaaatttcgttgttaaaccttgataactcatacacaggcaactcgaacaatggcttagactaggcctaagctttaggtgtgcttagggttgcctttgcacatttcgataatcaaagtatacaatcaagaacaattagacgatttaaagtataaaattcgattgacggtttgaaaaaactgattttgtgacgagtaaatgatgggacgcgtaaaatgttatgggacgcgtaaaaccgactagaacctttgattttattataaagtacgaatttgagttacaattagcagatataaaaaatttaaaactaactacacagtgaagcacttttccttcacagggtcctaagtggtgaaggccatcctcaaggttaaagcaagcaccatctgtgagagaaaatgaaaattcatatttaatttaatcattttaccaaagtcttccaaagagtcagtcacttgtacaatggacaaattgattagaaagaaaaaagagtaaaaaagccaaaacattgtgtaagaaaagctaaactagttacctactttaggtacagtcatggtcaaatgtttatctacacagaaaaccgtgtccgaatcggttcagtaggagccgagatataaatttttgaaaatcaaaaaaacggttcaaaaccgtataggtaatagtgcaaaggggtcgactttttcgatattcaaaaatttatatatctcggcacctactgaaccgattcattcggacgcggtttttgacccatagtgtaaagggaaagagggcggaggttcgagtccgttgtgcaacattaatatttttatttattttgtccaaaatattaaaatatgacaatttttagcgccgataaatgtaatggacgaaaggaatagaagagataaagtgaagggaatgtcggaagaaattgcgaggggaaaagggacgaggcgaaggggcggaagatttctttatctcgccgaccgtcacatcccttcaatcattcattctctgttctcgaaaatatagacgcattgcgtcactttccgtcctttaacatggccttttatttatgtgtttctttatcatgtttttgcttttccccctccccctcccttcttcccctcttcatccttctctttccccactctctcttcatctctcctctgtctccctccttgtctcttctctccttttcctctctatttcaatttattttccttattccagcaagaaaagaaatggaccatcatcatcagcagcaaaaaagcgaggaagattcatgttcggcacccggagtaggacaaaaagtcgtcgaacgaatttttcgaccataacttttttctttctcaaccaaattaaacattcttggtattattcgaaagcattcgaaaaatgctattagcctgcaaattttcaaaaatttttatttatgcacaaaaaaatcagagcaaaaaaaagttcgaattactgggtttttgagttccttctggccataacttttttgaaacttaaccaaaatttttgagattttgcaaattaataataaacacatagagctatcgaacaacaccaacaattcttaatttgattgacagtgaacaaagttatggttcaaaaagtcttccgacgacgtttcggccgacgacgttttggggtgcaccgttcggcaccactggagtggaaagatccgttgcaaatgttaaatgggagagggagagagagagaagaggaatgggagagagagagagagatagaagggggatgtgagagagagagagagagagaagatgtatcgggagagagagagagagatagaagggggaatgggagagagagagagaga

SEQ ID NO: 11561 - DNA, 2074 bp, Heterodera glycines
  unsure (1)..(2074): unsure at all n locations
gatggcctattccggtgatggcgacggtacttttctttaaacgcgngcgaattgngcagngccggaagaggcagcccttatgaatgaaagaaatgaactcactgcccggagggcacagtcacccgcggattggcacggcacaaaatgttcactttcagcatcaacggggacgacgaaaattgaggtggaaattcacgaaaatgccaatgatcggacaacccaagtaaaacaacagcagcaccattgcttaaatgggaaacaaaatgccaacacattgccaaattcaaaaatgcgttggcgttcgccctctccgcagcggcgaaacgtcgcgccgccactcctgcaccgttccgccagctcgtcaatggcaaactttccgctcgctgagccatcttccgcttccatttgtcggccgtttggccaaagagtgtccgtcggaggcgcacaccgccaacattttgaacggataaggcaaatggacgaaaagagaagcattggcaaatcgaatctgaacattcagagaccgatttgaggatgcggaaaagagaaacggaacggaacaaagcgcggaaatattgtggaaaaaggcggcggaggagagaaagggaaacggcgcggaaaaggggggaaaagcggagacaaagggaggggtggcgacggtgagcagagctcaaaagcatgaaatgctttgtttggcattgccaggtgtttgtgaacggtgcccatttgtgccggggacggccccaaaaagggcaaccgccgccacttccgacttcgtcgccaccggaaattcagcagaaaaggcggccattcgccgcctctccgttgccatgcccctccagggaaatcattcagctgaaaaggccaaccaacggaatcgacctgagggatttgcaggtgaaaatgaaaaacattccttcggaaatgaaaattaatgtaaattttgtataatttatttatttgggtgtttgtcgaccgatataaacgccattaattaatgagtgaccaattcttgttcagaatttggacggcgctcagctggcggtccttcggacggattttaaatttgccattgatttggacggggacgcggaggggaaaagattgatcagaattatgagacgataacggaggacggagagagagagagagagaaagagagagagagagagagagagagagagagagatgagagagagagagagagagggaatgagagagagagagagagaaggggaatgggagagagagagagagagatagaaggggaatgcgagagagagagagagaaggggaatgggggagagagagagagaaggggaatgggagagagagagagagatagaaggggaatgggagagagagagagagaaggggaatgggggtgagagagagagatagaaggggaatgggagagagagagagagaaggggaatgggtgagagagagagagaaggggaatggtttcactggtgaaatttagtcccgttttaccggcccaaatggccgggaacgggacttggaaaatggacccgtacgggacccctgggaccgggactcccggtcctggtggtttgctcaaaaaacccgggaccgggggtcccggcaaaatcccggcggggccccggtcccgtccggtctctatttaaaataagaaatacagcaaaaatttctgaggatgcgtcagattggagctggacaaatattaaattaattgattgggaatatttattaacaatttattttgagttggaagaactttttgactataataatcagggcttttacagccctgataatattttcacattgttgactacaacaattttattcacaatattatttttatttttaaaacattcaccgatttcgagagggtacaaattaagcaacagaaatatacttgttattagagaccggaaatttcaaatttgcggatcccgctgcgggattggaaatcaaaattttttgcgggacgggatcccgcgggattaatcccgcatttaaaatttgcgggatcccgcgcgggattgcgggattttggaaaattcgaaaaaatttcaattaaattcaa

SEQ ID NO: 11562 - DNA, 1644 bp, Heterodera glycines
tttttcttcgacttttctatgaaaaaatttttctaagatttttttttgaaaaatttctaagttagaaaattttttccccggtggagttatgtctcggcggagtttcggctggcggagttttggggtgcaccggttgaagcatgcgtgtgttcatccctttacataatcggaaaacccctattaattcgccaaaaaaaaacgaaaaattaggcttttactttgcgtgaaggacacaattttggctgaacaaaggcggcgccaaactgaaagtttccagcttctgcttgttttgccttgtctttattacctgattaggctgttcatttgtatttgtagctaaataatgtagatttttagaaaacaaagggtcccactttggttttaaacagtaaaagtatcgaatttgataattcaataataaaattgtcttaaaattcttatcttcagcgctcgctaaagcatgcgtttgattgctagaaagaagtgtgcgctaatgacgcctttttcaatcaaagaaagttccatgtgtcgatattccctaaaatggcactgagagaaggcgggtcttgttcttcagcggcggcaatgggtttcttagcgcttgggagggatcggctcgtgcaagacttttcataataattttgtcccattttattaaggcactcgcgcacttttcctttccatcgcttttctcactttgtgtgttttggccgtttattacgcggttaatttgaaactgaaaaacgaatccgtcaaatattcgggctttgacgcgttcgacgaagacaccgccggcggcgaaactttgggttaccgaaaaataaaagcacgccaaataaactcgtgaattttacagcccctcaaggccttccgatgcattgctttggcggcaataaggtgctaatgattacaggctaattataattaattatatatatttttaattgtcattagcttcactttggactaacttttgggatttttaaatttcatttttcgcctcgcaatttggccaatcattcttaagattgcggaggcattcaatcaaacggcagtgacaaatcagaattatggtgccattgaagagaacagcgaggaaaaacaaagggacgacgcttatgaccgatatgtgacgggacaatgaaaaagaaaaagcaatagccaaagaaggatttaagaggagaaatgatcaattaaaaaagactgacaaataaacaaatggattaaatgaaaggaaaggaatgcagggaaaatttggggacggaaaatgcgcaaattaaaaaaaagtcgagttgcggaaatgccaaaaaaccggtttttgaaccggttcaaaactcgaaacattgagaaatttcacactctaacttttttttaacgatcgggccccgacaaatttggtaccatttgaaagctcttaagagcttagtctaaaaatcaagaaatcaagtcgaaccgatgccatctgagcacttggactactgagtcccagtaaaaagttacacttcagtactaaagaaataaaggatgaacaaaaagaatttgacaagataactttcgcaaaagggagcatgcgaagacggagcaagtagtggggcgagacggcttggaaggaaaaagtctgacgagcgccacaggcggttgact

SEQ ID NO: 11563 - DNA, 2222 bp, Heterodera glycines
ttttatgggcccattaaacattgaaaaatgaaattttgagacgaaaaatagaaattaaaaaatgagatataaataattttattatttgaatattttctgaattctgagtaggaaaagtgccgaattaatgaggttactccatttttttaatttgaatttttgcacggcaaattttttgtgtcagtaaactaatgaatgaatgaatgatctgttggatttttcgatactaatagcgtattttgcaattcaattttttccatcattataattgtgttaaattctcaattccaaattaatttttcgtttttttccatgccaagaaaatattcaaaaatattaaatgagattcaaatgaacaaatttaaaaaaaggtgtgggcgcgtaaatgaagcaacaaaagacacaaattaatgaaatacatttttgggtgtccctttttcaccctcttatcaaataaataataaataaggcataaaattcgttgaattgtccatttatttttgatgttatggttggtcggcgggcgaaaaaagaattttatgttgacgattataaggaagaaatgaatagatgagtaaagagatgataagaaaaatgagaataatatgaagatgatatagcaaattggagtaaaggaaataaaaatagtctaataggcaactcgagacatattttttttgggcatcattgactttgtttgatcacaataattcacttattttgttttttataaaaaatctattttcgaatctgatagagcacgaagaagctatagaaataaattaattacagagaatttgtttaatcgttcagctagaaaatttaatattccccatttttgcctctggggcaagacttttttgggtcgctgtatttttgctttaatttttatgattcagtgattaatttaattaaaataactctcgagcaataaataaaatttgttttgtaataataaaatatcgtcccaaagtataacaataaatggcaaacgccggtaatctctgctaaaataggtcttaatcacaaccaaaggcggacgataaacaaaacgtcgtcccgaaagacttcatttttgggacaataagtttggaacttgaaaaactgtaaaatttgttctaaaggctgcgttttcatttgtaaatagtgcaatgagctgcttttacaaattagtctttgctttaaaacagggctcccattcgtccttgaatggcaaggacgtccttgaaattgggcccttccacttgaaaatttgaaagtatccttgaattcaagaagtccttgaaaatgagcatttggaaaagtttttaaaaaccccaaagaaatttgataatttttgtaattttcaacaatatttggattaaattatggcattatgtcaataaaatgcaaatttaattgcccaaaatctcaaaatttggtcattttttggacaaaatctactaacaaacagcattaaaaatacaaaattcttccggcgccgccggaccctcccctatcctcaaaattaaaaaaaaaagcgcgccgtaaaaaaaccttttttgtcaacaaaaaaaaaaagtcatcgcatggcttaaaatcgcaaaaattaggcagtttttggtgaaaatctgttaacaaattgcattcaaattttcaaaatttttccccggcggcgcctgtcggcaccgccagaccccccccccccccttttcccggaaatttttggaaaaagcgcgccgcaaaaaagcgtttttaaagcagaaaaaagtcgtcgcaaatgaggaaaatgatcagtgaaaacaaaaaaatgttggaaaaaatccattccggtgaaaaatacaagccatttgaataatattaaccatttttcactgcatataataaaaatttgaaatgtccttggatttcatgaattttccccactatgtccttgcaaatcggcatacccgtccttggaaacggagcatggacgatgggagccctggtttaacacctttcaaagggctaacgggactgagaatgtcaattttcatggccatgcaataaaaaataaaaaattttatttttgactttttttattttataattaggaccgtatttattttgcacacttatgtatttcggcctaaaaataacataccgtatatgctctaattatcccccccccccccagatggaccactttgcgacctcctcaggaagcgggggaccatactagaaacaaaattttggattttcta

SEQ ID NO: 11564 - DNA, 871 bp, Heterodera glycines
tacctctttgaatacttttgtacctcttttaatcaccctccccccacttttaatcacttttgtacctcttctaatcactgttgtatctcttttaatcactgttgtaccacttttaatcactgatgtacctctttgaatcacttttgtacctcttttaatcactgttgtaccacttttaatcacttttgtacctcttctaatcactgttgtacctcttttaatcacttttgtacgttttttaatcacttttgtaccgcttctaatcactgttgtacctcttttaatcacagttgtacctcttctgatcactcttctttttaatcacttttgtacctcttctaatcactgttgtacctcttttaatcacttttgtacgttttttaatcacttttgtaccgcttctaatcactgttgtacctcttttaatcacagttacctcttctgatcactcttctaatcactgttgcacctcttctaatcacttttgtacctcaaaatttaaataacgggcgctaagcgcccgtccaaggccgcgaagcggcctaacaagctaaaaaacgggcgcgaagcgcccatctgaggccgtgaagcggccttaatagcccaacaaatttagaaacgggcgcgaagcgcccgtctgaggccgcgaagcggccttaatagcccaacaaatttagaaacgggcgcgaagcgcccgtctgatgcctcgaagctgccttaatagcccaacaaatttagaaacgggcgcgaagcgcccgtataagcccaacaaaatttaaaaaacgggcgcgaagcgcccgtataagcccaacaaaatttaaaaaacgggcgcaaagcgcccgtccaaggccgcgaagcggcctaacaagct

SEQ ID NO: 11565 - DNA, 1211 bp, Heterodera glycines
  unsure (1)..(1211): unsure at all n locations
tttccacaaagtgttatttttcgtttctgtgaattcataccaaatgattttttatcagagcattaatacatttcgatttatcatttatatacctaaaatattttaatgattnanaataatattaatttatttatagattctgcacgcgaattaacaccaattttttcaataaaccaccttttctttatccattttctatcaagatcacatgaactttttccttaatttgtatcgcgtaaatcttataaaatatttaaataatattaattttttaagattctacaccgcgtctgaaaccttcaaatctgtaagtaaaatattttccacaaagtgctaatttttccgtttctgttgaatccattatcaaatgatttttttatcagagcattaataaatttcgatttatcatttatataactaaaatattttaaatgattaaaataatattaatttatttatagattctgcacgcgaattaacaccatttttttcaataaaccacattttctttatccattttctatcaagatcacatgaactttactatttccttaatttgtatcgcgtaaatcttataaaagatttaaataatattaattttttaagattctacaccgcgtctgaaaccttcaaatctgtaagtaaaatattttccacaaagtgctaatttttccgtttctgttgaatccattatcaaatgatttttttatcagagcattaataaatttcgatttatcatttatataactaaaatatttttaatgattaaaataatattaatttatttatagattctgcacgcgaattaacaccatttttttcaataaaccaccttttctttatccattttctatcaagatcacatgaactttactatttccttaatttgtatcgcgtaaatcttataaaagatttaaataatattaattttttaagattctacaccgcgtctgaaaccttcaaatctgtaagtaaaatattttccacaaagtgctaatttttccgtttctgttgaatccattataaaatgatttttttatcagagcattaataaatttcgatttatcattcatataactaaaatatttttaatgattaaaataatattaatttatttatagattctgcacgcgaattaacaccattttttcaataaaccactcttttctttgagagatccattttctatcaagatcacatgaactttacta

SEQ ID NO: 11566 - DNA, 1442 bp, Heterodera glycines
  unsure (1)..(1442): unsure at all n locations
cgttatctcttccagcagcgactcnggagcanggaggaccttcctacaaaaaacggtttattggggttgagaaaaaacagggcataatcgaccgaaaggtcggtaatcgaacctttatgagacttttccacatttgcatttcgactttgaccggataggggtgggggcaggagacctgtctttgtatttccaagaaaatgaacaaaatccaggctccccctgcgaaaaaaaaaattttaaattgttttatcgaaaagagagggggggggggccattttttgtcaaattgctttgaaacgattgaacataatttgcattatttatcgttttgtaaatttaagcccaacgaaaagaagacgccatcggtgccgggaaatatcgcttctgcttcattgggtttgtcaatttttaaagtttaaaaacatttgcatgaaaaatgcgctttctcggcgttccataaaaaaaatttttcgtgtgcacctacaaaatttattatcatttataattttagtcttataatatgtaggctggcgcttgcatcactcaaaatataaaaattttgtccaatttttgaaaaaaaaaaaaaattcagaagagccctccgaggggaagatttacatggtggagaagggtagcacagtggacactgtgctcggtgtaaggcgcgatcgtccagccgttgttgcattggtccgctacatggacgagcagtacgaattggtgccaacgtgagaaacgggggggggggggaaccgaataatatatatttttttaaattcattttctaccattttttaggcctctgttggtgaagcataacccggcaaaggtaaggcatttgcaaaaaaaattcatataaaaatcaaccaaaaattaaaaaatgttccaataaatttttttttttttgtaagttttcacaaaacatgaattaataaaacttcttttaacactgcttttttcagttgatcgaatactatgagaagcatttgcgctttttctgatgggggcgaacttcggcggtgatccaacgacttgtgttatggcacttttctgtttgttttttttgacggcatttgttggataaaatgccaatgaataattgattgattgggcgattttttttcattgctgactcatccctccgttttgaattttttaatttgtctatagatgcttctcctctgtcaccactggactgcggcagcaaaagacaatttttttaaaaatgtatattcactaccgatgaaatatttttgggacaagaagaaaatgccacttaaaatacacaccttccctcccctagagcttacatcctaaatcatattctcgagagaaatttgaaaaaacaaagtctcgggcttattcattattttaggaaaaaatgctttttgaggaaaatcaaaaattgtttatatattttttggccccatttttgattgttt

SEQ ID NO: 11567 - DNA, 3418 bp, Heterodera glycines
accgggacttaccgggaccagaaaagtcgggaccgggaccaagtttttcgaccgggaccgcgaaaaaacccgggaccggggggtccaccgcgtttcggcgctggcgtttcggcgccggcgtttcggcgctggcgttcggcgccagcatgtttttggctataacttttttctatctaatccaaatccaacattgttgatataattcgaaagcttaacatgtttagaagctttttctaagcgattgcttcgcgattagacaattaccaaaaaagttatacatgaaaatttcgaaaagtcgaaatttttgaagttttttcttaataaaattttttacaggcttgaaaatctatccgctttttgtaaggctaatagagcatgataagagctttcgaatgataccaagattgttggatttggatgccaaagaaaaaagcttaagtggaaaaacgagctggcgccgaaacgccagcgccgaaacaccggcgccgaaacgccagcgccgaaacgccagcgccgaaacgcgtgggtcccccatggacggtaaaaacaaaaaaaatgccaaaaaataattggcgtaaatacaaaacgccaacacactcaaatgaaaaacaaagtgacttaactgtgctcaaaatactaatcaagcgttaacgcccttaaatccatttcattacaattaaaacaagtatttttttaaagtttgtttgagttaaaattggtctgcaacatttattagtacttttaaggatgcattttaaaaattctctttgaaggttagagatatgaaaatagtacgccaagatgagagagaaagagaaatgcattttatgttttgttttataacttttgaaaaagtgtataaaacataaaatggctgttttacagtatgtagaatttttttctctattgatacgcaaaatctaaagaaaatctgtaaggcgggaaaaaagttctatagagctaagttaatattgttttttacattgttaaaaacgaagagatagtacataaaattgggagaaacgaagacaaaaagtaaatgtaaaagaacgccaattttcctataattattagggatgcgatttttaggtaagaaaaatcccagaataggtacttaaataggtaaaaaaacatctcaaaataggtattaaataggtacaaaaattccaaaataggtaccaaaataggtaaataaaattttttattaacgatttttagtggaaaaaagcaaacaaaaggggaaaattttggtttatttctttgtaaacgaataatttaaatatttttaatatgttcttagaaaatattgacattttaaattaaaaattttgttacataaaaaaacaaataaatttttgggaaaaattttccaattcttaggggcgtattttttgattttattgcatttttgttaaggaattttctgaaaatccttaaataggtataataggtagaaaaactccaaaataggtaaaaataggtattataaaagtcatcgtagacacccaaaaccaagtggaaaatgcttttttcgtgcttatctgtgcgtattaaatgcgcaaaattttaggtatttaactaaaaatcgcatccctaataattattcattaaaaaatattttttggtaatctttttctttttaccgtccatggcacggataaaattgagaaacttgcaaccaaaaatgataaaactctttcgtattgtcgccaaatcgctgccgccaaataaatttcggaatttgatgaaattttataaagactatagaacagggctgggcgcaatttccccccccccaaaaaaaattttttttctggctattgattcttataaatgttcaaaaaaatatataaatcctattataatgatcagattttcaaaagatttgaaccctaaaaattcaaaaagaatgaatttcttcagacacaaaattataatttccttgtaaaattgaagtcaaaaataaagaaaatgcattccgaaaatctgttttttgattttcattaattcactatttaaaaaaatttttcaaaaaattctgacaaaaattgatttttgaaaattgcggattgcggattacggaaattgcggggtttttggacccccgtaattgcggattgcggatttccgtaactgagaaaaccgccataattgcggattgcggatttccgtaattgaaaacccagttgcgcccggccctgctatagaactccctaattcccataataaattgccatttttgaataaattaataaatgaattatatattattaatacatatttaaacttgcttatatcaaaatttttaaaaatatataaatcagagggattttaaatttaaattcgtaaaatatttaatgtatgacgtcaactgaatttcgtgctaatcaataaaattgatccaatatttctttgataatatacaaatattggttagtaaaatattttttgcccattttaataatgttgttttatacagacttatgcgtcttgttaaccatagaatttttcggtaggtctttatgttactaaatatggtgaatttttttccaattttgaaaaattaatttgaattggacgaattttttccggattttgtcaaaattaaattttaattggctaattatttctccgattttttaacaaaattaatttgtatttattttttctgtattcggtgcgtctgtggaaactttggaaatgcttaacgacattataagaaaggaactttcaaatgttggttggacatgtcaaaagttttccgaacaaatcgttgcccaaatgggcgagaatggcacaaaaaaatgtatcaacaatttaatggcggaacagtcgcccatacttcggcttctcaatttgtcaattggaacggttaaaaataaattttcaaaaattatttaataaaaaaaatgtcattacattgaaaatatgcttctgatcacctcgagacaaaatttttttaaatcagttaatttataagtataaatttcaaaaaataaataaaaacaatttgcttaattaatatatttaatatttatgcataatttaattcaattttcctcgattttggctgtcatcttccgcaaaaagtgacgataactcagctatacatcaacaatcaattgaagcaatcgtaaattgtatgaaaagcgtgacgaactgggccaaatttgagcaaatgtttttgtttggccaagaaattggagggtcaacagaaatatttttggtgccaaaaattcactgggtgttggcacaacgaatccgtgaacattttggcactgaaattggcagattgaggaatttggactttgaacaagcaattggtgccggttttaccagaattagacaaaaattggccaaattaattggcatttgccaacgaaattgataaatcattgcaattgatggcatttatcaa

SEQ ID NO: 11568 - DNA, 1631 bp, Heterodera glycines
  unsure (1)..(1631): unsure at all n locations
atttgccattcgcggtaaaatacgggatgaagaaaaaatgggaaagatgaaaaaacaatntggtgaagaaatgttngagaattgaaaacggatgattttntaagaaatntcgttgagtccctctccgatattttatttttattttgaccacatcaatttttgtattcaccgtattcttttcattctcataatttttgtattccattcaaataaaggagtaaaaaaggttagccgacatttgcggaccgactttaccaaagcatggaagtgaaacacgtaaaaattttccttggtataaaatcctgaactgacttttatgtgtattaaaatagcgaattttttcgctaatttcactacgtgtagagaagcaagaaaaaaatttccacttgttttgggacttctaagataaaataaaattctccaattgaaacagatcgccttgcatcagcttaccttcactaatttcaattttgggagtatttaatttattgaaaattaaaaaaaaaatttttttctttattttgacagttcaatcgggaaatactggtccgcaaatgtcgatccgcaatgtcgcactacggtaaaaaatgcttgtaaaatgatcatataattgctattattgctattatggccataaaactctgaaatcacgatttttaaatttaatgattataacaacttgaatatagaacgaatatgcataaagtaactaaatttaatatgttgatagcacacggtagctctaagtattctctatcaaaatatataaatttcaaaaaattttgaaaatttaaaaaagtttattatgggcataaaattcaaaaatcacgatcaggatgtgagcgggcggcaacttcaaagggctgcacccctagattttggctcttggcggcatcttcaaaaggttccacccctcacataggcacgggtttgtgcggtaaacacccgtgcgcaaccgtgcgcttttgacgctatatactactccctattctttaggatttccaagtaaatttcataaattgaaaagagaaaaattaaaaaaaaacattttgtgggaataaatttaataattaaaagaaagaagacactgttggcaccagcaggcacggcataaaaacataattttcttttttgaatcaatttccgactgagtgtttggcattttggcattttccttctactgacatccgtttgagagaatgcttgccattcaattaacataattaaaaacaattatggaaaatgcaacaattatttttttgtgcaaaaattgcggaaatacataatcaatgactaaaaaaacaatttaatgtataaaaagcattaaatttctttgcagaatattcataattacttttttaaaaaagcaatttcatttgcattcattcactgatgaattttttaattatgctgcaaaataattttctcgcgcacattcaaaaaaaaaaatttttttctttattttgacagttcaatcgggaaatactggtccgcaaatgtcgcactacggtaaaaaatgcttgtaaaatgatcatataattgtattattgctattatgggcataaaactctgaaatcacgatttttaaatttaatgatataacaacttngatatagaacgaatatgcataa

SEQ ID NO: 11569 - DNA, 3202 bp, Heterodera glycines
cttaataaaatccaaaatgattagatttcactattaacgtaacatttatttatttgtgaaatgattttaaaaaaaataaattggttttctaattaaaataaactataaaacattacaaaactcaactgatcatcaaaaataaaccaactcatttattcatttaaaaataagtatattttcaatgccttacaaagatttgcattcgaatcagaacaaatttaaaattcatgacatttttatattttcaataaatcaaattttcacataataaaatcaatggaaaaaattttgtttacttttctttatttaaaaaaacatgccaagccaaatacaatacaatgatttataaaatataagaattaaccagtttttaaaacataaataattttataagaaaatttatccatttttttcaaaaaatatttttctgttttttgttcctcaaaaatttcttctccaaatacatttcttaatcatggccaactccaattttcttcgaaatttcggcataattttggtgccattcttttcgtgttgcgcctgcaaaggtatcggacggggacccaaacaaatgacaggcatttggtgcttgaggaaatatttggaggaaaatgggaagaaaaaaggcaaataattgaaaaattctataaaataaaagagaaaataaagcaaaaaggaagaaaacacacagcaaaagaatggagtaaaattgaaagaaaaatagtgaaacaattggggacaaatcggaattacattcaaaaatggattaaacaatttgatctacaaaaattcaaattaaaattggagtaagccatggaacaattaaaaaatggaagaaacaatttggcattcgatatatgagaataacggagaaagaaaaaatgaaaatttattggcaaataaaaagagaaaatccgaaaatgagtgacaaagaaattgcaaaaattatgaaaattgatcaatcgagcgttttaaaatggagaaaaaaaattggagaggaaataaacgaaaaatgaaatagttgtaaaatttaaaaattatggccttttgttgtctaccttattttatttttattttgaccacatcaatttttgtattcaccgtattcttttcattctcataatttttgtattccattcaaataaaggagtaaaaaaggttagccgacatttgaggaccgactttaccaaagcatggaagtgaaacacgtaaaaattttccttggtataaaatcctgaactgacttttatgtgtattaaaatagcgaattttttcgctaatttcactacgtgtagagaagcaagaaaaaaatttccacttgttttgggacttctaagataaaataaaattctccaattgaaacagatcgccttgcatcagcttaccttcactaatttcaattttgggagtatttaatttattgaaaatttaaaaaaaattttttttctttattttgacagttcaatcgggaaatactggtccgcaaatgtcgcactacggtaaaaaatgcttgtaaaatgatcatataattgctattattgctattatggccataaaactctgaaatcacgatttttaaatttaatgattataacaacttgaatatagaacgaatatgcataaagtaactaaatttaatatgttggatagcacacggtagctctaagtattctctatcaaaatttataaatttcaaaaaattttgaaaatttaaaaaagtttattatgggcataaaattcaaaaatcacgatttttggatttatggataataactatacggttagaaaaacaatttaaatcatcaccctatttttattttattaataaaatatatttttaaaattgatttaaaattttttgtattttttcctctgcgattttatcgccttttttaatatttttttcctttttgcattagccaggagtagagatttaaatttataaattgatttacgattttaattatttctggggaccattttaataaaatgtgaattaatggaaaaaaacatttaaaaattaatcattattttacttattattgccaataatttgttcagtagaacaaaatttattaaaatcttaataattttttatttacattaaataatttttttatatttgtaaaagcagaagatttagatttatattatttataaaaataaaaaattaccaaatttatttttagaatttaagaagaaaatgaaactccacctattattagttttaattatatttttaatcatcgaaattgatcaaattaaaacggaaaagaaaaaattgcaacaaaaatcatttgatgaaatatttggagaaaaatgggaagaaaaagaagaagaaaggcgaaatgaactcaaaaaaagagaaataattgcaaaattttataaaataaaagaaaaaattaagcaaaaaggaagaaaatactcaacaaaagaatgggaaaaaattgaattaaaaatagcgaaaaaattggagacaaatcgcaaaaatatttataaatggatcaaggaatttggtcttcaaaaacaaatacataaaagctataaatcaaaaacggatgaagaaaaattagaaattgttaaaaaattcattggaatgaaaaatgaatataagcaaaaaagaaagttttcagaaaaagaatggaaagaaaattatgacgaaatttgtaagaaaattggagttagccattacgtaattatgaaatggaagaaacattttggaatgagtaaatttataacggagaaagaaaaaatggaaaaaataataatttattgggaaataaaaaaagaaaatccaaaaatgagtgacaaggaaattgctaaaacattgcaaattaatagaaagagcatttcaagatggaagaaactgtttggataaaagaatcattgaagattgaaaggatgattataagaaaaattggataaatttgccgaaaaaattatcagaaaaactatgacaatttctagttttttttcaaattttttgtatttgtattaaaaaaaattattttaaataccctaagttttgaaatttttcttagtgtaaataagtgaaaacagtcaattcaaggattgggagggtatcattaaaaactgaaaaatgttggaactgggctcccagtatgcctaaattttcgattttagaggccctgtaaaactccttgggcttttgctagggtgaaaaacaataaaaattaaaaaa

SEQ ID NO: 11570 - DNA, 687 bp, Heterodera glycines
attcaacaaacccaagcattagcaacatatttcttgccgccaactatttttctgagcaattccggtatagaaacgataaatttatattccgaacaattttgatcaaaattcacttttacttgcatcaggcttttcactgtttctacttcaagcaaatttctcgtatttttttcgcggtttttgagtcaattttaaaaaatagagaattctggggctccgacggtgccgataggcgccgccgggaaaatttttttaaatttaaatgcaatttttaacagattttgtcaaaaaaatatccaaatttttgcggttattttatgattttaaatgttaaaattatgcggactgggtcagtttagtctggccggtttagtctggccgttttagtctggccggtttagtcagagggtcggtttagtctggccgttttagtctggcaagccgttttcgcccataattcttacaaatgttttttgtcaattataaataaggaaaaacttaaaatatcctatgtttagctacaatataaatgaatatcccaatttagaaaataaaaacaaagcgaatccttcagtctggcacccgcctttttatagcttcaggcaaggaaacccctaattttttttccatttcacgggcttttgctggttatatcccaactgttttccgcttcatcaccccaattcg

SEQ ID NO: 11571 - DNA, 2283 bp, Heterodera glycines
cgcttgaacagagagaagaagaggacgagagggaacggaggcgggagaacgcgtacaaagcggtgctcgtgctaagcctctgtttcagccgtaataacaaacgaattgaagaccattaattcccctctcccccctttggtcagtgtgcgcgtggacatgcattttgacagtttgtccgctgctttaccaattgctcagcttcaccaccagccaatttgacggttggttccgccgttttaaaaagggtcaaatttattgggttcacaggcattctccaattctgtgaagacactgctcagactgttgccacggaatcggcagagcttatcgaagtattttcacgggagcagcaacgcgaagagcagttacgactcggaggagtcaataggacgaaaagcgtaagaagccaagggggcgggggaggggaaggcgtttaaggaacgcgaaattgcagaggaactttcgccatgttcttccgctacatttccaacatcagcaacagttgcaagatggttgccggtaatccaacaaagcaataattgatttttaacttgtaaatttcggtgccttttcagttgttcacccgaccaaggcgcacagggaacgccggggaggaagggaatgaaggggacaccgggagcaaaggcgagtgttttagtcagctgtcgtggaattaatttacttttctaaagggcgctcccggcattcctgcacggttgccgtgcgagccattgcaagacttgaaaaagtactgcccagagaaatgtccactgggactacagggaccgccgggacttcgcgtgagttaaaaacgcactttaatgtctataaaatctcacaactcagggacatatgggtgagaagggccgacgcggaccaatcggaccctctggaaagaatggcgacgatgggaagacgggcccccgggggatgcccggaccgccgggagtgccgggactgtaagaaagtgaggaaaacggagtgacgaatttattaaacagagacggcgaagacggggaatcgggcacggatgcgcagccgatgcaggtgagttggacctttgtcccccttgaaactgactcttcgcttaagtttgtgcccggcccaccgggagcgggaggagaaagcggtatttgaacataaattggaagatcaatccctatgctaattgtattccttccaaggagaccctggcccacccggaccaaggggactgcccggcatcgacggaccgcaagggccccagggcagaaaaggagcacagggaaatgcagggaaaatgggcgcaccagggacatcaggtaaaggggaacgtagcgcaaaagggacgtccattccaaaaaaggacccccgggaccgattggagaacccggcgaagacggtcataagggtgtgtgtccgacgtattgcgccatggacggcggtgtgtttttcgtggaaccgcccgaatggttcttcaaaaacagtaaaaaaaggaagtgaacattcaagcaaaaagtatcatattattttattattgagaagatcttaacattatgtattcatcgaaatgattgttcttccattgttaccctcaaaattttttaaaatattaaaaaaggaaaatcattgaaaaggccacatacatacgaaataattgacagtcatcgttattgcgcatttctcttcgtctctcaatggtggtccccatccgtccgtccgtcctccattcccaacccatcgacaatttgccgagagttgcgctgctccgtgttcccttcatccccgtcttcttctacttcatcacggtccatttcctgctcaagcattggcatcattatctgcgcttcagccaactataattccacattttgaagcatccactgaatgcctatgtgatgctcttgatgggtggccaactgctgtcatccggaaaatgaccgcacacaaatatcacataaatgaggtctatgtttccgtgcattcatatgatccgcttccttataccaaatttataacaacaaaatctaatatgcatataggaaccgggaggatatattcagaaatgacacgctcttatataccaccccgcatacaaataagctttaattaattttcaaaattgtcaaagaaaaagaataagataaagataaaaaaattttataaacgacaaatttgtgccagtcttgcatttattttcatgaaattcctcaaaattacactcgaaaatatggtaaaccctaaatttccagaatattatccagccccctaagttttaaaaaaattcaatttaatccatttttt

SEQ ID NO: 11572 - DNA, 946 bp, Heterodera glycines
cttctccaagtcataaatgagcacgcgcatgtcaaatcggctaacattttgtgcttcgatcatctttaaaaaattaaaattaatttatttttaaacgaacaaaaataatcttgaaattctacctcaatgaccactgatcgggcaccgaccgatttgacacggaaatgtgccaccgaatggatgccaccaaattggagcagacagaatgccaacagaatgcgcaacccaataatgggacacatttggaaaatgcttaattgcattaattaacgtgaaattttaaatttaataaatttgtctaaaaataggtacatagtatacaaacattttaaattacaatttggacagaacgccaagaaaaaaaacatccaaattacttgagctttgttagtgggatggggataaaatccaccgccggatggaccaacggctgctgctgatgagaatgggcggggaatttttgtggagtcggggaaagcaaaatgaatgacggagaatgagggagggcggagtctttcgggcaatgcgaggggggggggggggggggggggggtaattgtacaaaatgatgttgaaaatttaaataaaataaataatggagggtaattagtgaaatttaggcatttattacatttttatttattgttggtgaattttagtttttgtttttttcccttaaaattcagttgtataaactgtttctttaatagaaaaggattctgtcataatcagaaatttacatcgtttaatagggatgtgcgagaaatgatttttaccgataatcgagaaccgagaccgagaaatgaccccgagaacgagacgaaaatcgagaagcgaaaaacccgagaaaattctcgagtcgagaatcaaaaaaccgataactctcgccacttccccactggttacaggcaaaaataatatattttataaaattttaatttggatt

SEQ ID NO: 11573 - DNA, 1745 bp, Heterodera glycines
ccgccgggaaattttttgaaattttgctatatatttaacagattttcaatgaaaaatcattatttttaccaaaaaaatcaattcttaccagtgcatttttactcccgtttttgggtaaaaatttccgggagcgggagcgggagttcaaaattttccgggacgggagtcccgaacgggaatcccgtaaaaatcccgttcaccgaaaaaagcgggagtcgggagcgggactcccgtaaaatcccgcgggagtcccgatcccgccggactctagtatttaaattttatttaatttttttcgccattgagcacaaaaaatgtacacaattttgcaaattccataaaagcaaatttaaagaaaacccaagaattttaaatattaaattattttccaattttccagtcccaatacgaatataaaattgtgtgcattttaaattgtcatatttttctggcactttgtgcgccattttggtgctgttgatgttgtgttttgttggttggttcattagatttgcattcattcattcactttcattcttttttcattcacaccttcgcccccacggggcaatggcggggacaaatgacgctgaaatctctcgctcaattggcaccaaaaaatctaaggaaaaagcggtgacaaaactattttgaaaaaattaaacattggatttttggattataaatagttaacaattcatccttaatgagataactctgtgctaattgcctagaaaaaattttttttttctaatatattatataaacataatcgcttgaattttgtgttttttaaataaatcaaaaataaattctgaattgtgaattgtttttttttctaatatttttattaacaatacaaatgaaaaactgtcaaattgatcgttaatccaataattaaataactatttcaaataatttaaaataaaaatttaaaaaagctctccttacgataatagcatccacccacccatctcagcagcgttcgtttcatccgtaaaaatatgtgtgccgtcgttgacggcacatttgttcccaaggtccgtgtcaaacaaagcaaaaagcagggccgagggggtggtgggcggggggggggggacaacggcgacaatgatgccgctttgacgggacccacttccgtacatataagccatgccctactcctctttcaactccttttggccgatggaataataaaattggagtgccaccaccaccaccaccagcagcagctagctcctcgtggtgaaaaagacttttctttggtgccaatgttgggcttggttggtgcccaaaggggggttaggcaacaaaaattaataattcgtcccctccggcggggggcgaagggggggggtgagaaaattgttctcgttgcccttcgcccccgggggcgacaagggcgaggggggaaacaaacgcaggtggttcgaaggtgagccatgatgcctaagcaggtgttgacgtggctgacaaatggcaaccaagaaaattctggcatttaatgtttgtaatatttaaagttttcttgaaaattcatgtttttaaaaattttttatgaatttttcggaagggaggggaaatgccagtttttaagcaatgcgcacgccactattactagactaaaaagcctgtggcccgaggaacatgtaccagataatattctgtcatacaaatagaacaagcaaaaaaaaactatcatgattaaatgtaataataataataagcatgcttttacttagcta

SEQ ID NO: 11574 - DNA, 1690 bp, Heterodera glycines
atttccggtcagggtcgttttcgtaccgccgttttcgtaccggggacgttttcgtacgagttcttgtacaagcgtcagatccgattagaaaaacttaaaacctaatagaatcaaaatttatcattttttattttccattcataaaattaatgtagtgcatgcggcccggcccgtcttttgcgggccgacataaaaaaatcccgcggtcgcggattcaatttgccgcggtcgcgtcccagccctggtatatatattatatatatatatcaatttcctagcacttcgtagcgcaaattaaatttttgatcgatctgatactttccacgttttttttaaatttttaatttgattcggcttatcagaaagagcataaaaatttgcttaaattcgatggataagaattttctggggtttatgttttggttgggatcgaaaaagttgggccgctaatgtcttttatgctggtggccgcaaatgtgggaccgcacgtggcgcaagtgtctgccgcaaatgtcagggcaccactgaatttgtcgaacacagagtgcaccatcatgcaccaacttatcattatttcgttttgttttaattacttgctgctggttcattttgtagttaataaaagcttaaattttcaaacattaaaagtaattacttaaagagaaaaaattatttgaatgcaattttttttgcatatccactcgtacgaaaacggaggtacgaaaacgtcctggcccggtttatttcatggttttaggataaatccatggaaaagctgccgcttgtatgatattaattatgtgtagtaaagttgataaattattactaagttgaatatacggggcaattacgtcgccggttgcatcccatgtaattttgtgtagtaatgaaaccactttattttttttaattttctgcctgttctcgctgtttgtggtcggagggggctaaagatgagaggacaatgaagtgttgcgaccaagaccaggactatgtctgttcatttcatacagtcgaagtatgctgtttagtatttttttgcgcctataaatacaaattaaggaatgggtaagtgataagataccgccaataatttgaattgtggttgtgcttctcatggtttgtttattggtcaaaataaattttattcccaatgtagcgagtgaaacgcgcgaaagccaaacgggttggcacatgcatgagcaacgaagttgttgttgaacatattactagtaacgacaaaaaaacctgtgaacatacggaaggaacgtggttttgggtaagaatgtttcttaaagagaaatttttaaggtgtatgtttttcatcaaaaaacttagaaattgcataaaaatcaaatgatttgaaagtgcctcgtttggggtgcatcccaaaatttcgccccgaaaatttaaagtttttcaaagttcaagaaaaaatctaacaatttttttttataaaaatattccaagaaaaaagtttaaaaatttttagcgatttttttggaaaatttgagaaaactataaatcataattcaaaaaatcgctgaaacattttttcaaggaatattcttataaagaagtttcaaaaattttttcctggttttttattaaaaattttcaaagatccttttttgaaaatttctattgtttgagaaatttaaaaaaattttcggcagcgaaattttgtccc

SEQ ID NO: 11575 - DNA, 1030 bp, Heterodera glycines
aaaaaaaaatttaggaacgtcgaaccaacaactccgaaagtggttttccatcatcttctggtattcaaaaatataatttttgttgataattttctttagcattcctgatgatgctcattgaagctctgatcctggccccgatttattgaactgatcgaacaattttagaatggatggtgaaacatttattttttcaaggaattaaattttttgataaaacctatttcgaataatattagaagttaatctctatttaatatcaaaatcttgaatgtcatatctatttttcgagaaatctttaaaatatattttttgagatcaacttcttttattataccgctcatcagaaacgtatcaagtgggctaaggggcgatagtcaggatccaatttattttaattttaaaattcctcaacttacgcaacactatttttttttgctctctttttgtcaaattctccacaatatgtactgtaagtaaatataaaaatagaagagaaaaaaaactttgttgatccgaaatgttattttcttgatacggtcctgattgatgcctctaaactgtatgtaataatattttcatttaacattactttttataacatgatgtttcatatttggtataatgttaataaatttatttcatgatttgtttggattttctgtttcagaattcttttttatttccttgggagaagaaaataaagaggctattgtaagcttccgttctcggtttaatatttgtatcatggatgtcattccgaagccccaaaaatttttcagaaatataaatcggaatgacgaggtcccaatttatgctggaaatcggattttttgaaaagaaattctagaaattttcgaaatagtttaataggctaattttaagattgcgaacaaaagttgggacttttatttatatacatgtttactgtaattttagaggatttttatggaaatttttcaaaatgctcaaaataaaaatccgaaatttcacaatttttcatatatattttcatttgtttacatagaaa

SEQ ID NO: 11576 - DNA, 1304 bp, Heterodera glycines
attggagttgtcagcgagtacagcaacacgaagtgctgggtgacatcacccaaactcagcgggtgttatcgctgtgtcacgggcgcagcgctcacagcctcatgcaggacggaccacggaatggccttggcgaaggtcaaatgcgcggatggaactctgttcgcccttcactgcggtggcaacgactcgacaacgacggaggcaataccattcgaccgggcggaggtgttcacggagtgccgggtgaaatgccccgcggggatcacgacttttcggctaaaaggggagcttgcttttctccccaagcagcaacagttcggcttcaatcagcgagactcagccggcgggcgagtagaacccgggattagcctcagcttacccgactggcggatcgatcccttcccccttctccatctcttattaagcgggaaagggctattagtggcagtgggagcgacggcgattggactggcagcgcttctcatattcgtcaagttcagcccgcatttcagaatgtaccggtcattaatggcattggccataataacggcggtaatcccggtgggggggacaaattcagcgggtgaagtcacccgagccaaattcccggggacaacgaccaaagcggcaatcaatggactcagcaacggcgagctggacggggaaacgatgcggcatggtcaatcggatttgggggccttcccccaccatgcagttgctgttctcttgctcggggcagcgggcggcatacttggacgactcctcctgccccaaaggcggcggatcgtgccattttatgtcccacccccgcttacgttcacttttctgggcccgcttttgctcagcagtgcacttacggcggacagagaagcagcacaaggggagagagacatactcctttcagctacgatggacagagaaccaaagacgagctcaatcagcgaaggacagtgccggggagtacgaacgcacaacgggtgtatgacaaactggaagagacgccgacgctactccgcctctcaagggaatcacaatgggcacggtaacgaagtgattttcctgtctaagttggtgaatttgatctccgacttgggcggccacattggcctgcggatcggcttctctctgatcactgtgatggaagtggtcgagctgatcttcgagtgtttcaccttcggctgttcgaatttcactaaagccattcattcgccgattcattttttccttaggtaaaaagtgcgttttccgtcctttgcgcaaaaaggcatttgcccaccggcaccacgacgatgccgaaacggaag

SEQ ID NO: 11577 - DNA, 2738 bp, Heterodera glycines
acaagcggggagatttctctcccgagggatgcacgacggagtggcgggcgcgcactccggaggaagtgcggcaatgccgtcccgggcccagcggcacgagcgggagccggtccgggacggtcggagcgggtccgagccgacccagccgaggagaagggaacgggcgaaaagtggaagccgagggtacgaggggagcagccgagagcaagcggcgggtgtggacacccgagccggtgcgcgatgaggtcgctgaactgctcgagcagacccgggcactgaaggaggcagaagcaaaagcaaaggaggacgtccttcgctgggagcggcgagccaaggaagcgaaagagaaggcagaagaggcagaagcgatgctcaaggctgaggtgaagaagaagcgagaggaggtggagcgagcaaaggaggagcgactgaagaaattggaaagtgaggccgaagggctacgagccatggtggcagaggcgtgcttcccgcataagccggcggagaagagcggggaggaagagaagagcggggaggaagagaaggaagcgagggcaccggcaagccccccgaggacgattcgtcacgtggtcatcgacgaggactgcttgtcgatcgacagcgaggatggcccggaggaggaacggcagcgggccgcgggggggagtgtcgccaatttttccattggcaacgagagagcggaggagggaagcgggaggcgacccactcccgggcgcggtgtgggcgacctcgggttcctggtgttcaatcgggacgacggcacgccggtggagttggacgaagaagaagagaacgaatggggaggtggcgtccttgatcaccccgcagcgccgccgcggcgcgcaccggaggacgcaaaacgaaagaaatggcgccgatgagccggacggatcccacacttcaccgggagagccactcccgacagccaatttcgatccttccgccatttccttcgcaatttccccacatttattttgccatttcttaattttattcacatttattattctctctctctctctcttctcttcgcctatcgtatccaatcgtctcacttctccgatttgcaaattgtttatgcatttcttcaccattttcccaacctgccaatctcccattttgcgctggcctttggccgtcatttatccgaaaacatttcttttgtccccaattttgcacatttttcattccattcattcattcatcccccctcttctgcattaccatttgtttatctgatcggcctttggccgattcattttgccgtctttgtatttgtaattcgccaacatttgttcgggggcgtctcccccggtctcctccccctccctttgtcattgcgtaatttggccattttcattttcaaattcattcgccaattcgtaagggggctcctccccctactctcatccgtcctcattttttcatttatgcttaatcctatcgcatttttaacattcgttttccactaatcaccacgggggagttgtctccccaaatttcaatttcccccaccacaaatcgcggcattttttacccccctgccgtttgtcactgtcaccccccatgttcggtttaattacccaagtttgagctgcttaataaattgtgcttttaatcttgtgtgcttcaaagggtgggaaagggaaaaaagggagcgaattcccttcggacaaactcttcttagcccacggacgggctcgcgcatcgatcggtcacacgggactccctcacttggagtgcccagctcgccttagccctcgcacgggctcagcacgtaaaaacgggactcctgcctccggagtgcccagccgtaccaattttttctctcccttccccctccccaacgtcctctcttcccctccgagagtcggaccatcggacatcgtcagcgcaagacgggagaagctcgctcccggcagttcaacttgtgggattagccaaggagtcccggcttctccaaattctaagtcggtggtgccgttattcacatcactcggcgccctcgcctgcgccttttgctgacagtactcaagcccaagggagtcacctctccctttgccggccactgccagcttcactcgtttggcgcctctgcctgtgccgacgatcgcagcactcaagcccaagggagtcacccctccctttgccggccgctgcctttccttagggagtccaatttctccctcgccaatctttgtttgcctccccgactcctccgcctcactccccttgggaaagggacccggacggcatcgcgaatcggaacggcactttgaggagtgaggcggtgccagtggaacgggagaaactctcgaccgaacagaggacggagttttcgccacaaatccttttggaatattcaaaatttcgccgatttctccattggtgagctgtggatttacgatttttcaattcaaaatattgtttcattgtttgcattttttggtcaatggtatcagagttgcggggcgggggcgggggtttgcttttaattagctccaaaatctcacaaaaaaattaattttttgaatgatgtgtttggttccacattcctttattcgttgtatcgcctcgatttaattctttttggtataattgcacagatattgtctaaaaatgaccaaatttagggattataaattatgccagaatagtcaatttttatgggtgtttttgtctattaatccagggtttctatctcaaaattttcaaaa

SEQ ID NO: 11578 - DNA, 1308 bp, Heterodera glycines
atcattttttgaaaacttctaaaaatatcggtcacttgaaataataaattctaaaattttgtccaggaaaatccaggttttttcctgttttgcctggacctggacctggatttcctggacaaaaatccaggaaaatcaggtccaggaaaaatccaggttgtcaaaaaatgacctggacctgaatccaggaaaaatccaggcctggatccaggtccaggtcgaactctaaaggccagcttgaattcactcttgctggtgatataaaggactgctttgtttaaatcaaatatttgccatataacctataaaaatttcatttgagtataatttgcttatttgtagttaacctatcttaaaattgaaaaattgttggattaggttttgtgaaaacggattatattttcataacttgttaaagaaaagctttttaaagtactcagttttttacaattaacttatttaaaaaaattgtaatttagttaactattaatttttcggctaattaatttgcaaagtgcaattatgttataagttgtgtttgaattacatggattcaaaattaattttccaagattctttacattttttattcttttttctcatcatgtttcttaagtaaatcactcaacttcgctcgaaaacaaaatatttttctctttgagctttttagtttttttaaaattaattttttcaattagataatatttttgggttcactattatttattttataagatttttaattaaatgtgaaatacaaaaaaaaaattcagtgagaaattttattattattttctaattttacttcatgatctttttcttgtatttttaacatggtccagttcacaataatttccgcaagctagttgtcgctttttgtagctctctcccagtggtttcatttttagctaattttattgttccaatttcttatatttaaagcaatttgttaattttgatgaaaatatattttatagactcataatttatgatttattgggtaaataattttattaaataaaatttctttgttttttaggttttgattaaattgatcattttataatcttgcttcgaatcgatcaattgttcaacatattttgctatagcaaattgaattgtgtgggttttgaattttattttcaactaaatatttatttatattttgattattaaaaacaatggcatttgcattcgtaaagaaaaattttgttttttgtaattaaaaatacttgcttttaaattggcattaaatttgtaaatattaaataagtctttttacttatattgtttattcacacttatcaa

SEQ ID NO: 11579 - DNA, 6417 bp, Heterodera glycines
  unsure (1)..(6417): unsure at all n locations
tttttctgaccttttcagcgcgcattccatattaacttctagcgatgttcattcagtttttttattttttcaatttcttctataaaaatattaccaaaaagtaatgctaatttcatgataattatttttaaaattattaattgctttatttatctgactttgaaatttaatatgataatcggtttattttccattatcatttattccgtatcgttttccatcttatcatcttttgggcattctttcgtacttagcactgatttcgctttcactaccgtaacttccggcgattattcagcttcggcggcacagcttactgtaatcctcgcttcgtcaaatgattggcccggataaagttgaacatcatcagggattcaaactaatcagaagtgctaatgatcggcttcatgttccagtattttccaggatcgactattcggaatttatttatgatttttttaattaccccactcggcactttgacttggagacttggcacaccttcttgaagatgttgttggtgaattccagcttgtaattgctgcaactttccgtgctgttggccaattccactgcgacggtcacttcatttttgcttggctttagtgaagtggtggccggccattaattggcagacaatgccaacattaaaaatgccacaaaatttttcattttaattaatttattcgtatttgttttacacaacattttcgagacagtggattaatttttatttaattccaactttaatatgaaaatcatcctgaattcccacgctgaattatgggactgtgttaacatttttgcttttattcattcaaatttcatcaaaaaaatggatggaattgacataatttagtgggtgggttcttataattgccccatgtaataatcgcttcttttaattagcttatttaaatgaatcaaattttcaaaatcgtttgcgtttttattttatttttcattttgtaaaatgtgccaaatctgttggggttttgttatttagattaagttatctcaatgtgaagcttcttcgaaataaaaatataatatttctcataaatatttagtttacgagtagaaaactatggcctcggctggatctgggtcgcgtcgttgttttattggatcctgaatcctggcttcttgaaaaaaggccgggatcagaatgccgacaaagcgattagactccattaatctcatttcgggcctgattccaatcccgttaaaatccagtgttaatagcagattctctttaaatttagtatttttataaattggtccatattttcaatttatatttatatgaagtgcaccatttttctattaaggttaatcatccttttttgaatttacgcttttgtataaattattttatttatttttccattttaacagtgaatcatccaaaaaaaagtccatcacttttcgcttggaaaacgacacgactgactttttttgcacttcataaatatttgttgttagccaaacgaacaatgaattaacatttattccaattagttaatggataaaccaatccgtccatttgtttgaataatagtaaaaaaaagaaaaataatttaataaatgagcagcaaaaactaataaattaaatattttatttattattttttaaataaataaataatacacatataatcattttagcagggctaaaatgagcattgtcaatctgcttttctttgcagtcttattcaaattgccaccgtttcttcacagcttagacaaagcatacgtcaccgaaccgtaaaatttaaaaaatttaatttatttaaaatattttaaggtttagctttctcttaacgggtggaaaaattggaaaagtttccgtgccgtactttgcgcttgaccaatgtaagccgtacaaaagcatcactcatgatccgaaggctgagtctcagaactttggtctgtattttttgatgaagcaccgaggtggacactgtgatgaggggtaaatttttgaaaaatattatttaggcctaattaaattttaattaccatttagcatattgatctgttacccgggcacactgatgcgcaatcatatgacaagcgagttcaaaaagatgtccgatttcagattgaaacggacattccaagtcggcaacaaagaagtaatggaaaatttaattaaaaaatttatttaaaatttttcaattttcgaacgatttgctttcattggagtgcgcccaaaaagccgaacaatttgttggcatttcaaacccaaaacaatggcgtggcatcaaagtgtacacgaaactgacaaactcatcaaatccgctttcggcacgagaactaattctggagacttcattgacaaatagaaggtaattaattttggtgtaattagtgttaattaacaaaaatttaagttacacctttgagccaatgactcgtcagctttcacttaattttggaaccagagtttcaatgttcacttgggtcacaactcattttggtaattaaattttaaaaaatattatttaaatatttaaatttaggacaaccgtttcatgacgaagaatttgacttggctgaacagtacgcccaacaaatgggctatggaccattcttggaacagcatgtcggactttggctgctcggcatggacatgttgccatggatggccgaagagtatgtgagcctgtacgtctaccgtggatgctcctgtaccatggacgcttgggtactgtactattatttgaaattttactgtaatttattgggatataatttaatgaagttcactcggccaaccgatgaaaatgacccaattgagccgattgtgccatcggccggctcatcacaatgcccgacgaagcaaatggacgaaacttttgaacttggccaattggacgcgcaacatttgcaggctgatcttgtgttcactgtgctgacggatgaagaatggcaaaacttcacagtggaattattacaacaagaggaagaaggtaagaggatgattaaaattggcaatattaaattttttgattaaatcaatcatatttgtatttattgaccgttgaataggagggaaataaataaacaataacgaggattgatgatccctatgggcctaattattgggatgtaaattttatgtattaaaaatattttttcaaaaaatgctgattttctaacctggtttaaacatgacgtacagatttgagatttttgcacaaaaataccttggcacgaagcctacccttctgcaacattaaaaaaatttattgtagaaatttttataaaaatcagcttgttacaatgaacattggacggacatttaaataaaaatttttgcaggtaaaaagctctctgtggtaatgaatttcacaattcgaacaatcgacgacatgaaagtgcctttttccggggtaataaattaaaaatcaaatcaaacaagtattatgtaattaatttttattaattaattaatgtagattaatacatcggtggtcaatggaactcaaatgcctaacggaattcaacaattgcgttttgacattttcctgctagagcattggcatgtcatcatggtgaacggcgagcagcttggcgaagtgttttggccaaaggaatggtggcaaggggcggcatggaaaaacatcacggcaattagggtgagtgaaaaagaaacgccataaatttattgatttgagccgattccgaaaatttgattttgaattgaacttaattgtcaaattttctgcatagattagcgaaaaagccaaaaatttacaattgggaataagaaaattaacttaaaaatgaatatttttatttaaaatattattttgataattaaaaagttttattttgtagcttaacggccaagtattattgctttatgggcctgaattggatgaatacggtattgaaaatgaaaatgtaagaaacgattaaaaagtaattaaaattaattaacattattattttagttcaacgtatctgtgccacttccattttcacagagaattgatggttttcgcgtgaattcaacattttttttccgtgttcaactgcttaatgaaacgcataatacagtgaacataacatttacaaatgggaacagcagtaagaaaagcataaataaatttaaatgattttttaaaattaaatttataataaaaataaaagtaacaaatacaaattgtcgatttaaaaaataataatttagctgatgcaactgatcagacggaaatgaacatcaaaattgaaaattttgagacaattgaaatcactgcttattatgtaatattttaattttttttttgaaattagctgattaattaagtaccttggatgggataaaatacagaaagtggaaagaagaaatatgaaaattcagccgacaaatagcaacacatttgaattgtttttcaacatcactggacctttttatgtgattatgtttaatggagaggatatttttccaaattacaccaataatatgtcaatatgtcatattaactatgttatggtaataaataataaatgaattttatacttctaattaattagtaaattaattttattttttatcgtttgttgattctttttatatcaactattaatttaggtcactggtgatgccattttattagattcgcccaaactgcatgtgccaccaccaccaaatgtagttttaaataatcttttttcttatttcatttaattttttttatatttatttttctaggtaaaaaatggaacacaaattattgtggcattgaacgattttttaaatttcggtgatctaatcctcattcgtaacgaagatcaaaagccgagaggaaaaattattgtcaaattgttgaacggctcaccgaaatgtctcaatgattgttaagtgtgtcaaatattatttaattttatattgtaagtaagtctctcacattatttctatgcatgaaattccgttttttattgggatgtcatatatttaaaaaaaatttcataatttttaaaaaatttttcaccggatgcccctgtcagcatcacgccaccaccaaaatttaagggtatttaaacaaaacaaaacaaaaattctttcgtgacaaatcgtagttatattatttatataatgggtttttcactttatttaaaaaaataaaataaaacatgaagccttattaaaaaacaaatattattattctttatttaaattaaaaatatttgtaaattttaaagatcatgttattgcacaaatggagttcaacgttgatgctggtgggcttggcaaagagtttttctgtgaacacatatacgtggagaacgcatccatagtacgataaaattttccgcactctaaaaaataatgaaaagcaaagggtccaattttagataaataaagaactgataaacgaaaataagattttcttgctcaaaaaaaggacattttgtaagaaactgttcaaattaaattaaaaatggtgatttggggttgggctgagccgattggttaatgctattaatgttcttctaggccataacttttttgaaacaataaaaaaaaaaatttttttttttgaaatttagccgttaaatattttgtaaaatgatgtagaaattaaaacaatattaaataagctaaaataatgggggaaaaaaatttatgaaaaaaagaggattacgattcgatatcccccaaataaggacaaaatctttaaaaaaaggtcaatataattaaaagcaaagggcagaatcaaagataaaataaggaattcatgggacgaaacataaggacattttgtaagaaacggttcataattaaatttatatgaaaaaagagggttacgattcgatatcctgaaaaaaagaggattacgattcgatatcccccaaataaggacaaaatctntaaaaaaaaaggtcaatataattaaaagcaaagggcagaatcgaagataaaataaggaattcatgggacgaaacataaggacattttgtaagaaacggttcataattaaatttatatgaaaaaagagggttacgattcgacacctccaaataaggacaacaacacaacccgtctttggattaacaaaaataatttacatttgaggtgacccgtcaaggacctgtccaagaaaactcattgaacatattatcaagaagagcgttatcactgaaaattctgatggcccaggacggtttctatggtcgatcatatggtgattacataaaactgtgcccatatttttggacatattggcaatactgggggatgtggccatggactattgaccatgttcaagtggtaaattaaacattttttgaaaattttttgttcgaaatatatgatttgttgtgttatctgctctcacagattgttcacaatgttatgcttactgtaaatgatattacggtaaagcaagctgatccagctgatgc

SEQ ID NO: 11580 - DNA, 4319 bp, Heterodera glycines
tcaaaaattgaaaattgcaaaaaatatttctacagcgataattagctttataaaaaacacagaaatgatgtgcataactgctggtgattctctttgggttcggggttcgaaatagggtgaaatggacgtgattcgtgttcagcgcccatcaaaacccctgaaagtttttttgtttgacttgacaaacaaaaagtttatgggcggtaaaccacataagtaccataaacaacgtctatgccaaacatcaagaaaaaaaaaatcacaaaatttcttagtgaaatccacaagtgccatgccctccgcgctggaaatttgttagtttttttatagaaaattttcattaagcaaatttattgttttttctttgatggcaccccccgttaaaaaagcgaaaaatgtttcttctgacaaccgccccctcattagtgcaaatcaacagcaatcgatgggttcgtcatttatggaatcagttggaaatcggcgaagttctcggctgaagatgaagaaaaagaaccggaaaataagctggtaatacaatactaattttcgatttttttgaattttgttatactcttggttctgggtccgaattaattaaaatggatgcctgaattggtttctccgaccccgaaaacccctaacaaatttatcccaaaaatttttttgcttgatatctccgcacagataacccacaagtaccttttttttctggaaattcagttaaattttgttttcagtagagatcgacctggatccaggcctggatttttcctggatccaggtccaggtcatttttcggcaacctggatttttcctggacattttcctggatttttgtccaggaaatccaggtccaggcttttttcaaaataccgatctctagttttcagtaacacctaggtttaaaaaaagctttaaaaacaatttttgataagttttttgcgacgacgttttggggtggcaaaaatataaatttttaaacaaattttagtgaaattctgagcagtttctttccccacttcagttggatttgcaacgacgttttgatggacattctgccgttttttggtcttcgtcaactcggcctcaaattggcactgatttccgatcgtttcgatgttttggtggacgcgcatttcgatggcaaatcagaattgacgatttggaaagctatcaggattcacaaagacgctttcacagaagtgccgaaattaagtgtgctaatcgataatgccaatcgtgtggaatttccatggcctgaccgtccgttgcacaacaaaattcgcttcaatttccttctgattgagtaattattccaaaaaaatttctgtgtaaattaatgcattttatgttgctccctttttcagttacattgatcattccgtcgtcgaatttctccgctccaatcaaccaatttgggacagaggcaccaatttgtatttgcatttttgttcatccaacaccgaaagcaatttccgcccgatttgggatgtttttgtccgtcaaatttggcccatttttacgacaataaatgtccatcatttgggccttcactttgctgatcatttggacactttgcttcgtctcacatcgccgacaattctctccgatatgaacattaattcaatccaatctgttcgtctgttcccagaagcaattgatgacgatgatgggccaacaaatacaaattctcacggacaaatgttgtcaaaatggttgcacactccgagaacagatggccgtccgaagaaattgcgttgcgataaacattttgaatcaccaaatctcgaatggatcaacagtttcaaagaggtgtgaccaaaatttccgtttttaacgactgactaattgattgcctttaattttcgtttcccattgtttagaaatttctccgtgccaccgcttcaatcagttacgaactgtattttgaattgaaaagttcaacaccaattgagccatttgaattggagaatgaacggaccaaagaaaatctgtcattggagaaaataccaccttatcctggcagttggctgttgaagcgatgtccaattaatggagaaacggcaccgattaaatgggaaaacgaaattcggctgacaaattttaacggtgtccgttttgtgcttaacattaacaaacagtgcattgggtgagtgtaacagataattgacaattcaattcaaatttcacttaattttaggccattggcgccaccagcggaagaagaaaaagcggatcaaagcatagaaaatgtcgtctaattgcgcggaagtggattaattatatttgagaaatggtcgatctcaccaattggaaacggatttgatgctcattttatgtcaaaatgctttgttgattttatttcgttcgaattcataaaaatcagggcttccaagtgtcctttttttctaatatttgtccttttttggcaagacctccttgttttgtgcttattcttggatttgaaaataaatctacaaaaattaaagatgatgtctacaaaaacctctaatcttcctcaaaaaattaactcgaaatcgcaaaaattgtcattttttggacaaaatcttagcaattggcatttaaatattataattagagaacgaaaaaaaggcaccaaaatattgcgaaaaaagcacgaaaaccccgaaaatggcataaaaaaggcatttaaattttttttttattaaggatttttagggcgcaaaacaagtaaaacataaccaaaaaacttaattttggttatttaaatgattaataaatattttataaatttttttccaataaggaaaatttttaaaccataattttttttaatcaagaaaaataaataaatttttgggaaaatttttcaattcttaggggtgtattttctgaaaaattttttgggtcattttttagggtatatttttattttttattgcatttttgttaaggatttttcggaaaaatgccaaaaaaggcattaaaggcataataaaagtcatagaagaagcttcaaacttttaggccattgtcgccaccagcggaagaaggaaaagaaaaagcggacgaatgaaagcaacgaaaattattaattatatttaagaaatggtcaacgatctcaaccaattggattcggatttgatgctctcgttttacctgagaaatgctctctcactttcatttgttgattcctttatttgaattagtgttgttactagagaccggaaatttcaaatttgcggatcccgctgcgggactggaactcaaaattttttgcgggacgggatcccgcgggattaatcccgcaaatcccgcatttaaaatttgcgggattgcgggattttggaaaattcgaaaaaatttcaattaaattcaaaaaatttccaaaaatcaaaaaatgctgaaaaataaatttttaggggctggcgggatgtattaaaaggggctgatgggtcgactaagattttcgattggatccgacggtaaaaagttgatcggaaatcaaattattaacggttcataaattgactatttttttcttttcaaacccacttttttgcggtgcaatttttcaaaaaactaggaacagagggtccggcggtccctatcagggatggcattccgaggctccaaaaattttcggaagtgtcggaaatcggatttccgaccccaaaaacgtcggaaatcggaaatttttcaaaaaatatacaatataataaaaaaatttctaaatattttaataggctaaattttttaattcttaaccaagtaaaaggtatttcacaaatgtttttagtatattcgcttgaaaaaattattcaattattttatcaaaatctttttttgtcatttttattattttagaacatttttgggaaaaaggagtgactatttacacgttttttacagcgctattttttcaaaaactttttaggaacttagaggagggtacagcggtgccgataggcgccgccgggaaatttttaaaaatttcagttcaatttattaacagaaattgtgcaaaacttactagttttttgaaaaaaaaaaattaaaaaaatttccgacttttcatcaaaaatttcggaagtcggaattccgaccccaaaaatgtcggaaatcggaagtcttttcgtgccatacctggtgcctatcgacatctgcgagaaattttatgaaatttaatgcgatttgttaacagattttgtctaaaattgaccaaatgacgcagtttttgactcaatttctacaggattattaagtaaaagcctatccggcggtgccgataggcgccgccgggaaaatttcacaaatttgaatgaaatttgcgatga

SEQ ID NO: 11581 - DNA, 1372 bp, Heterodera glycines
atcaattttccatttactcagcaaaatccccggcagggaaatgaacaaaaaaaagtgtgtgtggcagggggggcgacgagagtgtcaatggagagaaattatgtgggagagagtgcagagataaggaaaagaaatttggcaaaaattccaacaattaaatggcaaaatgtttccaggaatgggatatgtggggctaaactcaatttcgtaatccataagattggaaatttcattaaatgaacggaccaatttttcgcaaaaccaaagctgtcacatttttgaatgaattagggataattgtaattttggcccaattacaatgattaaacatttttttctctgctgccatttgctaatctgttgtgtatttactacaacaataaaaatgtttggtcttcgaccaaaaccaatgttgtcaaataaataaataaataatttattaacaaataaatatgggggacagcaggaataatataataaaaatcatgaaatggaggaatgaatgggagaatgcccagagtgggggaaagggagacatatttatggactggtcaaggggcggggcgagagacaataagagtaatcaatagggttgttcccttatccaacaaatcttcgaccgatcacttttaggcccgaatgccgataacttttaagcccaaatgccgatcaagcaccgcaccaatttttcgaaaaattcagagctgtctcatgagacccatcataaaataagtaactcgaaagtgatgcaaatttcccttttccatgaaattttgtatctaatttctcctttttgaattttatgcttattcttccgaagcatttccttctgcttttgattcctcttctgccaattcgtatttctattttggtggagagaattatgtgggagagaattaagagataaggaaaagaaatttacaaataatattcatagaatgattaacagcagtaatatggattttggtccaattagaggaagaaacaatttacagacaaaaataattatcattaagttaaattttttattttggtatcagatgaaagcgcagttcattctttaagaatttttttttgttaatttttatcttacaattttccattagaaaggaaagctgataaaaaaagtaaaattattgcttaattgtctattcaaattgcattttgattaattgtttcttcccactgccaaatcgccttctttatctgatctgacattgttacaaaattaaaaaaatatatttaaggcaattcaaatgaaaatcgttaattctaaaaaattcaaaaataattgcatcagaccaattctcttccttgagtagtgattcaaaatgattgaccaattaattattattcacttccgctgaatttc

SEQ ID NO: 11582 - DNA, 2575 bp, Heterodera glycines
aaacaaatatgtacataatgaccagcagaattgctgtggtgtcacggagaaatgcctaaacaaatgccaagttgatcaaatcaacagcaaacgccgcggatcatagggatacaaaattttcaaaaattgctcctattaaaatgaggccacctctttgaatctgttgactcaataggggaacagattttggaattgattgcttttttgtaacctttttggggctccgataggaattagaagaaattatgagatcaatgtaatgaccaattcacagctgatcaattatcaatcaataaataactcatttttaatcaaccattaataaataattttttttatcagttctttcctttttaatgaaaacctaaaattaattgggacagtaatttaacccagtcttgatgcgcatttgattatccaggaaacgcacaaattttccgctttaaatgatcagctgcgcttgatcgactttgggccaaaaaattatcggtaataaaaggcaaagccaaaaagttctcggttgaagatcagcgaatgccgacagggacaaaaaaatgttcagaatgtctatgaaaatcatccagaaatatcttacaatcatttttgctttataaaaacagaccaatcaggcaattagtattatactaaactactgtcaattgcataatttcaactgtttaatgcgatacgttgatgaaatattaatgggacatttttgcacaaaattgattttaaaatttagttttttttaattatatcattttaatgtgaatgtgtaaatttatagaagaaaattaattatttaaagctcacatccgggattacttaatcacttccgtaattgaaatgaaataaagctaatgaccgaaaatttataattaaacttagacaaaatgtgaataaatgaataaactgttttttgccttgccataattggatataaacatgtaatattgaattaatttattaaataacatttaatgaaaaatatgatgacgtaaaatttttggttcgaaattccattaaatcgcatatatttaaatcaatcattggtagtgtaaagcgcaattaagcacatccgttttatctctttcccaagcacatatccccgctctcttccattccattttccgttccataagtccaactatttaatcgggagcattctctcgataaggagtcagttgagtgggcagtaatcggcgagcgagagccgagagcaaagcgcggcggaattattattttatgtgattggccaatatttatcttatattttactccttctcgcccatcccagcacgcgtattcgatctagtgggcgcccaagggattaccaatttggggaggctactgtaacagtagaaaatcggcctaaaaagttcttggcttccgtcaacggagaagcagcatgaaaattgctaaaaacaaacaaaacacgcggtgatcacaagtcaaaaacaaggcataattttccaaaaatgcggcaaaaaaccggcaacttttgggcaaatttatggtaaaacagtaaaaaaacattcaaacatcttatttatcatcacttttatgcaaattatttattggggccgggagtcggaaaaatttttctttggaaatttgaatagattgttaacatttggccaaaaatgacaaaatttacacagcaaatcgtatccctggagaaaaatatttaattatttttataaactaaatgaaaagagttagaaaagcaaaatcaaaaaattgaaaaataaaattctgtctcgtgaatccgggctctaactatcgcaaaacaatgcaaaaataggaaaaaatgaatttataaaatattaaattagctttaattctatcaaaattagagaccggcgcgggacgggatcccgtgcgggattttgcgggatcccagtccgcaatcccgcattttttggaaatttttctaagacagaatgccaaatatttttaaataaattaaataataaatttaattaaagttaactcatttttcatcgcaaatttcattcaaaatttgtgaaattttcggcggcgcctatcagctccgccggataggcttttacttaataatcctgtagaaattgagtcaaaaactgcgtcatttggtcaattttagacaaaatctgttaacaaatcgcattaaatttcataaaatttctcgcagatgtcgataggcaccaggtatggcacggaaagacttccgatttccaatatttttggggtcggaattccgacttccgaaatttttgatgaaatgtcggaaatttttttaattttttttcaaaaaactagtaagttttgtacaatttctgttaataaattcaactgaaatttttaaaaatttcccggcggcgcctataggcactgccggaccctaaaaatccctatttttcttgcaaaatttgctcaaatcgcaaaattttgtaattttttggacaaaatctgttaataaaattttcccggcggcgcctatcggcaccgccgtaccctcctccaagttcccaaaaagtttttgaaaaaatcgcactgtaaaaaacgtgtaaatagtcactccttttccctaaaa

SEQ ID NO: 11583 - DNA, 1115 bp, Heterodera glycines
  unsure (1)..(1115): unsure at all n locations
attaaaatatttagaaattttttttattatattgtatattttttgaaaaatttccgacgttttgggtcggaattccgacttccgaaaatttttggggcctcggaatgccatctctgatagggaccgccggacccccgttcctagttttttgaaaaattgcaccgcaaaaaagtggttttgaaaagaaaaaatagtcaaatttatgaaccgttaataatttgatttccgatcaactttttaccgtcggatccaatcgaaaaatcttagtcgacccatcagcaccttttaatgcatcccgccagcactaaaaaatttctttttcaaaatgtcaggcattttttgatttttggaaattttttgaatttaattgaaattttttcgaattttccaaaatcccgcaatcccgcacgggatcccgcaaattttaaatgcgggatttgcgggattaatcccgcgggatcccgtcccgcaaaaaattttgagttccagtcccgcagcgggatccgcaaatttgaaatttccggtctctaatcaaaatcacgcgtaattccgtttttgaaaattcttatgccaatgactgattattacgatttaattttttattttttcagagttcattcgtattgaacacatttgatctagacctaaaattgagcatgaaagccaaaaacataaaatttcaccatttttatatgtatgtgtaaaattaattaattttctatcgttaaaaaatataccactatttaaacatttttgccaccatttaaataggtaataactagggctgccaattttatgtaaatacatatttttttcctggcttctccttgctctaaatagcaggaaaacactttcttttttgtgtttgcgaacaaaaaccgggacttttatttacatatttcgggattttcttacatatttgtacatattttggattttttttcatatatattttcatttttttacatattttgaaaatttataaagaaaaaataagtttgaaaatgttgcctaaaaataccaaaaaaagtaatttttatgtcattttgtggctatttttcatattttacggggaatttctttccaaaaaataccattanaaaaaatttatttac

SEQ ID NO: 11584 - DNA, 2302 bp, Heterodera glycines
aattccttttcgatgggttaatacattttcgtttttcccatcattttttggtggcggattaaaattcgaaaaccgtccaatttgggaaagaaatatcattaaagtttcaaatttatgcttactgatttatttttttgattattttttcttaaatgaaaagattgcctttcaaaatttagcattaaatatatatttttgtttttgtttaattacatttttgagttagtccggctggattcgacgaggtatttaccggaattcctgtcctttttccggatcatttcgcactcccgttcccgactcccggtccgcattttaccggtctctagtaattaacaaaatcttaaatgttgccaataaaataattaaatcattaatgcattaatgcattaagcattcatttaggcctacgtgactttttttaatgtctattattatttatcgaacaaaccacaaggtgctacatatgcactctaacagtggcgtaaaaacaaaacataaaaaataaatagtttaaaaataaactaaatttgacgaaaaaacaattataaaaaatgtttgaccatacgaaatgaaaaatttgatacaaaaaataaaaacttgtagggaaagaaaaggggtctggcgcccatttggctggcgcccatttggttggcgcccatttggttggcgcccatttggctggcgcccatttggttggcgcccatttggttggcgcccatttggctggcgcccatttggttggcgcccatttggctggcgcccatttgattggcgcccattcggcttcgacccggtccgaaaggaccattgttttttctattgatatttttaggccattattttttgccatttatttattgcctcaagcgcggaagataaattctctctatttttatcattttaatgctcaatataaattttaatttcatcggcaaacatcttaataccaacattcttaggcaaattattcggaagatcattaataaaaataagaaaaagcaaagtgcctaacagggctggagcgcgcacagaaaaaaaccgcggccgcgcaccgcgcattcaaattgccgcggaccgcgcatcgcgcaaaaaaaaaaaccgcggccgcgcatcgcgcaaaaaaaaaaaccgcggccgcgcatcgcgcattcaaattgccgcggccgcggaccgcgcaaaaaaaaaacgccgcggatcgcgcatcgcggtcgcgctccagtcctggtgcctaagacactaccttgtggcatcccactataaatgttttttgagttagaatactgctcagagattttaactctgaatgaacggtcatttaagaaatttttaataaatttatgaatcttgccattaataccgacatttttaagcttttgtagaagtaattcaattggaacactaacaaaagcttttgaaatttcaatatatattacatcaacacaacttttattttcaatcgatttataaaaatcattaaagttgataagagttgtgttgtggtggatctttgtctaaggaatccaaactgaaaaggactaaaaaattgatttttattcaaaaatttaagtatttccagccttattactttttccattgccctgcataaagtacaagtcagtgaaatgtggcgataatttatgggattatctgtctctccttttttgaagacagggataattgtggatgttttccatatttcagggattttaaatgaatctaaaattattcgaaagagttcagttagtatgggtgccaaaggaaatgcgcattcttttaataatatgtaagggatgccatcaggcgatgtagaatttcttcgagggagttttctcaataaaattcatgtctgtgatatgattaggatttacatggctgcgaaagtcatgttattttccttgtacaaaaatgatttttgaaagacatcagccaatataatacatttttgttcattctgaaaaataatttgcccttgttcatcaataagtattggtattccggtgttatttttaagcctgtttctaacaaatttatagagagaatttcttccatttgaaatacatttagcctcattttcacaatataatttatgagtatgttttttatattccctgcataatattttgtatttaattttaagctcacgacactcagcttttccttttagcatgctatgtgttcggctttttcccggactaaggttttcatttttcatcatgtttttgcttaatagttgttttaagcaatttcatgggtacatatttataaaaaagtttttttaattcagtcgtaaatatataat

SEQ ID NO: 11585 - DNA, 2694 bp, Heterodera glycines
tcctttccccttccctttctttcttttcttcttctcttctcccatcctctttcgtctttttcttcacatcttcctacctatcttccgcctccatttctcaaattttctcctcttttccttcccttcctttgctatttttggcagtttaaaaaaatttaaaaaaaattttcctcttttgggactatctgacttatgcttctccttctcctcctccatcgttttaatgtatgcatccaacttaaacttttcaatttcacacgattcttcttcattcgtcaaagcctgctttgcaaaatacatcatatccgcctgttctggttcttgtattatctgaatgtaatcctttaggcacttctctttcttttccctggtctccttataagtcttcaatagtttctcaaactgttcatccattccattagcatcataatatttcatgtattccaccaaatccttctcctcctccatcgttttaatgtatgcatccaacttaaacttttcaatttcacacgattcttctttattcgtcaaagccttttttgcaaaatacatcatatccgccagttctggtattgagctcatctgaatgtaatcctttaggcacttctctttcttttccctgatctccttataagtcttcaatagtttctcaaactgttcatccattccattagcatcataatatttcctgtattccaccaaatccttctcctcctccatcgttttaatgtatgcatccaacttaaacttttcaatttcacacgattcttcttcattcgtcaaagcctgctttgcaaaatacatcatatccgcctgttctggttcttgtattatctgaatgtaatcctttaggcacttctctttcttttccctggtctccttataagtcttcaatagtttctcaaactgttcatccattccattagcatcataatatttcctgtattccaccaaatccttctcctcctccatcgttttaatgtatgcatccaacttaaacttttcaatttcacaccaccttttcttctctttaaaaggcttttgcttttcaaaaagcggatcatataagcttttgtgattacgttggtactccttaacagctttcttccctcctccttggaccctgacagtttcttcccttcattatacgcactcaacatagcctccaacgccaacgtcaattgcgattgaactgattccgaatcatccagcttctgttgatattccctttcactttccatctcttttttcgcattctgataattattcaacaggttttccaacttattgtctttctcatcttcataatccatgcatttattctcttttggaatgtcaaccgccgaaaaatcttgaggtcgttccaaagtaaatgcataataaatgccatcttttatggctttcacttctaaaaaggcccaaattatttttagggttggtttatttttgtgttttctgattgcaggcgcaaaaatgtcgagatagtttgattaaaaagaaatgtgaatttttcaaaattaatttatatgtaacaataataaatgcacttatcacctggctgctgaacatatccgagtttttcacaattctcaatatattccttgacatgtttaaagaccggttcaggtggataaggctcttctactatacagtaagcttgtattgtgactgtatcatttgcttcaacatttctgaatgacaaaatctcgacgagcatgatgacgagactggtgatggtgggcagcattctgaagtaatatgaacaactcttggggttttgattttgtgataattccctcgctattcaatcggcttttataatgatagcacacgcacgccaaagcgcatagcagcatttcgccagattaatgcgcatttttatgaatattccctcatatattaatcaatgtttcaccagattaatgcacatttatgatggcaagcacgcacgcctaagcatttgccagcaacgcaatgtgtatgcttaatattttttacacatcaataatttacttttatgcatatgtcagtctctgtgttgtatattatgtgttatgcttttctagcccatctctgaattttataatttattaatataattttcttttcatatgcacgcataccgtttcatgcatatgcgtttttatgaatatatcatttgaatacacacacgtttatgcacatgcccctcatatcactcctttttatgcatagcgtaaatgtgaatattttatgaatagagcaaatgaatgcactttttaggcatatgcctctcatatatgaatatttatgaatatagcaatatatacggatttgttgaatctgctttttacgatttagcatatacatgtagaaggctgacttcgtttaattgtacggttattttaattaatcgcatttttttttattttccataaaaaatttcagtggcattttcgctcgccctgcgctgtccgttgtcgcaacttttcgtcaatcgatgcgagttccttttccgactgcgcaaggccaactacgtgccgaagacgacggctgatcagtgatcacatcacgctggagcagttctgccatcccagcgatcgcttctttgattcgtttcaaattgtcattcgtttcaaattgtcattcgtttcaaattgtcattcgtttcaaattgtcattcgtttcaaattgtcattcgtttcaaattgtcat

SEQ ID NO: 11586 - DNA, 2301 bp, Heterodera glycines
cgtagatcagaattctgagaaagcaacactttgacttcccctttagttaagaaatgattttaaatacggaaaaaattacccgtttcccacaaaaaaaaagtttagtttttttcttcccaaaagtctgtttccccgctgttttatcgtttggtccttccttctcacttggtttggtcacgcaatgatcgtccaaatcggttgtgactattttcgttgccgatttcgagcacgggctctcggttgaagccgatgtggagaaggatcagacaggagccaggcaaaaggaactgcgcgaacagatcggccaggggaaggaacactttccaaaagggacggccgagccggagaaagctgatcagtgggctgaggccagcaggggatgcttttaacacattttctgacccagcgcacccacccgtccgttagcatacagcgttgggcccagaaagggcccggctccgtgtccatgcagaaactttaatttttcaaaaataaaaactattttgagttaaatttttgaaagaaaaccacctgtatagtgcggcgtcgtgctcaaagaagcgcaaaatgccgaggagaacgctaattacgatgatgaacaaaatggcacgggagaaacgctcaatcttgaaaaaaagtgaaaacgaaaaaatgaaagagtgttaccgtccgaagttttaatgtgcttcggtggtattgcgtgagaaatcttagaatttttagtgaaaattggtttcttgaatttaaggaaaaccttgcaacagcgagcaaaacctaagaaataaacttttcaaatttaaaaattatatttttatttttaatttgtagcgataaattaattatgaattgctaaataaatattttaaaattaaaataataaattaaaaccgagaaaagtgtgacgagagtgtccattgtatgagggataacctgaacaatcagggtgtgcttttcataacatcaattaacgttaattaagcacttccattgaggtgcggtacaaatggcacatggccaccgattggttcatttgacgaaggccatcgccaagcacataatactaattggaataaattatttttaggatttaatttaaaattgaatgcttaacccaaacggtaaaagggagcggcgacaacaaagagacccaagcgcagaagcacaaaagcgagatcagctggtataacgggttcggctggcagaacaaacaaaacgagcatgcaattaatgccctaattagcacaaattacaaagcgtcggtcgccctcgcgcttttcgcgtctgctcattcccaacattctgaaaaagtaattacttatgtgaaaaataatgattaattaacaaaaataattattacacggcgcttaatggagcgatcattagcaggacgagcatcggataaacgaagctgaaattggcatcaaattttgttgcaaaacatttagaaggcgacccataaacggcgacgtggggccaagcgtcgttgattctgccgaacataaaagcaacattcgcctagcaaaaattaatttttataattaaatattcgttttaataacaaccgaaacgagacacttctgttgattgaaatcgtagaaaaaccctaaaagtgccatttcaatttaattgaatttttgtgcctttgttttacccgttccgcaacaacactttgctgtcttaagcaatgcaaaatttaaatttgatttgtcaaattatgctctttttgtaccctttgttcttcagtggtgcattggtcggctggcagaatggaaatgttgtgaattgtcttaatatttttttgtcatttcactgattatcattgtttgccattttctgtttttaatttgcttttcattcgttaattgcttaattcataataatttccacccaccaaatcagcatcgccgtctatgtgcacgagttgcatttgcttcgttcatggatggtcatcagcagccgattgtgaagcaattttagcacggaataggtgtcatctcatgcgaattattatgcatttttataaacaatttaatttttcaattttataatcaccaaaataaaaataattgaatcaaaataaaaatgttttatttgtgccatatgaaagggtttctttccattgatattttccataatcccacaacaaaacagtgccaaatatcatcggtcctctcccctgggcttttctattcaacaaactatgggccactaattggcacatttattggctcaaggtgctctcgagactcgggggaatgaagcgaccgaccctcgactgggaggaattgaccgggtgaaaag

SEQ ID NO: 11587 - DNA, 949 bp, Heterodera glycines
  unsure (1)..(949): unsure at all n locations
tgtcaaataacanttttgttaatgacgctaactctaattgcccgtttaaaataaaagttctcgtcattttatatagagattcattccaatcggccggtttgaatttgcctttgatcaccgctttgactttttggcattccgtccattcattgggtttattatgcaaattacaaattggaacctttgctgccgttgttcctttttcggtttggctgaaaattcttttgcccttcttctgctggtcgactcggtgttaaattggtcgaaaaattcccagagggaatcaatcagtggcggaaatttgtacaaattgtgcgtcgggaccgttgtcaaaattttattcactctttgcattgggcaaagtgccattggtggaaggaaggaaaagggggcggagagggcacaaaaagagggggcgaaagagggagagagagaggagcgaccagcagcaggcagggggtgaaggggcggaggggagggggcaaggcggcggggggggggggggggagggttgaaggaggcggagggggacatgcacagcacaacataatacggcaacagaacggcacgcaactcgacaccatggtagggggagggggagaaaatagtaaattaggaaaggagtagagtccgatattgacagcaccatcattccaccacttcggactaagagtcggtgaattgtttttcgcgatcctccgctggaggctcaacactttccagacaatccataatggctacctatcacgtcattctatgatgtgattatgtttacttaaatattttgcatcctttttaaatccttctaatgggcggaaattactttcgaaatttattttatcttttggagggacatttattggagttataataaaaatatgcgaaatcaccctaaggtaaggcagtgcccgacgatataagataatataatttgtttcctaatttcccc

SEQ ID NO: 11588 - DNA, 1545 bp, Heterodera glycines
gggggcaagggggcggacggggacatggcagcgacattggcatgagcggaagaaatggcacggggctgggatagtgcagaatgaagaggccgcaaattattggcactaaaaaatggcaaaattgtcaaaataaaagaggggcgaacggatgaagtgaacaatcataatattgttgtgtgtttgagggccaatttattccactgtttcacatttgacccctcaaaattcttaatgatttgcttaatttgcgccttttattttccatttcaaattctgtcgttccgtcttctcagataaggtgtcctccgattttgcgatttgaatgtttttgacgcataaattcgcaatggcaccgcatccgtgccattggagccttcttccaacgtttcttttgggttttgtgatggcactttgttggtgaagaattttgtttcgccgggttgaccaagtgcaccgttagggccccgcgggccatgaaggccgggcgagcctggtggcccacgttctgaacttcattccattttgcaaagtcatctggaattagtcgacctccttggtatcccctgggcccatttggcccgcgttccccgggctgtccatcaaatccggcattgcccgggccgccccttggacctgtcagtcctttaaaaaagaaaaaggttttattgcacaattaaagataatttaccgatcggcccaatccttcctggcgatgcactaaagatggtccgtccttaatattactcacgattttgattttgctaatatcatccattatttttgcctgggtctccgatcggtccttggtggccaaatttgccaggctttccatttggcccgaccggacctctaagacccttttcgccagagcttccaggaataccaggcagaccaggcgaactaaaaagtcgaataatggaaacaattaacatggattgaattgatttatttttttatagccatttcctcccaattttatccctttttgcccgttttctatgcttatccccctcccctcccttttaccccgatgtgccgcgtgctcctttaatccccggagtcccggggggcccgcgcacatgcggtggacaaatttggcaagattcctccgccaattgctgcgcatttatgtatgctcctgcctttccatctcgtcctggcattcccgactcgcccgctctcccatttttgcccggttggcccctttttcccgagaggccgggtgggccttgcttgcaggtacagcataaagggaaattttatttggtattgttttcagtgaatttacatgagtaacggaaaagtgccgagattggctgggctttgtacccggaataagcgccgcggggcaatcgccctcttaacaaccaattttcatgttgagagtctttggtctgccgttctcggataacaagaagttcattcttaattttcatttgttttaaaatatatctttaaaattaattcccaataattattatttttactcggcacgaattgacggattgtatcataaaagagtttcggtactgaatgttaatgaaa

SEQ ID NO: 11589 - DNA, 3316 bp, Heterodera glycines
tttaaaaattacttttgttatatttcagggtacatttcaaaatattttttcactatattttcaaacatttctaaatatgtaaaataaaaatttgccgaaatttggatttattttgaggaattccaagaattttcgtaaaaaatcctcaaaatatgaaaaaataaaaatatataagaaaaaaatagtaccaaatatgtaataaaatcccgaaatatgtataaaaactccgaaatacgtaaaaatatgtaaataaaagtcccaatttttgttacaagcacaaaaaagaaagtgtttttcctcctatttagagccaaggagaaatcaggaaaaaaatatgtatttacataaaattgacaatcctattgatcagtagggataccttttttgcacaaaaatcagggaataggcacctaaaaaacgcaggaaaaaaaaccgaaaaatatttttttcgaaaatcctaaaaagtattaagagcgctgaaattttattaatcaaacaattttgagaaagatgaaagtacagaaaagaagaacgaaagaaagcgaaacagagaaagagagagaaagaaaaagaaagcggaaaaacattttaaaaagtaccgacaaagggaaacaaagcaaaaagaaatagtgattaataaacaaatctctgatcagaggaagggaaaaataaattaagcgtgcaaattgaaacgataaatcacataaatgaaaacaattgcaatggcaaccataataaaaacacaatagatatgaaaccaaattgagcgttctgagcgttccgcttctcgtgagctttccaattctaaggcacggcgcatccgacgaaggcgaaatgtgtcagtggcaaggcaatcatccaatttggcaaggagaaactgtgccaaatcacttggccagagcatttggtccttttttatttgcagaaattcgattacggcatttttataatgtccttctggcaatacttttgaacataattttgatgccaaatgagcaaatttatgacgaaatttctcattggcatttttttcgttcaacttttgaagttccttctctgttgccttcatgtgggaaagaataaatgggccattcgttgtaaacttttgaatttggcgtttcgtttcatcactgtccgtggcgatccgttccctttggcacatttcgccaatatttttcacaatttccgcaatttcattttgtccttctatgatttttttactgtccaaattttgaatgatttggcaagcattggtccatgctttttcttcttccgttggtttttctttgcttttgttcgaattgatcatttctgagaaaattaatttttttgttaatttataactttttttctttttttttaaactactaactagagttgtacgggaccgggaatttttgccaaaaccgggaccgggacttgccgggacctgagaagccgggactgggaccaaccgggaaatttcccaaaaaaaaatacaaaaaaaaattaattttttgtttggttttttattttataaaacccaaaagttaacgcaaaactaaattataatatatttaatcaatatttcaaaccaaatttatttcaattatttcaaacaataatcatttttggactaaattatcgaataatattagaaattcagatttgcttttcacatcactttttcggcgcgctctttgcaaaaaactttttgggaaataaaagcgttccggtggtgccgataggcgccgccggaggaaattttgaaaatttgagtgtgatttgttaacagattttcaacaaaaaaacactgatttttgagattgctagcttaatttgcacggattttcttttaaaatgataaaatatgtgtcaattcaaaagaaaaaaatgaggaatcatattttgtcgataggaaaaccatgagtataaggggtgtaggagaaggagatttttaccgggaaccgagaccgagaaatgaccccgagaaacgatacgagaaccgagacccacaaaacccgagaaatttctcgactcgggaatcgagaaccgaaaaatttaaatgaaattgattcaaatgcatttcttaatcaaaaacacattaaaagggggtaggtcaaccagaatttttgcgtatgagtctcaacattaaagtaacagcatttttttgcttttaaaatcgtgacctaggcattataattgactcgaaactgcatttttcagaacatattaacaaaattgtacgaaacgcttatcttagagttttccctggtttttaagagtcttaaaaaccagggaaataaagactctaacaacagcttataaaacttttgtccgacctaaattagaatacgctaccgaagtgtggaacccaaatttaaaaaaagacattgacaaaattgaacgggttcaaaaatttttcacaagaaaagcatttagaaaatgtggttttgtgtacaaaaaatataaggaaagactaaaaatcactgatttacacaaattagaagaaagaagaaaaatcaatgatttaacaacagcttttaaaattataaaagggttcaccagcctcgatgctgaaaaaagtttctttttctcggaaaggcccaggaggcctttacttttgcgagtaaagcgccacacggccaaaactcaaaataattttttcaatatccagttttagcggtgcaaattaataaggcaaaggaattcagggatttactaaaagcaatgagttctgagtaggaatattcatgtgccacatatacactatattttattaatcacctgtgaatttttaacatttgatttattttattttcatttttattacggtattcattttgtattttttatttgatcaattttatttctttgtcttacttttagcaccatgtaagagcactaatgtgccttttgtttgctcgataaataaataaataatttctttctgatttgttaacagattttcaccacaatttttgcggttttgagacaactggcggccatttttacattcaaaaggcttttttgcggcatttttcaaaaaactttcttttttaagcggggggagtccggcggtgccgataggcgacgccggaaaaaattttgtaattttaatgcgacttgtagcagattttcaccaaaaaggccaatttatttttcctcttttcccccttcgctggctatccccactccccgaaagggtcatccttaacagtgtaaaaatttctcggtttgcgagactgaaaacccgagaccgggaacggagaccggaaagcgaaaaaccagagaaatttcccgagtcgggaaccgagactctcgcacagcactagag

SEQ ID NO: 11590 - DNA, 1693 bp, Heterodera glycines
  unsure (1)..(1693): unsure at all n locations
acctcgaaggactggaattcccgccccggtcccggtcccgtacaactctactactaacgaaaacagaataaaatttgttatttaaaaattctttatgccaatataaanaactttagttttttgtagctatttcaatagcatttcgcgatttttcaaatctaaaaatcccagccctattaatcagcctatattctctattttgatatcaaaatttaataaatcaccttcaaaatccgccaaacttttttgcaattttaaatcttttgtcgaaattttcaaatttttactcgtgaaaaagcaattgctaaatgaaattgaaaagaacggcaaaagaacaacagagataaatatttgtggaagcattttttgaagatttgtaaccttaaataaaaattagttaaaaatcacagccattgcctaagcaattgctactcgagaactaaaacggtttacaatcagttagctaataaaaccgagcattctttttctttcttttgaaatgcaacaccaaatgttgctgggttaaattgggtttagaaatgtaaaaattgtcataactgatataaaaaaaatgacaagaacatttgttttaagagaaatgattaaaaaattatttgttgcttgacatttattaagccttttgctcgattatgtctcatttttccaataaaatatgtgcgtcatttcctactattttttcaaatacaaaatatataaatgcttattatatttttgcaatgtattattattctatttattttatgacgtcgttttatcacattttgcgcgcgtaaaaaagtaggagaaataaatggcacagcacaaaagcaaaagagaggcgaggaattaattgtatggttaatgacaacggataattcaataaatcacatgccaattgacgtatgttgctagaatattcataatattgaaataataaataatcataaaaaataataaaataaaaacaattaaatcaatgatggaatctaaattataaaataatatttaaaaaggtaaaacaatatttgcatgtgcattaattcaaaagaaaaatgaagcaaatgcttttcgtaataaaaaaaatgcaataagctttgacgagaaaaacaaataaatttatccaaaaaaacgccccaaaaaattgtttaccaaacaattttcctttctaaaagataaaaaacaataaaaaaataattgaaaaatgctcaaagccattaaaaaatatgggataaataaaactgcgaccagcagaataatttggatataaaaaggcaataattttttagttcagatatgcttcgaaaaaccctgcaaacaacagtcacgacaacactgttcttcgaaagtaacaacaatccatccaatttttcctgtacccgtatgcataaagatcaggatcggatcctcggatcttgtcacgcaaatttgcggcccatttcttaagggccattttcggatatttgcggcctaattttttttattgaattttgcggcccaagccaaaatctgacatttgcggctcgacttttgcgggttccccaaatttcatcatcattatttttcactgtttacaatacatcaattattaccacagaaaaaattatttttcaatgatttgctcaatgtttaacgagcttacagttcacccatttatggtgcccttctgcaaggcgatactgttatgtgtttaaat

SEQ ID NO: 11591 - DNA, 4344 bp, Heterodera glycines
cgaacttaaagctattattagccgcttaactgctattgaaaaattaatttcaaccaacaacaacaacaccttggcaaccgaaatgactgcgcagttcagcgccattgcggaacgcctgggtgaaattgagcgcaaaattaacaacaatggcattggcagcgcggaggagaaagaacgaaaaaggagccttgtgctcatcggtcttccggaatcggaggaggaagtgtcatcactgcgtgcgaaggatgacgcgaaaacggtggaggaagtgttggaccggctggacgtggaagtgtgcccgcaaatggtctacaggatgggcaggaggattgacgagaagaggaaaggaccgcgcttggtgaaggtggtcctgccagcttcaaccttccaacgttttgcgctgatgcagtgggggcgtcgtcggacggagctgaagaagagacctggatgggagcgtcttctggtcaggccatccctgacgaaggaggagttggaaattgagcgggaacagcgccaaaagaagtggatggaatttggaaagaagaaaacgggggaaaacatcacgacgcgacgcggaggcaatgaaaaaaacttttgaggtcacctccttttttaaattgtttatatttcaatgcacgaagtttggcgaacaaattagacaagttaaggtttttgtttttagaaaataggtttaaaatcattgctgtatctgagagttggttgagtaacaaaatagaaaacccccaaattttggaaaatctcccctattctataataagatcagatagacttaacaaaaaaggtggcggggttgctttcataatatcgaatttaattccttttgaaattatcaaaactacaaaaaacaaaaattccgatattctttgtgttgacctattttcaccctttaaccacacaaaaatacgttttattttggtctatagacccacctcccatgaaaaacaagaagatttcgaaaaattggtcgaacaactctctgttttagtctcggcttctgaaaaatgcattagagggatataaattaagactaatggtcaactcccctacacggggaaacaatttattagatttattatttacaaacaacgaaaatctattgaataatgttatagttgaacccccatttggtaatagtgaccataatgcaattcaattcagcataaatttacaggttaatagtaatgcttcaaaaaaattttataatttcaaaaaagcaaattatttgaaaataaatgccatactctcaatggttgattggaatttatttttttctgattgcccggacatagagcttatttaccaaaaatttatgtttttcctaaataatttgataaggaattatgttcccatacaaacaacgaaaaaagttgaaaaactaccagaacatattttgaaactaatcatctatcgtaaacagctttggaaggatattcacaaagaccatataaaaataaaattcttagaagtttcgaaaaaatcgatgtagaaataaagaaattttataaaaatcgcgaaaataagtttttgcggaccttggactctaaaaaacgtttccaatttataaattctttccttaagactaaaaatactatgatacctgcatttactgataaaaatagtctgattctcttctcagataaggaaaagtcgaatgcattagcgcaacaatttttttccgtttttacagatcaaaatctagaacaatttcaatgcatagaaaatcctgaaaaaaatatcgaatattttaacataactccatatgaaatttatttttctctttccaaactttcaaattctaacaatagtaatggaattcccaatatttttttgaaaaattgtaaagaaaatttagtccgacctcttttccatatttttagtttctcattgatgactgccaaaattccagaaatatggaaaaagtcaattatttgccctgtcccaaaaattcaaaatccggtaaacccagtcgactttcgtccgatttccctgctatgttctgtttccaaaattttggaagaaaatatagcaggaaaaataaaaaattttgttgaaaaaaataatttgttaccaaattgtcaacatggttttcgtaaagcacattctgttactactcaacttcttgaagtggtggatgatttcagttttgctttagaaaatagaaaatcaattgatgtaatttattttgatttagctaaagcattcaacacggttccacataaccggctaatatctaagctccaaaacattggtataaataattccttattaaaatggattcagaattacttagaaaaccgaaagtttttcgtcaaaatcgggtctgatttctctgacgaatatccctgtctcagtggtgtgccgcaaggctcaatattgggaccactgttatttcttatttacatttacgatttaccaaaattctgcgaaactgaaaatgttaaaattaaactatttgccgatgatcttaaggcctatcatgttctttcaaatatttccttttctccactccaaaattttattaacaaatttaatcgatactgtaaattaaacggccttaaaatcgcttcaaataaatgtttaactttacatttaggacacaaaaaccaaaaaataaattattttattgatgactttccaattcctaaaaatcccggaaacgaaccagtcagagaccttggcatttattttactaatgatttgaaatgggcacaacatattgaaattatctcgaaaaaagcattacgatctgcttttgctatattaaagtcaatcaaaactggtgatacgaaaatacttgtaaatttgtttaatatttattgcagaccaattttagaatttggatctccaattttcaatccttatttaaaaaaggatattgaaaaactggagaatgtccaaaaaacttttttgagagtaatatttagacgtaacaattatgctgctgatttacctaattatgctgaattgttaaacatttatgatcaaaagtcgcttgagagtcgtaggttaaaaatagacttaaaactttttcatgaaataattttaggtaaaataaatttacaaaataatgaatccttttctttttccaaaaacattgtaaaaaatgaatacactataagaacagcttattgctcaaccaatgctagatacaattcgttctttattcgaacctctcgtctctatagacttttgcctaaagagacgagattactaaattctaatgagtttgccaaacttcttgaaagatctgatctgaatttgttgatttctttgccaccccagctccaaaagtgaccaattgtttgttttatttgatattgtttcattatttcttatttttcggcgtcacgcttatgcgtataaatgaatgaatgatgcccattttggttggagatatgagagattcatttgctcacccaactttttttgaggtcatgggaatagcctataataaaagtgcaattaaattgggaaaatacacccataagaaatgacctgaaaaattttcagaaaatacaccccctaagaattgaaaaattttctaaaaaattgatcgccaaaatttaattttttttcttgataaaaaaatctaggtttaaaaattttccttattcgaaaaacacagtgaaataattttcatgacctaaatttaagctattcggttaatgttacgtgtcttgcactataataatcctaataaaaatctgttaaaagcacttctggcatactatagtgagaatctatgcgcgggtgcctgagatactgcctctgtcttgactcttggtgctgcgttagtcggtccataacaataatttggaatggggaatctaaaagttatagctgcgaggacactccccacaactgtcctctacatgctggtattttttatttttttattagagccaccccctggcctgcacgcttggctaattgaagtgtgctcaaaatgtacacttcagtaccaggcgaataactcgccaggggttgctttgcccgaaaaattgtttctgagcaaaaatgtgtagtatttgaaaggctatccaaccaagttttaaaatttcgaaaattttgaaaatttttcgagctaggcctaaaaaaaggttttcgggtttttgaattttaggattttttaacgatttttcccagagaaacggagaccacttccacaaacatagtttttcgagctctatcgactggtatttttttcggaaaaatttcgattttttcccggaaatagaaaaaatttctggcctgagcgggacatttgagtcccgggccacaataactcgtcaggggtcggttttagccaaaaaattgccttag

SEQ ID NO: 11592 - DNA, 4488 bp, Heterodera glycines
aaagggcgggggatggcaaaacgccggcccattgatcggcttgaagggtgctaaaaaaagacccaaaaggcagtgacgggaggacgaatggcgcaaagtgttgtcgccgggaggcgtttgaagtgacgcggcattccggcacggaggtgggccaacaaaagggggggggtggggagaaatgcccatgccagaacttaaaagcaaagccgagtgcaccgtgaaaaatcatcgcatttaattaaatattaaattagccgaaatgtataaaaaacaggcaccattcaccggaaaattcgacaaacatttcgtagccgggggtaaatacacttgcgtgtgctgtggtgccgctctgttcgtgtcggagcagaagttcaactcggggtgcgggtaagaggtcaaaaattgaattgaatttccaaaatttgtgctttcgcagatggcccgccttctccaaatccattggggacgatcaaaacattgtccgactgcccgacaattcgtacggccgtcaacgaatcgaagttcgatggtaaatgtctaaaaattactaaatttccttttcatttaaatttcccataatttagtgccaaatgcgacgcacatttgggccatgtattcggtgagttttattactacgaaattgtaaactatccgttaaacatttgcaaattcatcaaaacctaacaataagatgacggaccgccggccgacggtgggcagagatactgtatcaacagtgtggccattgactttgtgtccgggcaacagaaatgaggaaattgagaattgccctttccgctgtgatccgtcattggccggtccatcatttgttacgagttcaaggggttttttctgtgcgcgggctagaatccctgagatttatttacaaattaatgaaaatgccggacagaccaattaatatttttttttatttgcttgtttggctatttatccaatccctttttcatttatttgtttgtgattttttggcttttgtatttatttttttcggttttcataataaatttctttggcattttgccgaaatgcttttggccgccttccgtcgcataatgttcagccaggacttggtcgcggaactgttgtccaaatacagcattacgaagcagcggattgtcatcgacttttcctctccgaacattgccaagacatttcacatgggccatttgaggtgagtaaggaggggggggggggagtcgaattgtttagggctttatgaatttgactgattgagaagtggaacattggcactgcttttgcttttccaggtcaacctgctacggtgattttatgcagcgcattttccgccatgccgggcacgaggtcagtgctttttgaaccaatgatagctgatctcaaacttgaacaagttggggaatgggattatgatgcccccgaatttgccatagattgtttcaattcattttctcaaaaaaatgattgtaaaagtcagtcacttacaattgacagacccagcaggatacaattttgattacactgttaaaaattattcattaatccgatataaaattacatttttgccccgtcctaaaggtggtctctctcaattatttgggcgattggggccatcagtttggactgctgacagtttattggatggaagtgatggacggcatggatgggcgaatggcacaaccaatggcggacgaatgggcggcgatgagcgcgcggaaaagggtacgaaattgggggaccaaaacggcatttgcttccagggattccctttcttttcgaattcagatttcaataaaaaaattaaggaaatttcaaaatgttaaaattaaaattttcggggaaaacatatggctgcatttgtaatggggggtgatggcacttttttacgccgaatttcaattttcaggtccaactgctcaccgacgcttatgtggcagcgaatcggctgaaactgaccaactcggcatttgaccagaaggcccgacaattacaggtcaaaaagctatatggcagcgattaagaccattttcaatctgaacgtaatattgacatttttaatagggcggacgtgtaatttaggatgagacaaaccaaaaattattttcagctgaacatggagcgccatatgatcagcaccggtgcggcgacagtagacgacgtcgatttggtcagtttatgttaaagcaaaggcaaaaatgttcattggaattattcttcgattttcaaactttttttgctatttcgaatttcattttccaaatctctctttctcttccccccccccccaattcctccgcctttaggcacaaattcaaaccgatgacaaattgcgcgaagcgtttggcctttggcgtgacttccgcgactcatcagtggcctatttggaggtggaattgccaaattcggatctctgtgtttgctcatttgtttcaggatttctatgctcgtttcggtactaaatttgaccgatgggatgctgagtcgtaccacgtggtggagggcgcccgtctgaccgacgaaatgattcagtccggtctctgccgactcacccgggacggttggcattcgaatttttctcgattaaaataatcaccggaatttctctcttagaattgtgggccgtctgtcagccggaggttggcttaggcagggaaaagatcactctgcgcaaaggcgacggactcaacctgtacatgaacaggtgggacaccgccctctgatggggtggacggagggcttcactacgaacgaagtccgacgggggacttaaccgagggggggggggggagttggacctaaaactacaaccttcaaatcccccgaaattctgcaatttttccttagatttcccgcgaatcaatggtatcttaagggccatcggaaaaaaattcacaaaattttcgatggttgcaccaccggctttttttctttgtgttttcacaatccaagttattaattgttttatcggcgtttgtttccccttttcagagatttggcttccatttatgcgcgacatcgtctttacaacgcggacaaatatttctatttggtggactatggccaggtcattcattcattggcttctaataaatgtgttttattattccttttcgtagaccaatcactttaaccaattgcgacttttgctgcgcatccgtggcgacgacgacttggcggaccgaatggaacacgtctctttcggtttttatttaaaaaaacaataaatcttttttgttttccgtcaactttacaaaattcaatattcgtctaattgtaacatttaaacggcaccttttattggtcaatatttaaatttgtatttctttccggtcgcatcatcggcctgtccacgcgcaatggcaaaaacgactcggtggactttctgattgaccagggcgcgcgcgaggcggatgcgtatgtgcacgcgtcgccgacgatgcgcgcggagccggccgaattgggcacaatttgccgacggttggccgagtcgacgctgctctttgaggtgttagcaccgttggaatatgtgggagacttttattgatatgttaacgggtggcccttcgatcgatgctaaaagttgtgtgaatggtccccaaatgttagtgaatttgcttgattgggttaattggcccaatccgtccgtgacttttggctggacaatgcgtttgagtccctccgttcgttcagattgtcttccgtcatcgaaacagtcacttcactttctcttttcgcaactcttttcgtccgggtggcaccaacgctttgctgctccatgtacgtccccccagggtctcctcgagagtctctactcgaatcatttcggggctatctccgaaagtgctatgcacactctcatggtgccgtttcaggagaagttcagtcggctctgttcgctggagcacgcccaccacgagcacatggaacgcatccgcgcattgaacgcggacggagaatggaaactgaacatggaaatgcgggagccgggacagaagttggctcggcgcatccaggagttcgacacggtggtgctgaccgcgatgaagaagatggacccgaatccggtggccatttacttggtcggtgatgacggactcgagtccaacctctgccaatgcttttccaataaaaacacgcgtcgtgccacactttcagcttaaactgtgcaacgaaattggcacagcgatggccgcccttcgggtgcaggacgaaacaattgcggtggcactgccgcgtctgatgcttttctctgctgccaaaaaagtgctaggcgaaggcatgcgtttgctcggcattgagcccatcgaaaggatgtgaaagtgaacggacagactgaggacagacaacgaggcgacgtggtgccgaaactttttgttattgtttatttttttattcacccatttcactgtggttaattttgaaaaattggaacaaaataataaaacaaatgaaaaaaccacttaatgagaagatttggggctgcgtatctgg

SEQ ID NO: 11593 - DNA, 976 bp, Heterodera glycines
  unsure (1)..(976): unsure at all n locations
ttttacaatagtgcctatttaaaaaaaatttgcgatacgctctctgttataataacataccctcaaaagtttttatttgcgtcgtttataatatttttcattttatcgtgctgaatgaatatttctgtaatcccaataataatattgacaaaaaatataaattaaataattcaaaaaaggacaattttttgtggcactaattcattcattctgttgctcaattgtccgtttgctttacgttttctgtagtgtgtaagcagatgaatttgcagattgcttgactctgcaaattgtttgccacaatgggaacacttaaaaaatgaaaattaaaatggaaattcatcgatttaaaaaaatggaaattcatctattttaaacaattttaacttttttgtatttccagatctacacaccatgaacggcttcttttcggtgtggcgacgaagatgggttgtcaaattgccagcacgtgtaaatttttggggacaataagtgcactaaattaatgtaaaagaagagaattaggtatgttaattatacagttaataggtactcatttaattaattagttttgaagttggatgatcattgcagtttctagggcaattaattgaattatttttggaaatcggctaatcatgatttagttacattcttttaatctcactttgtacggcttttcacccgtgtgaatcaaaatgtgcgttttcagttggccatcctgcgtaaaacgagcgtcacataagtgacactgactcgggagagcaattaattaattttaattagtgagtaattaattgattaattgtttatatattgccacttggtatggcttttctccggtgtgaatgcgctggtgaatgtcaatgtngtggcccgtgcaaatctttgccgcattggtcgcactgaaaaattgctgtaaaatgggattcttgattttgtctattttaaagaattgtcctttacgtaaatgctc

SEQ ID NO: 11594 - DNA, 1744 bp, Heterodera glycines
cactttaaacggctattccgccgtgtgcgttcgttcgtgtcgtattagcgctgacagccagcgaaaagcctccggacagtgcgcgcatttataccacattcgcttggcacgaccattcaattttgcagctaatgaatacttttgcgtaattgttttaggattgttggcatactgtaaaaaagaaacggtatttactcgcaatttttattgtgttcattttaaattttttaaagactaattaactgtcgttgccttgtgacaaaaaaaatagcctattaataatatatgaattcaatatttaaatacccagaaaattattatgctaaaaattttcccgtgcggcatggcaccgtcagatcacgattcccaaagatttatttcaaaattgccataaaactgacaaaccgatcgtttgagcaattaacttggactaaaactcataacttaataaaaaattctaaaaaataggtcttcaaaaattcttattctgaggaaatttgtttttttaatttccaaattctcattgtgccaaaattttgtatgtgcctgaaattgagtgccaagtgtcgattcagtgccattttccatcccgtaattgtcgtgcccttccgccattattccttcatctttcacccgttccccttcttcctcctcctcctctcttccattgttttcctcctcttgctcttcctcctcccctcttccattattttcttcccattcttcctcctcctcttcattcacttccttttcctcttgttccaattcttcctttattctctcattttcttcttcccctcccaattttctcacttcctcttgctcaacagtgacacactgaaagtgtaaaatgtattaaattaatatcctatttattaatgtcccaatattttaaatgattgctttcaattaaagcatgtcggatggaaaagggcgggcgaaatgaaaattcatttcgcaaatttcgagaatttggggtttaagcaattgaatttccttgttttcgtttttaaaaaaaaattagaaaaatttgcaaatttataaaaaaatgaaaaatttactgaaatattttacagaagagaatattttcgaccttttctttcatttcccacctcattgatcttttgcgcaaaaagcaagtgatggttgttgtcctccattgtgtgctgcataattccattttgagtttgaagtgaattctgttcaattttaaaattaaaaacaaaaacagacgagacaattaaattaaatttgcttgccgatttttacaaaaattggaaaatatcggtcatagggcccaaactcaaaagtaatggctgcccataaagatgtttaaatgcaaattagggaccgattggcatgtttaatgtttaaaaaaagaggtactgaagtgtccactttcaaacaatttttattccatggaaaaatggaaaatgcgcaattttttcatttgagctgttttaaaccaattccgccattttttgagcatttttggttttgggcatatgaccgttaaattatttaaaataagtattgattgttttttaaacttctcaaattgatagcgtaaatccaattgcctttcctgcaaattagcattaagccatttttacaaaaaatgagtgatttttcggaatttggctttttacggtgcctatcgaattgtttatttgttatttgtcgtgctatcattttatcaattaattattatttattttttatagtccattttccatttcacacc

SEQ ID NO: 11595 - DNA, 3077 bp, Heterodera glycines
aaaacgacatttgcggcgccgatatattgtggcaccccaaattaatgcttaaaaattaaatctcgaattattttgtttcctttatggtcataagaaattcttttcaaaagtagtaacgaaccactgaatgaaatctttttaaaaatatttttcagcgggggctttaagaaatcttttcaacttttcgaattcataattttttaaggctggacagcgacgggatattgtaaggaagaagttagctggaccttaaagcaagtaaagcggcggttgatacgaggcggatttgcctcagaacgcaatggcctagttgccaaaggactggatttccacccctggcttaacattttgcctatttctttattaaacagaggaaatccataaaataaaataaaacttttttggttcggggtcattaattctgcgcagcaaatgtcattttactgggcgccgcaagtgtcggcgccgcaaatgtcgttttgactgcgcgccagggctgggacgcgaccgcgatccgcgatgcgcgatccgcggcgttttttttgcgcgatccgcgatccgcgaccgcggcaatttgaatccgcgatgcgcgatccgcgaccgcgggatttttctgtgcgcggcgcgccgcgcattttttagggcaaaatttttataaagaaaatttattgaagcgattttcttttttgaatatttagatttgaaggtataaaattttgaaaacgaccaaaattccaattttctcgcgcatttaaatggaatatgcaatcagaaaatatttatacattcatcgttcattttatagacaattttcctctttgtaatttagaccaaatgaccaacgaaaaagactctatttggttttattttgacaaaattcacaattcttcttatgccaaatgtaagattgagcttaataatcgcaaaaagccaacctttttttgttgaaaatctgttaacaaattgcaccaaaatttttaaaatttcccccgccggcgcctatcggcaccgccggaccccttctttcccaaaagttttttgaaaaagcgctccgaaaaaaagtgatgtgaaaatcaaatctgaatttctattaatattcgatgatttagtccaaaaatgattaattgtttgaaataattgaagaaaatttgtttgaaaattttcattaatttaatttattaaataaaaaaccaaataattttgtattattttcacttgatataaattaaaatttgaattttttttttaatttttaaaatttttttgaatttttaaaatttcccggttggtcccggttcccggtttttcttgcggtcccggtcccgaaaaaaaatcgaggtcccggtcccggcttctcaggtcccggcaagtcccggtcccggttttggcaaaaattcccggtcccgtggcactctacttttttgtatgcaggatttattttgaatgacctccgaaaaagtctctcgcatgaaaatctcgaacggcttatttttcttcatcataatattatcctttacaattttgattattgataatatgggaattttctaattatgcttttacaaatgtgcgatccgcggcattttttgcgcgatccgcggcgttttttgcgcgatccgcgaccgcggcaaattgaatccgcgatgcgcgatccgcgaccgcgggattttttttgcgcgatccgcgaccgcggcaaattgaatccgcgatgcgcgatccgcgaccgcgggatttttctgtgcgcgccccacccctgcttcacacctcatcaatgccggcaataaatgtgccatcattgtccaacctttgctgttgttgctcataaaaatgtatcatttgactttccatctgatcgaaaaattgccatgaaaattagcttttttaaattattataaaattttaatttttccccttttcctcaccaattcgtttaatcgtccaattctttccaatgcctcgtccattttcttttgcattctctcatttgcccttttcacttgagcaatctgtgaaaattaggcatacaaataaaaaaatagagtaaaaactttgtatttagtttttggtcaattttggcaaatttcattccaaaaaattgcttaattaaatttttaaaaaagctctgatttttgctgactgttattttatactgatcagtcctttatgaacctttcctctctttatttcaaatatgaatataattatttgtttttttttctcttttagtttccaaagattgtaaaaaacttcagcagaaatttaaagggtattaaaaatgaaaaattgacgaaattttaaattttattttaatgtgattagagaggtcacttaaatgttcccataaaaataaaataataaattaaatattgagtttaaaaaagtaaaaatgaaagattccacctcattttccttttcttggattttctgcgaaaacttttcttccatttgttcaactttttgctgcagtgcgttgtgcgcacttttcaacttttggtgctccaatgcggtgacaacagttgcaaacattttacaatataattaactaattgaatttcaaaaaataaaattaaatttttattaaaaaatgaaaatgacaaacttaaagagaaagtgcataaaaagcgtcagcagaaagtgccaacacaaacaaaaatgccaaatgaaaaatggacaaatgtgtaggctgggcactgccgcatttgtcgattattatcaatttttgtgtgcatcgcttgcaaggaatggaagagaaatgaaaacagagaaagagtgagtgaaaaaaaagaatgataaaataatgaataaaatatagaaaaatagaagaaataggcagagaaaatagagaaagtaagaaagctaaggaaattaaggaaaagaaaaaaaggaaaagatcagacacagagcgcaaagacagagaagatgtatgtggtgttcaatgtgagaagaggtgagcatatgccgagctgctctagatgggtgagaaaataaagagagaaaggagaacagagaaataaatgtgaaagtgacagcgcgtaaagagtttagagaaatataaaaaaattcaaaaaaagaaagaa

SEQ ID NO: 11596 - DNA, 3217 bp, Heterodera glycines
ggcggtggcggtggcggaggaggcggcgccgctccgtaacttggtgggggtccaccgtaacttgacggaggcggtggtggaggcggcggaggcggtggcgcacctttcccgtcacttagcacgacaggggtccccacaaaaaataatgaacaaatgaccaatggagccaatgaaatcagcttcattttgactaaattcaaatataattatattttatattataattaaattaattgaatttatttaaaatatattgctgaattagtggttgcttcgttaaaagttaattggccttaaatagtctttttgtccggtcataagattaaaactcaaaaagtcataaatgggccgaattggccttaaatgcgatgattaagcaattttttgtgcatttgtattaccaattaattgaacaaattgctttttaagaattattcattgttggacagaaaattaattgacaattccaaatgatggaaaatgattaattttcaaaaatgttaaatattgggccataatgaaacaatctttggctcagacaatcagcaacagctaataatgcgtaggagctttgcacgtttaaaatgttattaaaacaatatgtcaatatttaaattttgaaattcttttttatataataattaattttttcttattttgactgatttaattatttttatagaccgcccataattggatcgaagtctgcaaagtcggggggttttcactaaaaacaattgctctcggcataggtttatttttcattaatttattaatttttatcgctgattatgtataattagtcgtaaaataaatcaaattccactaaaacgcaaaaaattctacgttattcagcttcatctatggaataaaaatatggaaaaattttaaaatgcacaaaatattttagaaaaaccaaatttttaacaaatttactctaacaaattctgaatgtgtaacaattttctgcccaacaacaatttatacgaatttagatccataaattaatgaattgtttcttgcttccagtttttattcattcattttctgtcatcatctccatggtgtcaaatgcttgcttggcaattgcatccaacacttggccaacattttcgacttgttgcaacaaatctttggcattttgtcccggttcaactttcgcaattagtttcaacaaatttctcaccgtgtcaaccgatgcaattttgttgctgtcattttgctgctttagtgtcaatttatccaaatagcctttgcccccgaaaaattcggcaattttattgttcaattccctaatatattgcttaatttcattcaaggcaccggctgcttggcgatgtttaaatgtgccattttgctcatggtccaaaattttgctcaacttttgctgataattccaatacaaaatgcctgattgttgttgttgttgttgtccatttccattgttatttgcggttaaaaaaggcggcaaattaaaggactaaagaattatttttatactttttaattgattgtaattagaattaaattaccctttgttcatataatttgaagccgcacaggcatttgaaattatcagtttttatactaaagaataaaaaaagatttaattgtgtaaaatatttttgtttttaaaaatttacctattgataatgcaatcacggtgtgacaaatgctgaaaatttgcagtattaaatgtttttacacttttataaccctagtttttttgtttcaacaattatgcataaagattatatttatcaaaaatgttttcatgtagaaataatttaaaaattttgtaaataaaattgattaaattaattattttcgatatttaatatttgcgaattttgtgataaagaaaaaattctttaaaacagaatgaatacaaaatgtaccagtagattgttaattaggccggaatttttcagaatttctttaaaagaattctaaaataattaattaattaccttttcactgctattatcattattattgctgttggaatgcatttgtactatttgtgcattttcttggaaatcctgtaaacaaatttggcaggtgttaaattcatttttttcatttttgaattcaataaatttgaatatctttaaattcattttgtttattgctccattaactttcgacaaattaacatttaaattgaaagtgccatagaacggagcctaaaaagtcaaagattcatcaattggatctcactaattatgctaattaaatttcttgcagaaaaataaaatatgtacaacttcgttaaaaggtatattttttttaactatatttttaattattttaacaattgtttttaatttttttttaataaatagaaattataattacatttgaatttccgcgtttaatttcaatttgttcagttcccaaatgaacaacttcttttgctcgtctattcggggacagatttgttttgcccaaatcgacaaaaaaagcaccaaacaaaagaacattttcaggaaccatttcgccaaaaatgacatttttttcaactttaccactagttgtcaaattgccaagatttaattccaaaactttttttaaatttggattataaacaaagagctcaaattgtcgcacaatcactggaacaaataataattaattaatttgtttaaatatatataaaaatcgaaagcaattaccctcactttcatttgttgtttttgtgtgaatttcggcttcaaactgaattttttctggccaataattgcccagaatttgaatttcttcttcaatttcaatttggcattttgtacaatttgaattgacaattttttcggctccttttatttcacgaacaattactgtatgcaaataaattttgaagtgggaaccaaacggacataaaggtctgcttctttcgaaaaattgattctcaaattcaatttaaagcaatcaattgtgttgccgatcaccacagtggcagcaaaaaaaaatgaaaatagaaaatgaaaatgaaaattcatttcggaaaaattttattctaaaatattaaatgaaagattttacatttttaatttttgttacaaaaattcttatgtataatatttcatctaaatgcaaaaaatgagaaaaaaatgaatttttataaaaaataaagcttaaataatttatgtaaacataaatgattctgatgtaataattatattttcaattagtgattttcacgtgaaaaatagtgaat

SEQ ID NO: 11597 - DNA, 1306 bp, Heterodera glycines
  unsure (1)..(1306): unsure at all n locations
taatgacctcaaaatgagaacaattaaaagcattgcaaaatttcaaataaaaaaaacccccaggcaaatacgaagcaaattcattcacaatgctttagccaattatattaatttaaaagtgaaaattaatataaataataaagaatttacaaattaagaaaaattgttcggaaataagaaatgaaaaatgaaacaatcccgtaaaataaaacagaaggatcatctccaattcattgtgttttacacaaaatggcacttttaaaacagagggcacctgagaaagtgaaaattaacgaatttaccataaaaaaattggcgaaccgaccgatgggactgaaagtgcgtctcggagcagtagtgcttgccgcaaaagccacagatgaccaaattcgccttgagatgggcacgtaattccctttcggtgccaaactgtgccggacaagtgggacaacagcagcaaagtgcggcggtgccatttcctaaagcgaaataaaaacaattaggctttaattaccattaatgatggtatgccgtcgtcattcgtaccaattgcggcactctcttctccgtgctcttcccctgtgctcgtcattagcagtgtttcgcccgctgtgtccgcccgttcaccgtaatgggcgatgaaacagtgccaagcccagtggcactgtttcaggaattgcgcggtgcaaagatggcattggaagggcaacggcacatcagcggggggcaattgttggggtggcgaattcgctgaaaacaaattttaaattaatgccaaaaatggggaaaaattgaagacatttgtgaagggacggagaaagaaaagagaacaaaaacaggaaatacaaaactcaccattgactatacgaatgttcagctttttgtgcccaattaataatgaaaactttcgtcgctttatggattttgactgacaatttttattatcaaattcgtccatttctttgctgaacagcgaagaacaatttaatttgttgtacttgtcatacaatagatcaatgttattattaaattatatttatctcatcacaaataaatttaaaaataatcaaaaaggcggatttcataaaatctgtcactattgactttggctctgaacattaaaatttgtttatttggagacaaatggttttttcaatgcttatatgtaactgtaacaacacatcggtatgcaaaatcgaaaaatgtaacccgatcgaataatggataattanctattttgtattgtattgtgtgtcgcttcttagtagatcgtcttttgggcaatttgaaattggaaaaaacaaaa

SEQ ID NO: 11598 - DNA, 1518 bp, Heterodera glycines
ccgatcgaataatggataattaactattttgtatcccccccagggtcgcttcttttcttctcgtcttttgggcaatcttaaattggaaaaaacaaaacaaatcgtcgtcctccttcacccgcttttcattcacagcatcagcgccttgaacaaattgtacagttcgctgaccaacgcctcgtgacggaatgagacgcgaatgtcgggcacattggtgctgaaaagccaaattttgcaatttttcaaagaattgctacgattggacagtacaaatgaaactgtacagtaacgcaccgtgccacgtcgttgccgagcactccctcctccttgtagttggggcccaaccaatacactttcacccggtcctgccaaatgagcaaaaaaattgtacaaatggaagaaaatgatccacccccaggaaaagtgccaaactgacctcaaatcctgactggataacgctgaaattgatagggaaatcagtgcaattcgaaaagcgattaagcctgaactcgcccacctgttcctggccatctcgcacatgtcacacgaactcaacttccacaactgatgggcgatgctgtactcctccatcagtgcctcctggaaattgaaaaataattaataaaatgctaatcggtatttgaatccaacataatcaaatccttcgtttaagtgtattacttttgtgatgtgaaattgaagcggatcgtcggtggacaaactgatgttcagccccttcatcagaaactcgggcatcggattgcgctggtagggcaggaacaaatggttgttggacaaaggcgacattgcctagggcggggagtttaattagaagagataatgacgttaatggtagagagagagcaaagaaaggagagaggaccgagaaagaaaggagtgaaatagtatttgagagaggcatagaaagacgatcaataagtaaatggccactgacaattccaatctgtgccaaataaaagaggtactgcagcacgggcactttgcgcaacaaaaggccatgcgcaatgctttccgaggtcaagtagctgcaaaatgaaagtgggattcactttttagggacaccaaaaattccagggactcttacgacacgctcaggtggctgacagcgcccgcctcgccacagtgcggtctcaacgcgaaggtgttcagtccgcgcatccgtcggaaggcgttcagtgccgtcaaattggcatacctttggagggtagagaaaaaatgattaatgatcggagacaaaatgaacaaaatatttggcttacatgtagtacaagtaataggagtaggacggattctgaaatatgatttattttgaacgcgaattgatcattttgatcctttttacctggtcgttgtcgtaatccgccggctccggtgaatccttcgtaaatgccacattttccggcttggactcgtcgtcgactgaatcgatcccggaaacatgctgaaatttaagtgtttatggcattttgacatttcaatcacttggaggaatcggtg

SEQ ID NO: 11599 - DNA, 1042 bp, Heterodera glycines
  unsure (1)..(1042): unsure at all n locations
ctttccgatcaatgggatgacacnattgtgccactggatcatttcttttttgaaaattttgttcactcacatcgtgtccaatggcccaccgtgccaatttgtcccattcgtccttcgccctcccgtaaatggacagtcttggctccttcaatttaaaaacattatactcttttggtttaattgggcaattaaatttccctcctttctcagtcttttccatcgtttgccgacgattcaatttttatgttttaataatcccaaatcccccccccccaattctccccaccatttgttggtatttgctctcctccaaatcggtgagcacttccttcataacttccgcaaaatattttcccttcacataattgtccgttttgatgaaaatttcacggagttcgttttggccaactgaaatttttgatttttttttctcaaaaaacagtacaaaaaatgttacggggattatatttagtgttgaatttgtcgaagcggtggaatctgaaaattgaaattttaaaatagacaacaaattttccgttttacgtgtgtctgtccgcgtgcacatcgagcatatccacggacagatcgtacgctcggatgccaagtttttcgaacagctgggccatggtcaccttttggccattctaaattagggagcaaatcacaaattatacggatttaaaattaaataaaatttaaaataatttataagttgccacgcatttatttgtgtaccttctcctgcacaacttcatcagcatcggtgcgcattttctttttgatgaaccgcaacaaatgccttaagggataagggatcaaagaacggaaaatccggcaaatcaaagccaaaaagtcacttgtggttcattgaactggcggctaaaaagagaatttcaaaattttatccatttttaaaatctattttaatgattaaaaattattttgaataattattcaatttaattgttgaaatgaccatcactcaccgtggatgtgcgtgtccaccttgcgaatgttgtaaaagtcgcggtgcggaacactg

SEQ ID NO: 11600 - DNA, 1985 bp, Heterodera glycines
  unsure (1)..(1985): unsure at all n locations
cgagctgcgttggagttcgtcgatggacttccttggtctttctctgtttggcgttgctaaaattgacaaaaaatgaatgatcaatttttgagaaaattaattgggaaaagagaaggcatcgaaatttcactcacttttgctggtggttggtgtcgccgttggtggtgccgcacattgctccagctgacgacgcagatcactgatcagcgcttctcggtttcggacctgctcgcgcagaaattgaatggtgtcatcccggtccttcagttgcttttccagttgttcgatgcgctctgatcgctcgtcaatggccagcggtggcggggtcgtctctccggtgtccattggcgcagttggtgttgacggaaacggcaccaaatcgccaattggtgtggcaggtgtcgacggcggcgggtcgtcgaattccaaaatttcctcgtccatttctggcgttggccctggtcctggagttggtggcggcggttccatcgcttcttcggcggatgcagcagatgttgacggtcctgcttcgtcttgctgtggcgtttcggcattgggattcggctgtagagcggctaaaattaaaaaaaaaaaattatttttgagttaaaaattggtggaaaactcacttttctttgcggatttggcttttctcgccctctccaacttctcttgtcgctcctctcgcttattctcccatttagtccaacgcttttgggccccttttttgctttgtagtttccttattacacttttcttagccataaaatctaaataaaagaatagttttttaattataaaatttataacttttgagtttgaccatagacaaaaatgaattcactatagacagatgcagtatttttttctctatctataagcaaaatatgaagaaattctgtaaggcggaaaaaaagttctatagagcgaagtgaatgttgttattcctaataatagaaatattagatagtacgccaaaaggagacaaaaaattagagaaaaaaagataatgtttttctctggcactctctatttattggtacacatctcgttttttgaaacggtgtgtacaagagcctgaaggttcgcatcttggcactcaaatccggcatttgttagcatgttttcatactcgattcgagaatcttatcaaaaaatttgttgtatttttgactacaccccagctggaaattattttttcagctgtttttggatttttgcttgtgaacaaaaaacttgttatgaaaaatgtaaataaaaatataaaaatgcagcctttagaatcgacttcaaaagtttttccgacttttcaaaaagcaaaaaatcctggccatgatttggcggacaatcaacatcttttaacgcctgctgtgttgcaaccgaaatggataatgaatggaaatttcaaatttcatacatttatttacatatttttccaatttttagaaactatttttgcagttttttagcaactatttaggtacctatttcttcagaatttttagcacctaaaaatctcatttctatcaaaatttgaacaacataattaattattgttcaattttttcagttaaataaattgaaaatcataaataattatattaaattgtttttaacaaaatgaattcaattttcattaaatgaggtcacaattaacgccagacgattctttttatgcaaaaatatttaaattttatgagaataaaacttgaattaacactaggaatcggtgtgcagagtcagtcggttttttggtaaaaaaaagaagaaaaacgattttttcaaaattttttanaaattgaatgcttatacggaagggttatcgcgcttaaatatccattaatattttcaataatcttataattttgtccatcaataattcactgtaaaacgccgaaattgngcagaaattcataaaaagggaggcacaaagaaaattgaaatcattntttactattaaaaatgaatcaatttttcactactat

SEQ ID NO: 11601 - DNA, 1845 bp, Heterodera glycines
aataaatatttgtgtgtttgtccatctcctttggacagaggaaaattgcccttccctttgggcaatcaccaaatatcggagtcgggactcatcccggcaggcaattgggaggttcactcactccttaactgagtggtggtgccgttacatcacccccattttgtcagccctccccattctcctttctcggccccccttaggcattcaattcggaaaggggtcgacaaagccgagaaggagggcaaaggaaaccggcgatcacccctccattgatcgccagctttttcgacaataaatgcatcaatttttaactttatataaaaatgggcctcagtgaaatgaaaaggataattattaattttacgatttgttaatagattttgtccaaaaaatgacaaattttgcgattttgtgcaatttttttaagaaaataagaatttttagtgttcggaggtacagataggcgccgccgggtgaaaatttgagaattttggccatctttttaggagttttttcatcaaaaaattcccaaatttgtggatttggatttttaaaaaatttagcaaattttttggaaattttgagtgaggtaggtcttggaggggtgtactaacaagaagaatctaaaattcttatcaaaaatactattttttccttaaaaattttaagaaaaatgcgaaacacctaaaaaaatcctgaaatatgtacaaaaatcccaaaatatgttccaaaaatgaaatatatatttttaaaattgtgtataataatgttggcacggcgaaaaaattatacccagaaaatctgggaaatcggggaataaaaagtttcacccttttcacgttactgtgcattttgcgggattcccgcgcgcaactcccgttgtccaaaatttcggtctatgctcccgcacccgtacgtaatctacggccggtctccagcagtcgataccgtagaattcattaaaaaaatttgcgacattcccattttttcgagttgtgaatttcaatatgtaagcaaaagttaccccaccccacattggcggcccgggcatttgcgcctatgtccaaaataggggtaaaacttaagtttttttcaatccctaattgcttaaacagcattttataagtgatagaaagggatttatttgtctgataatttgatagttagtaaatttttgaaaaattatcaattagtcaaacagcacaatctatgcttctaataaactagaagactgtgttttcttaattttaatgttctcaggattgaaaaatctattagtttgaatccgattgggtataggcgcaaatgtctgggcacgtaagcaaatttagaaaattcacgaacatcatcattaattagcgtttaaattttgtcagtaaataaattaatatcattattattaaattatttcaattaaacaaacataaaatgaatccaattaaatgattgatcacaaccaacggggtcggggtcactttggcgcgggccattttggcgccgcgaactttaaactgttataacttttttcttatccaaccaaataaaataattttgataccattaaataggcctaagtgttctttattagcctgcaaaatattagaaaaaataaattctgtttgacaaaagatatagcgtgcggcgccaaaatggccagaaaaagtcagttttttgaggttttttggccataacttttttgtgtttcaattaaattttttgaaattttgcaggctattagggactatcaagcgctttaaaatgatatcaagcttatttaatttgaatgagaaaatgttatagcgtttggagccaaaatggctggcgccaaagtggccggttccccaa

SEQ ID NO: 11602 - DNA, 655 bp, Heterodera glycines
atttttcagcactggtaagaatgggggcggggaagggggttaagagaaaatattttttgaaaattggaagaaaatgaaaatttttgagaagaattcttcttcggtccacaaagagaagaaaattattttcatttattttaaaaatatttaattcaattttttcaaatatagacggaaattcaaaaaaaattttttaaattttcttttacgtgtaaaacctgttataaatttgtaacaaaatttccgaaatttcccggccgcacctgtaggcaccgccagacccaaaaattcccaattttaaaattggctcaaaattgcaaatttgctaaaattttactgacaaaatctgttaacaaaatgcattaatttttgtgccttttttgtcctttttgttcattttttatgtcttttcttacctttttcgtcctattttaggtgcttaccgtaaatccgctatttgaatgcccctctctggtagaatgcgccctccaattaaatgcccttttttggaggggttgaacaatacaatgcccctctctggtagaatgcccctctccaataaaatgcccccctccaggagggatcaagtatatccgcagggattctggggctttgtcgatgccgaaagcgaaatctgattacagattcgttatca

SEQ ID NO: 11603 - DNA, 1210 bp, Heterodera glycines
cgccgttgtttttggcgaagtgtgcgctcgactgatgctcgccttctttttcccccaattagaccttgtgaatgccattttaaacaatgccactggcgaaccatgctgcggatgagcgaacggactgcctttttgaactccttcatttaagtggaatccatttcctatctctttttgccagttaaacctttcataatgagggaaagggctgtgaataagcggcgaaatcactgcgcggcagttttttggagcgcccgtttccgtttgatacaaaaatagccgctttctttagaaaccggaaagctaattagcggtttagtttatgatatttacggccccccgaaatcggtttccaattattttcataagcagctttaagtatacattccaaaactgtaatactgcagaattgtggtcccgcttgaaaatttagttaaaaattttactagttaaacgaaaatcattaacaaaattttttgttgggtccaaaattcggcatttgaacaatcactattttgaaattatctgttacgagtacaatactaattagcctttccctctttttggaggtttaggtaattaacacaaacctatgagtgaggaattaacttttggaaccgatgaattctcattttattttcactttgcctttaagttcttttttacaaatattacaattaaattaaatgaattgtggttaaaatttaagcataaatgtatcataccattcctctaacaaattaatgtccattattccttccttttccaaatgattcgtttaaatgtggtgtcggtcccgactccctttttccaattccgtctgcagggcacggccgaggtccgggctgacctttgtgaattcgttcactgcacgcccttggacttcatcggaagtcgacttcaacgaggcactcaaattggctataagccttttgcgatggtcttcgtcgagaacctaaagcagcaaataaatgcacaggtcttggcatttatggccaaccttctcccaaaacagcgcaggctgtgaataattgtcgtcgtcttccgtgttgtatcggtcgacatcgccggaaacggaaaacacactctcccgtgccgtcgccgattctttcggacctccgtaagaattaggatggtacaccggagcgccatctgataaaacccgaaaatatcatgacaaaaaatttaaaatgaaaaattggtagttatt

SEQ ID NO: 11604 - DNA, 1844 bp, Heterodera glycines
atttaaaatgaaaaattggtagttatttcgattgaactatagtcaagtttaagttttttaaaagaaacaatgttaaaatgctgaacaaaaaaggtaagcactaaatttttataaattccgggatcggtatattttagtgttctcccgtataccccaccacctctgttgtcatcaaagcatgcccacccatcaatttgcgtgttgcggactcgagttctatacggacagttgatcggcaacttcatgaagttcgggccgagtcggtggaattgtgtgtcaggataagagaataggcgccctgaatgaagatacagacatgcttttcgaacacgtgctcaccttgtaacattttatcgggcgaaaattcgattcctggcacaattcgggcgggggcaaacgccgattgttctacctcagcgaagtaattctgcggattccgattgagcacaattcgaccaactaaatcaaagcacattaagtttggtttgggacatattttaacgaaccgggaagcaatgggaagtcacggtgaggccaaactttggtcaaatcgaacggattccaacgaaaacgcgacgcttcttcaaaggtcataacctcaaaagagagatggagtaacaaaaaaggaatgtatggtaagacttggatgaagaagtcccattggggaaagtctccgctggcgatggcattgtaaaggtcgcgaattgcgtaatccttgagcaaacccatcccaattacactgaataaccattcgtaattcttacggggtcttcggctgccaattgaagggccttctcagcagttaaattcttaatgccttggcgagtcttaacaggacgaagtgcgttcgagtggatgattaaaggattttacttttatgtgaaatttgcaataaacggcgctgccggcattgtcgacgagtttgaacgtatgactaccgtagcctaaacaaaggtgacgcaacttacataacaggccattcccattgtgtgtggctaaacaaattcacacattcgacagaccgttcatgtggcggaatccgtccggagtcccacggtcggagaacagaaacatcacttggtgcagtgcttcgggtcgaagtgtccaaaaatcccacatctgaagttcttcctgctttatgtgtatgttactgccaataacaattgaccatctccgggtccttaagatgcgtcactgggttccgtttttgcgtatggatgaaattcggaaagagaaacggatcgcgaatgaagaaaatcttcagaaaacattttgatttgacacagaattgaaaggccaaagaatcccacgggtgtgttgttgccaaccaaatcccaattgccctcttcggtgtagaatttgatggcgaaaccgcgcgggtcccgagcagtgtccgcgcttccggcttctccacctaaagcggggaaaaaaaactaaattttcgcagagtcgaggcattttgtaaaaagtatacagtacaaactcgcggatgccgataattatgcaagaaattgaggaaaaatattattttttaaaagaaaaagaaaaatttgccgaagataaaaagatagaaccaaaagggagaaacaatatctgaaactaatattttctggtaatcatgaagaatgtgggtatcattttctaatttaacaaaaaaaaagcaccgaccaacactcgaaaagcgaatgaaaagtggagtccgctttccgacttcgctaaacatggcagtcttgctgtacttggcgatgtccttgttggtcacttcaaaatagccatgcgctcctccgcctttggcatggacgacgcgctccggaatgcgctcacgggcaaagtgtgccatttcg

SEQ ID NO: 11605 - DNA, 1441 bp, Heterodera glycines
acatcttgcattagcaacggaccacgcggaccaacagtcaaaaccgcatttttgttgtggatgggagcaccgttggacatcgtaagcacatccaattcctaatgaaagaaaccgctaaaattctaatcgactaagaaacaccttctttgaacttttgtactcattcatttgctgagaagcacgatccaccgtaggagccattttagaaattcgatgaatattaaagaataaaataattatttaaaaaaggtaatattacagtatgttccaaaaataataattttttctggtttaacaacttactgtaaaaaactgagctgaaattttattgcagccttttaaaaaaaaattgcacgatgctgatttttttgctgctgcttctgatcattacaaatggaataaaatttaactgattgactaaattacccagtccataaaaggcaaattcccattgcgtctattaatgatggagtcacatgttttaaaagaaatttacaaacaaataaaaaaccacacgcgcaatgtcacatttggtgggtgtgttgggtaaacatttatgtaccaccttttattgtatacaattttatggatactggttgttttgttgtgctggtggtgtacagtgtacatcttgttgactaatactttgtgaagaaaaaaaaataaatattaatgagaaaaatataattgatagagctaccaattagaataagcataactttaggcttaagcctaggcttaggcttgcttgggcaggcaaatttgaatttcaacgaaataatatttaaccacaaaaattgtccctaaactgagatttaaaaattccaaggtaaaatagaagattacatattttttaatgtttttcaaattatgaaaaaaaagccaggacccgtcggacgcccggtccaaaattttggtgcgtgcccgggctgtccggttaaacggggtttttgaactgggggggggggattatatgtaaatcaaaacaaaggaattatttcttctgaataaggaaatttatccatttaaatgaccaaattcttcgtgaacgtaataaaattgatggggcaagcgcgtttaattgctgtaaatcgatacataatattgtaaaaaagcaataaatattgagcaaagagcaaaggcaattttctgaaaaatgataatcgaagaaagattatgtatactctgtattagagaccggaaatttcaaatttgtggatcccgctgcgggactggaactcaaaattttttgcgggacgggatcccgcgggattaatcccgcatttaaaatttgcgggatcccgtgcgggattgcgggattttggaaaattcgaaaaaatttcaattaaattcaaaaaatttccaaaaatcaaaaaatgctgaaaaataaatttttaagggctggcgggatgctttaaaaggggctgatgggtcgactaag

SEQ ID NO: 11606 - DNA, 2222 bp, Heterodera glycines
aaaatatgcaccaaaaatggcaaaatatgcacataaaaagtgaaaaatatgcacataaaattttcaaattgatggtgtaattctcaaaatttctttaaattcgctaaatgcaaagtaaaacttacaaaaatggctaaaatatggtattaaaaatcattttagaagaaaaaacacgatgcagcataaaattttactcattttagcgaaaaatcaacctgaaaagcaaaatttcgcttttttgcttattttggacataaaacgatcaattaaaacctcaaaaattgactttttcttggctttttcggcgccacgtggcataacttttttatttttgaatcattcatttctatttttacatgtaaatatagagcacacatagagctttcaaatgatgccagattggctaaagctaactgacaaataaaaaagttatagcatttcaaaatttgcggcgccgaaatggtccgcgccgaagtgaccccgaccctttattttatcgttattttcattaattatatatatacagagcattttttatttttttaaaaacttttttcataatcttgtaattattagggatgcgatttttaggcaaatgcctaaaatttttgcgcacttaatacgcacagataagcacgaaaaaagccctttccgcatggtttggggtgtctacgatgacttttataatgcctaactttgcctatttcggggtttttgtgcctaaagtgcctattttagggtttttgaaaaaatccttaacaaaaatgcaataaaaacaaaaaatacacccctaagaaatgtaaaatttttcaaaaaaattatccctaaatataatatttttttcttaataattggtttaaaaatttgttcatattcgaaaaaaaaactttaaaacatttaataatttcatttacaattgaaatatttaaagttttaacgtgtttcgctacctaaaaagcgttaataaaaaattttatttgcctatttttgtgcctattcgggcttttttgtgcttatttaatgcctatttcgcgattttttgtgcctaaaaatcgcatccctagtaattatagtcgcatgcaaaatgttgttttttctttatgaaaatttttagattaatatttctattttaaattaatattaatgatacggccgttgccgtcgctgctgttccccccccccccccccccgtcgattccccaaattcggcactttatttttattattttgtttcttttgatcaccaatattgtttcaagcgaaattatatgcacatgcgaaaaaaaccagcgatgagcaaaaaaaaaaaggtcgtcaaaaattttggaccccgtcgtaaggaaaatcgcatatgaccaccccccctggcccgatcgtacgtcgtatgacccttggaagtgaccaccccttgtacacgtatgattcaaaacctctttttttgcagcgcttttttaaacattttttgggggacaggggggttcggggaatttttttttattttagtgctatttgttggcagatttttaaaaatgaccaaattttgagattttgggctaatttttttgccaaaaaagaccaaaaatgctcaaaacccctaaaaatgtcggatatttattctcgaaaaccccaaaatatgcatttataatactcacctgaccaacgttcgatacgtgtccaacacttcacgcatagaaagggcgtcgatggcccgcaaacattgcgctaatttctcccgattgaatttgacttttgttttgaccaattcgtcctcgaaatttttgtccgtttcctccagcaacgcattgagcaattcggcagcagtgacgcgtccctcccaattcgaactttgcgagtattggacgaccaatgcgaaaagttggacaattgtctaaaagttggaattatttaatcgttaataattcaatgaataaaaattcaattgaatgcctcgcgatccgaagttggcgacccgacaatttgtgataaagcagcgacagcctctgctcgaatggaacagttgcgcgactcgagcagagtgcccaatttggagagacgaaagcgagaaaaatctgctgctggcattacatacccgaaaaacaaaaaaaaaaagaataaaataaaggaaaagagtaataaattgacagtggtgagtagagaccggaaatgccaattttgcggatcacccctgtaggagtagaactcagaatttttgcgggacggga

SEQ ID NO: 11607 - DNA, 1986 bp, Heterodera glycines
aaaattttcattatccttcaaacaaaaaaaaactaaatttttaaaagaaaatcgcataaaaccaagtggttgacaaaaattcaactatttcaaaccacccaaaaaactccgcccaattagtggacagaaaagttttggaaatcaaaaattggtcgaaaacggatttgaagcattcctgtatcgaagtctgtgtcccatccgctgaggcattaaatttaaaaaaaattgcgaaaaaaacgcacttccaagcacttgaccagccgtcgttgcatgtatccggtctccgccgttttcaccgccgtgtccacgaggccctcccttccgcccattgtgtggaagaagaactcggtgggcgtcaggccggagcgattctgtggcgaagtaacaaaattccattaattaaatgtgcgataatgggagtaaaattttggtgatggcatcgcacaccgtcgtaataaatcatgggtttgcatttagcatcataaatcattttttacctttttaaaaaggttatttttacggaatttttttagagttatatgattggtgtgagcagctcgtttccccccataccagtccccccccccgagaaatgtttttaaaaaagattttttagcttataaaattttaaaaaaatcttaaaacgttgttttacgagaaactccgcgaaaaaataattgcgaaaatctttacagcaattttttggaaatttttttgttgaaaaatcttaacaactcaccaaaattttcaacaaaaaaaattcgttgaattttcagtttgattaatggcgattattttaaaaaattaattaagattccgaacttgggaaggactcaaaaaactttttttttaaattagtatgaggtgataatgatttaatttgcactcccacaatttgtgtcaatccaattgaacaaccgaaaaccgacctcaaatccgtcggacggccgcttgccggagatggactgttggccaaccagggcgatcatttgcgcaatgttaatgaaagaccctttggaaacgcactgggccatcgtcagcggcgcattctttcgactaaaaaaattgcataaaatttggccaattttagacggactttttcagaaaattaaatgcgattttaatttaaaaattttttaaattatattttgaatgaatattgacaaaaatgtcatttttccaattttaatttaccatttttagtcactttcaaaaaaaatggaaaaagtgtccggtgcggtggtaccgatagggcagcccagccgataaaatttttaaaattttaatgaaacatgtatgttaggaaaattgattaaattttcaaaaaaaaccatttcttttcgggaggagagggggggggggggggaattccacccctggctacgggcagatggataacttcgggtttgtcagtcaattattgtactttacaaactcactcctgttcggtcagatttcccccaagggtgccgaggctgcgtcgaatcggtccaccactgggctgaaaatgatttatttgagatgtggaaaaattttaaaaaataaaagaggagggggcatttgggtgttcacaatatttttgtcataaagggtcattttttgtttgaatttttaaaaagaaaaaattgtatcagaaaaggagctgattgttttgtccctcgcatgtttacttttatcattaaatacaataaaaatagatatgtttagaacgtagcagtgaattttacatttgtttaaacaaagtttcgggggtgagggaaacgatgtggaggagaaacggtggatgggatgggaatgaagcactcgtttaagaaaatttcatttttctaatctaaattactcataaaaaatggaaaatcgactcacaaatggcaccatcagatggtcgtcgctgagcatacggtactccatgcgcatcaccccgccaaggctgaagaagttgtgtgcacacggcggtgccaaggcttccgtcgctgcaaacggtga

SEQ ID NO: 11608 - DNA, 3840 bp, Heterodera glycines
  unsure (1)..(3840): unsure at all n locations
ttggctaccggaggaccgaactcttagggatgctggctgttggtgggccgagctcatagaggctttgactgtcgaagggccgaactcttggggattttcacagattctaaggcgtaattttatctggccaatcaaaaatttcaatgttaaaatttagacccactcacagtggcgcagagtgatgcgcattaacaaaaagaaaggagtgaaggatggacgagccaacgcacatccgacaacaattttcaatgttttataattttttcgacaaattttcaatgttttatatatttttttttgtttaccaacaataacaacatttcttatctcccattcaaatctttagggatagtggatcaaaataacaaaagaaaagaaggaaagggggtttgggaggggggtccaaaacagatccacgctcattcattcattattcacatttattaaaaaaatggaaccaacaaatacaacttggaccattgagcaaaattgttcttgcaacaatgatttgcttcagtgcgtccggcccctgtactacaaatcacccgtattgtgtgtgcccattgaatttggcaccaattttgtgcaccatttgacccaattttcaaaaacccgtccctcaatgtcccacttgttgttatggtcttactgattctgctccaggtataaaccccctacaaattatttatgtttgtatgtgcaattaatattttacagttgtgtcaaatcatcctcactttgttctatggttatcgccgtcgaccacgtgtccgttttcctaccaatgtaagacccttcacaaattttggcaaaatttttttcaatttttaaaggacactccgctctcgccattgcgccgctttcctccaccaccgccgccctcaattgcaattcgggcaacaacacagaaagtgtgtttaattttgtttctgtttgaacaatttgtattagcatttaacattttcaacaggatcagcaccacacggatgagcgcaaaaatgaacagttcaaaaagagggaggaaccgaagggggcggaggacggacggcacaatttgcacaactcatcggtggttaaaaagaaaaccattgttatatttctaataaaattaaagaagcccaggacgtttccgttcaacaacaaagcagtgatggatgggttgccaaacaacaagcgcaacaagcacaagccgttatacggtatttgtttttgttaaaaattaaaaaacatcacaatattattattattattcagctttggcaagcatcccggaggaggaggagacaaaaaagaatggacgtgaaaagccggcgctcgtgaaggatgacaaatatggggacaattattttgaggactgctattaccagtccacttgggtctaggcaataattttttcatatgcatattttttttgctaaattcaataaacatattgtttaattgtgccttcccagatttatttaaaaaataatcccatcaccatcaaaataattcccatcatcaataccgattcacaagcagtccttctcaatttgacgaacagttctttcgagctgctccttgactattccataaaggtgcgccgcttgcgggtcgggtagtccgttagagcgctcttcgatttttgtgattgtgaaaatcagattcgtcatctgtttgtcgatatcttctttcagaaatgcacatcctaaaattattaaaaattacagtaagaactgaaaatgcatatcaaaaattgttctaccgaaggactttggtccatttattggtccaccaggcagggggtcttgccgattccgacatttccatactctgaaatgccacgcacatttcattgaaatggttttgttggtgccgctgctggcgatgtttttgacgcttcacaatatgaagccatttatattcggaattttttttctgggggcgagatttaaaacgacggcatggggacatttttgtggatttgggaatataattgaaatgagcagtttatgcggaatggcgtgaccaatggaagaggaggcgcgcgatcatgaaccctcccactccccacatctgcttctgcacttcaaatttaaaaatgtttattggtagtcaaaattatccaaataatgcgaaaaatttgatgaattatttggtggtttttggctttttcttttgatcagcaatcatgtcactgacacagcaattgattcgggcacatttttcacacatatcgagtccaatcgccactcgcccatcttccagccgacgtgccttgtctttgttgagaagagcgccaaccgcttncttaactatgttgtttaaatatctattttgctttgggtttagcttcggcaattaagcctactaacagtacccgcgtcgggaacgcaccaaagcattgggtaccaagagctgttgagggtttaaatgatagtcagagggatcatttacaccccgccctaccatacgctgtaccaccctctttaatacagctattaacttaccgtagacagctcttttattccaaaagtaattttaacgaccttttctttttttgtcgaagcttaatagttatttcattaggtttttgaaagttacatatatgttcatataaaaattcttgttataaaatttctttccaaactatatttttaataagagcatttgggttgtcagaaggtaattttactttaatttgttttggtatgttgccacttgtccttttataaaagtcgcagcgaaagctaatctaactggaaactgatgcctttttaatggaacaggaaattcgctttctgttattaaagaaattctatgtatataaatttctgaaccatttttatcacctccaagaattatgcaccgtaatagattttcttttaattctataacttgcaacattgttccattacagagttcttgttcaatattaatattacgtaacaaaataatcttacaattttgttttaatttcaattcatgttaaaatgggtgcgcgcgtgaatccgttgggccctgggccaatgccaggggcattggcccaaagcgcggattccccaattgaaagctccgattaattcaacaatcggtttatttagcgatgagtatatgtgtaaaagcaaaaaggaaaagttggcaacaagccgatcaaagtccccgatcacactgatcaatccgaactctcccccaaatttttatattggcaacaggtgggcgggtcgaacgccccgtggaagaaaaggccaaaaggaagggaaattgggatgactagcgacagggaaaaagaaattgtgtgagacaacaggggaaagggagtcaagataggtggtcagacataacattcccccgcacctgggaaagccgtgccctcacggcttaagctggccccgggcagaaggaaggggtgcgaaggagaacatagattagagagaagatgagatagagagagaaagaaaaagattatttgaatatgagaggaagagagacgatgagagtgagcagtgaaaagagtgttgtcgctgcttttgtgtaccgttttgctgctgctgttgccgttctttgttggatgggaagacggggggggggagggtttttgttgatggcggacgatggaagagcagaagggtcatttgcattcgtcattttttcctttaatttttcgttgttgtccaatcgatgtcgtttttatcccttaatttttagagatttattttgttgtttttttttgtcgtcgccgattgttcatcttcaacgttgtgccgtttcgtcgtcgccgagctgttcgtcctccaattcgtcccattgcgtcgtccgtgccgaaatccaaatggtgaacaaatcgtcgaaatgtggtcg

SEQ ID NO: 11609 - DNA, 5258 bp, Heterodera glycines
caaaatttaaaattaaatgttgcgcctatttctttttcgaccgatttgcccattctcatcactattggttaaacacttcccgttgctctttgatctttgccacatttgctttgtctttttcagtaagtattcccacctggtcggtctcattgcttctaaatacaaaatgccaattttcctctgcctgatttgacattcgttcaaataattccattgccaaagcgatgtaaaaggcccggaaaaacattttgtatgcttccaatctttttgttaatggatgtttctgaatttttatctgcatttccattattttttgatcacattcgtctttgtcctgatcctcttctatgcattctttcagtgtttttcggacttgtccgatcttctcatttccttaaatatatttatatcttcaaatgcaaaattaatattaatttaaaaattgttatttactctaagaaattttatttattttacctaaatcctttacaggaccatcctctttccgatctatcttcgtcttttggtttttaggagtgcccaatgactcactaagcttgtttattgtcagtaccactgcttcttgtccctttttatacgtgtcacttatcccataatcttccaacatttgtcccacaaattcgcgtccaattcggtattggtcccgtatcggatgcgtaagtgtacccaacgaatttgtcaagcgccatttctcatatccttgcccaatttttttgcctatttcaagcagcagccatttgttgtccattttgtccagacgtagcttgccgtacttttcgttcaatgacaccaaattttccttttcttcgcgcaatgttattttctcataattcaggcgatgtgccaaattctgatttagtgacagcaataactcactgaaaaaccagagaaataaacatttttgtcatcattttcaatgaaattggtacgtaaagcgaacatcagtaagatacgaataacccgtagaaataaacattaatagacttggctttaaaaatagcaggaagaaagccattttatctagagcccggagcagcaatcccctttttggaaatccggattttccgaggttttgaggattaatccttcggaatcctgtcccgaaaaatttggaattccaatcccgcagcaagatccgcaaatttaaattaattttgagtttcaatctcgcagcgatatccgtaaatttgaaattttcattctctaatttgatcctccattttaaaataccgcataattaagcatttgtccttggtgttttgtccattattcaattgtattccattcatagacgatggaaatttcattgccgtgtccaattgcatcgtatgttgattaacaaataatttatagtcgaattgatctctacgaacagcctcaaaaaattggctagcacattgaaacagatggtcatcaaagcttttgtccattaattcacctgaaaagcaaatttaaaggaatttatgcggatctaaacatagggctgttgttctaaactgattcgagtcgaaaaagataaaaaaaagtcctatgggtgcctatcaccacgccagactctaatatgtaaatttgtcacctaacatgaattttaatgtatttgattttgaatattatctttcaccctctctattcattaaagtgtctgcttcaacgtggtcctccacaacattggcacaatcattaaacgggtcttcccatgtttcttcttcattttcatcttcgtcctccccctttttagcagttgatgccgacggttcattctccccatttagccatttgtccatattttccagtccctcggagttataaactgattccattcgctttcgcgttttttgcctcaaattcttataaatgtctttcaattctttgttgtaagaattttcaccatttatatcttcaatttttttgatcagattctctgaaaatgcatacatgtaatggtaaatgcaagtggcaaaatcggagtttaattcatccagcctttttgtgtaattttctgtcatgagatcctttctttcttcctcttcctccgtcagattttgctcatttttactatcaatgtcttttttctttttatctttctgatttttgttttcctgttgcaatttttttgcttttgtttccttaactttttgtttatttttgttactaacgaatttgtaatgcgattttatcagttgctggcactttgtgcccgccgtgttcaccaacacttggacccgtacgcgcatggatggctctgccaatttccaatttttggcattattttttgctttttgttcgttttctccttccaaatcctggaagctcttcctttgttcggttctcaacaaattgaaaaaatttgtagcaattaattctgatctttttgccaaatttttttcaaattctggctcaaaaacaattttgtagaaatgattgacaaatacttccgcattttcaacattaatcgcactacatttcaattctgaaatttgttaaaataaaaatatgaagaattaaaccaataggaaaaaagtaattaatttttgtaaaacgaaaaataattaatttgttttgaatgcttacgagtttcgccttcgatgataacacaaagtccaaattttttgttaactcgctcggttattttatataaatctgccaaattatctccgtattcctccaccatttgcttccatgcaaacatttttttgtcagtataagttttcaagaatgaatttttctcctcattttcgccaaaattcacgccaaatttgctttcaagacgccacatgagtttttgtatatggtgataaagcaaatactgcacacaattgaggtgtgtcgcattgctgttattgcttaaaaaagcaaatgaatgaaaaatatagctttaaactagagttgagcgggaccgggaattttgggcaaaaccgggaccgggcgggaccttttcaggttgaaaaaccgggacttatctcgaagtcaaaaaatttttccttaaatttaaattttacgactggaaatcggcaccgtcgcagcctccatgaaaataaatttggaaaaaggccgttagtcaaaaaaccatcaaaataaaaaattttttgctaaaactttgctcaaaaacaaccatattttaaagttttatgtcattcgatagccctacctgttttttattagcatgcaaaatttcaaaagtttcgttaagtttgaagaaagttatgatcaaaaatgttcaagaaaacttgctttcattgagtttctcaagtcatgacttttttaaacgacgaattttttgaaattttggagtataacataaaacacttaagctatctctaataatatcaagattttaaaatttgattcattttatgcgcatttgtgaagaattttctgtcaaaaatttttatttgatggttttttgagtaacgcccattttgatgggttttgagtaacgcgacccggcaccgtgcaccgatccctcgcgctgatctctaatattaattcagactttttatttatattaattaattaaatattatataagaatcatacctcttcacgcgatagcgagcatcgagttgcaagtgtgatcatttttctggcattgttcacaattgtgtccggatcaccaattatgtcttcgagtttcttcggttgatcagttgccgcctttttactctccgaaattttttgtttgattgattcaacaaaattttgcacaattttgtctttgccttttccttctatgggtatttgatggaaattttcggcagcaaattgggcacttttcacggaaaagttacggcaatttattgctaaatttttgaatatttaaataattttatttcaattattttttccaaattaacacttaccttcagaaaaattgttcatgaagacaaatagcagaagcgtcagaagaaacagttgcatgtaattagttagcattcttatctaaattttttaaattaaattatatttttataaagtaaagatataaatctttgataataaaattaaaaagaaattcttattctaaaaatgaaatgtataataatgtgaatggttaggtctatgaatattttatgacgactatgtgaataagaatgtgattctttctttttttatttccatcgattttatttgagaaattattttattttttttttaaatttaaaataagcaaaagcattgtaagttaaatttttattactgacacttttacaatttataataataatataatatatatttatccaaaaaattatctaaagtttgcataataggaatttaaaaatttgcattaagcttatgcttagggcactctttgaagcgataaaagtaaaaataattttaaaacatagcgaaattggttaacagatttttatttaattatatttaatttattaattaaagcaaatccctttgttaagatttcgcgattgataaccccaaatgatgagcaacaacaaagtgccttaggcaacaaaaaaaacacataaatataaaaaagctttttttaaggccaagtttttattttttatttttgccttttttgtgaagtgcccaaatttgcactttttgtgaagtggccaaccgcatttgagacatatatgcatagagagagagaaaagagaaaaaagagagagagagagaaagaaacacaaagagacaggtccaagttaggcacgaaaaacttcaaaaaattaaaatttattagcctgggtccgggtataggtttttcctggacatgaattttctagcaatttttccaaaaaatacaggtctatgctttttcaaaatcataattcttctttttttcctgcttttcttacaaaataattttcgaataagatacgtttaaaaataggctaattagttttggccatttttcttgcttccccaaatgcccggcatttccaaccccagcaaattttagagtgccgtggcattttcaaatcctaaattaaagcaaaaaatttctctttaataaattttttttacaaatttctcattccatgcttactagattaaaacttaaatcggctttaagcttgtaattttttcatttatattatttccaacttaaaaaaatttacattttattcgatgttgccaaatgtccttattttttaaatatgtaaatgaatttcataaatccaatttaagagcttagctttgctggcattttgccagcattatgcaatgaaatcacattgttttatgaaaaattaatgtaaaaatttcccatt

SEQ ID NO: 11610 - DNA, 677 bp, Heterodera glycines
atgtgatggtgcggtttcggagatcgggcgtcttcttaacgggtgtcacttcgtccccccccccccccgagaaattaattttgattaaactacaaaatctaaacttttaaagaaatttcgtaggaaggggggggggtgtaaaactgtcaaaacccccaattttgcgaaactaaaagaaatatcgcaaatctttcaattcccaaaaaaaacttggtttcatcatcgaacggcacattttatatgcacattttacaccattaattatttttcgagtgtggcacctttttatgcttcaaggattccgctgatttccagaaaatgttactgcttatttttctattttttaccattgtttgacctcattaggattttcttcttattgacagactaatacaaaaacgaaaagaatcccttcccataggcactggctgaacacattgccaaagtgcacttgcagcaaaagccattccctggcggcgttcacgtgcgtctgttgccgaacagcaaaaacaatggacgaccactgattcagtcggccaacatcagcagcaccaatggagaacaacagaagaatctgatcgccgtcgtcgagcagcacttggagcagtacaccaaggacctcgttaaggaagtaagtgactggggcatggcatggttttggtttggggggggggggg

SEQ ID NO: 11611 - DNA, 2043 bp, Heterodera glycines
tttaagaagcaacgtaaaaactgagaataacaaaagcaattttattggcttttaatgttgaggaacgaccacagaagagctgctatttgagaataatctgaacagaaatgaaaattccttctgaaaagctgcgcgatattcggaactgaaaagcaattagcggaacagaataattaacattttatcgatgtcacggcagttcgtacaaaggcttagactaggtataagccttcggtttaagcctaagcttaagctttttttgtaaaaattttattgtacgaattgccattgacccattttgaccttgtcaaatagagaattaggccacttgacgaagcactgatgtggcacaaaatgccaacaatctgtgaagaatgccacaaaacaatcgcattactttcattaatgttcaataatttgtatattaaagcaacggaacaagcaaagagataaccgccaaaattggcgaaaataattgcgaaaagcgaccggaaaatacgattattaaattgggtcgaattggagtttgaaggcactgaaatgacaaataattggcaaatacataattttgcatatttttaactgaaaaacctttacggcactgaacagcaacagcaattaatgcgtaaagaatgaccgaaaagaatacgcaaaaagtgccttccaactgaacattggttgcccagtggctctttaattaataaatgttaattaatattataattagggcttctttttttgatgcaaatacatatttttcctggattctctatgctctgaaatagtaggaaaaccctttcttttttgtgtttacgaacaaaagtttggacttttatttacatatttcgtgattgttctacatatttcatacatgttttcattttttttacatattttgagaatttatagaagaaataataaaaatttatttttgaaaatgtaccccaagaaaatgggttttttcaaaaaaagagatatgaaaaaaaaaattttaatactaaaaggtgatcaaaaaatttttaacatattttattatatatttttgggtttttatagctattccatacatattttatcatttttatacatattttatttacataattcgcgatttttcttacataaaaaagaagtcctaattataattttagagattagtaaaaattttattattaaatgaaactaactgatttgaaaatgcgaccgataattaaaaaataattgtcaattgtttcaagcgaattcatttgcgagtcgtaaccgtttaaataaatgagtgacgatgcaatgatttgcaccatattaaccatcagaacaatggcaaaaatatatgttttcttcaactttcttattaaataaaataattttgaaaacatttattttattttgatataaaaatattgtttttaattattattttttacatattttacttgagcggaaaaagcacagcgaacaatcgttcaatgccggtaaaaaccattaaattcactgcgcatccactgcttgttaaaggaataaccacaaaataaacggctgttttaaatgacacaaaatattggccagaaaatgcggagaatattgtcagaaaattgccacacaaatttacaatttcgcataatgaataaaatgccaacaaaatattgacggagccacggagtgcccttgggggaagaaaatgtttttttttgaaaaaaatattaaactttaattattattaattgacaaaatgattgacactttgtccgaaatgtgatgaaaatgacggaaaaattgaaaaacatcccaaacattgtcacaacgccaaaactaatggcataaatgggcattgtcccagcaaaaatctttattttaaaaattgacaaaaaatacaatttaattcatacctccggtgttaattcgtcgatttcttttttcatttgcgtttctttcattttaatgtttattcagaaaaaaaaaaattttttttctcataaaatgtttgacgaatgaattcggagataaattaataaaattttacgagagaaattttgctgacttcat

SEQ ID NO: 11612 - DNA, 752 bp, Heterodera glycines
ccccgttccaaggggtggagcgcgggacagaaaaaatccccgcggaatcgtgcaaaacaaaaaaaattttcgcacgtcgcaggtcgccggctccaaccccttgccccccgtcaaacttttttacaccttaaaataggtctaaaattattaattttcaaacataattaatttaatttgtctctctgtagtccaaataagatcgcaaaaaacaattattcttgctaattattcgacatgaagcgaaccaacgcatcaaacatcactccgcctcgcgcaaaacgttcaatggcacctgcacaggacctggacccaaacgctatcgcactcgcggagcaagaacgacaacgcaccctggtcttcattggcctcccggaaagcaatgccattcgcccatcggaacgtgttcaggaagacagggaagccgccacaaaaatcctggaccatcttgaagttgaggcccaaccaaccgccgtctttcgactcggacgtacgcgcgcttcatattcttccttgagttgttctttggtcagcgctgggcggacgaacaggcggttcaggttttgtagagaacggagtcgagcacgctcgcgcttccatcctccgagtgccatgtgttggtgtgtggttgttggcatgaccaccttgagcgggcgtggtgttgttcgctgcgggtcgtaacgtcggctctaggaaaatccgaaactggaaaatccgacaccggaaattccgacactggaaaatccaacacaagc

SEQ ID NO: 11613 - DNA, 928 bp, Heterodera glycines
cccccccccgccgtttccctcctccatatcaaaaataacttctttttttgtcaaactttgagattttagaaaaaatatttaaagaaattttcaaggaaaatggaatttttttctaaattttttttgtattttaatatgaataattacattttcaaaaaaaaatagttgaaattctagtctaggtattgactaacgtaatcagccaaaatatatcaccgtgtgcccagcagcagcgaattctttgccctgcttttttcgtccttttcccagagagttggattcgttcgaactctgaaaagttgacatattaaaagaagcagttcattcaaaaaaaggggggggggtaggccaaattttatgagggacaaaatatacaaaaattttcggtaccgccaaagaaactttcatttttcaaagttgcaggccaaaacgtcgccacaagtttttttattttagaaaattcaagaaaaaatatcaaaaattaattgttacctagcttagattgaaaaaaagtttatgaaaaattcgacggaccataaaatcttcaatatttttccgaaactcagcaaactttgtttcactaatcgtctccatctttttgaaattttaaacgactacagaaatcaaccaaaatatatcaccgtgagcccagcagcagcgatttctctgccctgctttgtttgtcccttttccgtgctttctttgcggtcggacgccgtctcgaacggttcgaaactcttcaacaattttacatttaaaatttgcatgacaaattttgtcacaatttattgcctttgctggctgtcgttgcggtgccctctgctgggcattggcatcggtgtcacgcggcaattgcccgcgcaactcagaggccaaatgttgaagaccgccggaaagaggcgtgaacagatttgctgaatggggggtt

SEQ ID NO: 11614 - DNA, 2951 bp, Heterodera glycines
ccccccccccccgccttcttggtatggagtgcaaaatccggttttcccttcgcgtccctgccggttacttacccaattgtggaaaccttcgacacattttcagccttctcatgaatgtgcaaggcccacttagacaaagtttgaacaatttcttttaatttggcaacttcttcagcgtcaattgatgagcgaaggccgttcatgacagagttcatctcgtccaaagaagacatgaatcgcgcttcaaagtcggaaatagctaaatggcacttttattatggtatggcactaaaaaatttgccaaaacacgaaattcttattttaaaatttagtttttctaaaagaaaaactaaatttttttaatggtttgattttgaaaaaactgagtatcttactgatgaaaactctaaatgtaagaaaaaaaaatttaatttttgatggaaattgaagaggggctgaaagggatgagagaggacggagaacgagctgccccgggcatgacaaacgaaccaatgttgatcgacgttctgtcagtgcattcgttgcgcagtttgcgaggaaaatcatgcagcagagattgaagagactcggcatgttcgtaaaaaagtgctttgtctgacttctcacaatttgacttgatggcgctgtcgacaccgggattgtccagtcgcccttggcgaatcgcagtcgaaagcgaaacctgaggcgtaaattgatgtgatttaacaaaaggacagcagattgaaatgaaagaggtgctcctccagccctagttgacaaatgaggacaaccacaaccaaccactaagggcgtatccaggggatttgagggagctaaaacacccccccccccccctccgaagcgaaaaagtaaaaaatttcagcattttgaaatttaagtaatttttcttaacaaattgctttatttatttttcccggcggggactcatattttagcatattttgaaaaatagggaccaaatggcgaaaatagtaatttttggcgaaaatcggctaaaaattttgcaaatagacctcttttgattttttttttgaaaaactgaatatgagacaaggagagtgggggacgacccaattaagcctaagtcgtagtgaattaagccagcgaccaagtatatactttgtcgtttgggcagatcggcgacgtcgttgacggtacacagcctcaaaattatttactttcgcactgaattcgccgccgcgtgcggccgatgtggcggcagacggagcagcggcggtcagttgaccgccgccgaacgttccttcagcggtcatggctgaatcagtgtcctaaagtttatacaatgcgccaacaagtttagtattttctcaggattagctttttccctcaaatgtggagaaacccgtttttccaaccactcggtgttaaggaccaaaattttttacagttcgcaaattttatagcaaaaatgttgccaaaattaatgatgttttatgtcaacgagtcagcgctcggcccaaagaaaatgttccattgggtgaaacccaatttttcaaccatgaatgtacagaaccaacattttgccagttgagtattttgcatttttgttggaaatttattttgatagtgacatgcttttcttctcgttttacaaaacagtgaacttaaaacctgtccgcactgttgtttgcgccttttgaaggccgacacactggtggtgatgttaagtgccagtaagtccatcgtttgggctgtgtgtcgacaaaagtgggcaatttccttgttgccgtcttcgatacgctcaacaatcgtgtcgagcaattcaaatgtgtcctcgcgaaattgttcaaactttgtggtgagtcttttttccatttcctcgaactttcggtccatttcttctgtatttcgttgcatttcctcaaaaataaaatcgttatgtttgagaaccgccaaacgccacacatatggtggaacaaaggctgaactctatcatttatgataaaatcagacaaaaccgatcaactgtgaacgaattttttataagttttaataattctaataatttggtttttattaaaattttaataaattttaagatatggtttagcaaaatcttagaaaaggctgggcaaataaacatgtagctttcgaagtattccaaggtttattttgattaattgactagaaaaaaattctttctatctttaaacaacaagagaaatgaaaaaagagtaaaatctgacccacgagtttattttgaatttaaaattttcattaatcttctcaaaataaaaaattggcatttcgtcaatttacggctcaattcattcttttttttggtgaaaactacggatggatcgtccggtagattgtttattaacttgttcccggaggatttggagtccctgatcacgaatctgcatctattttgaccaatttctcaaacccaactcgaacaaaggtcaaaaattcaaatttttcgatttatgttttttattaataagttaggaagccggacttggtctaaatatatcagatattcgtgatcagcgaccctaaaaaccattagaataagtttccactagttgaaagattttgaagttctcgacttttggttcgatttcgggcccgggttcataattagtcaaaatgaatgttattagattaatgatcaactgccctgaaaagcccataaacatattttcacgactttgtaaaataaataaataaattttcttccaaaaaagggcggaccattgacagaattaccctttcaatttaaaagtttaaatcaaattccttggcccaaaaatggcacggcatacctctttccatttgtcaacacgtggaagcaaaaaattgtgaagcagccgacaggataaaacacattcggaagagtttcctcgacagggaataaaggcacaagttcgaacaaaagttcgggcggaaggcattttggggccatt

SEQ ID NO: 11615 - DNA, 1028 bp, Heterodera glycines
  unsure (1)..(1028): unsure at all n locations
ttagtcaatgggcagagaacagaatagccaaagcaatgtatggctgtatgggagaagncaaattttttatanccttaaaaaagacatttntgcttaagctttnaaaatntaattggcattgccagttaggagggcttgtgattatcaacgctttctgatgaatgacccgcagcagccacagtcaccgatttacaatcgtacaatggcacagggaaaaggggggaggagggcatttacactgaaaatggcattcattttcacgacaattgtacagttctcatttcatttatatactctgatagcaaataatccctaagattgatcaactgctgattagccctgtgaaaagattaaattttacattatgcattaattactccgaatgtccatccatgcgcgtctttgactttgccgcctcgccaaaaagccgacaaaaagaaatttcacattcccaaattatgtcattgcttttgggcatttaacctaattatttatttgcaaagataattttataataaagattcaaattttttagaaaaaattgttagtagagggtgaaacaggcataattttccataaaaatgcctaaataggcttaaaagcacattttaatacttaaaaaataattttttatatctctttttttgaaaacagccgattttgtcgaaaaaaatgtgtaattttggatttttggggcactcaaaactcaaagtttgccgcatataatacataatgtattatttatttagttaattgcttttcatttattccataatttttgaatacagtcatggtcataagtgttgtcccatcatgctttgaaaaaaataattgcgtataaaattgtcattttccaatttcaacagataagtagcataccattggatagcattttttatgggctttccaatgataccatatttgcatttgtgacataaacatttatttgatttattttaccatattcacaattgatcaaaatataggtggtcaaaaagtgttgtcccgaccnntgcaggcccatgcaa

SEQ ID NO: 11616 - DNA, 590 bp, Heterodera glycines
agggagggggcaaagcacagtattaccgaaacttttaggctgtttttgtgtgtttttgaccttcaattgctgaagttcttctgcgtcctctcgttgattttccaattgatttttcaatgacaaaagtttcagtctttcgcggtcagtcaaacgtccgatctgtaagagttttcgaggttactaagaaaaataaaggacagattttagtaaaattatatatagatattctacaaaaatattttactatttgtcatttatttattatttgtaacagtctaaaattttcggcaatcctgcagaatgggtgtccctaatttttaactttttttttttaatttgggctcaaaatcagtttcaggggatttcgagggtactgattacgaatctaaactcggatttgcctaattccgaacctcagacctgaattcgaacgaagttaaaagaatttttttcaagaatggattttttggggtaaaagcttctaattcatttaacacaatttattttgatgtaaaactatgctacaattgttaattggattaaaatgcgcaatttgcgtcaaaatttaattcggtttaaacatatttttt

SEQ ID NO: 11617 - DNA, 2423 bp, Heterodera glycines
ccaacgccaaagacaccgaagagaaacagagcagaagggaagcccaggcacggccaatgtacgaaatgcgctggtttccacgcttaattatgatgaattttaatcctattttccaatggagtgaaaggggaaaacccgatcacttagaaatgtagttaaagtcaaattaaagacacctttactgatctgaataaaataacgttcactgtcagcatttcacctcatagaaaaagcactgaacgcccgttatgatgcatgccaacaaagcatgggaagcgaacacaacgtcattgataaggactgggatcagactgcgctgtccatgccgttcaatgtaaattctctgtttttgagattaaaacataaaacgccaaagatttgacaaaacctgaacattcggatcgaaataaagcaacacattataaacagtgtaacaggaaaaaccaatgacattcagcagcaaaaaatcgaagttaagaccaatgacactgaaaaataaataaagaaattcaaaaaaccgaaacaaacaccacctctttcgctggaagttgagaataatctgcggatagaaggaaatactccacctgaagagaagcggacaattggccaaagggaaagggactcacgcaacgaaataaatccatccggagagaatgaccaaaacggagatcgttttacttctgaccacggtgacggggataaagaaatcaagtggactgaaagaaattgacatcattaggaaaagaatgaatgctaatgttaatgataaactcactcaaaagggcaaatgtcagcaaatgacccattgtcaaaaaccaatgaacaattttggagttcaatataagttcggctggacagggacagaccggtgacattcacttgcacttgagagtccttttcttttttcagagtaattcgttcgggtgtcagttttagcacggtccaacttgtgttcagaaccaagttcaaattgtactcaaatcttttcctgaaaaatataaattcaaaacaatggaattgttcaaattaaaagatagacaaacttggatgataagacgagtgaaacttcatggcctatcgaaacagacaattcctttggacattcgaccggcaagtctttactgatctttaaatggtcatggaggatggattccgtccgatagatacccataagaaaaattgaaagaacaatcggccagcgcatagagagagagagacacggaattgttgcttatctgctggttcgaatgagcagtggtcgagaagaaatatgaccaaagtggtaaagcacgcacgacatgaagtggaaaggaaacaggctaaatgggcgagaagacaataaaaaaactccccattacattagataaaaattaggtaaacactggcctgttaatcaattaatggagacagttaatcaattaattattcatgaggatttaaaaaaaatcaaatgatgcaataataattaaaattaactcattttcatgttttcatttttacttaaatcgttagaaattgaatctgaaacgaagtgaacaaaagaaaaattactgaaaattcaacttttttttaaacaaatttctttaaattcttaaaaaatttccctggcaacgcctatcagcatcgcagaaccacaaaaacttaattttcattaaaaaatgctcaaaatcgcaaaaatcggaaaaaaaaactcgtcgattctggcaggaccccgttcgtaagtttgtcgtcccccccccctccctatgaccccccagcacgaaaattgttacttgggtccggatccgtccaaccatattatctatatatagtatgtttgtttaaaaagaaagtttttctcaacttgcagaatttgaaattctctttgcttggatagtgatggaatctccaaaattactgagcataaattttggtcccttggttcgaatttttcgtttcaacagtgctcttgctgatgttaaacgtgttccttttgcaattcctaaaccaattcaagttttgtttatttatttttttgattctattttttaatttaagcgttcgccaactgacttgctaaaagcacttgcaggcactgttaaggaagatgaaacctcagttcactttggactagtcgatgatccgataatgattccaactggttttagagacaaacgactctatctgatgtcaaaggcatatttattttagatattcaaattaattacaaacgatgctttcaaatttgaggagcttggtcgccggactgctcgcaaaattgttgaggaatggccaacattatttatgctcgaccgtgatgttcccgaattgaaggctttcagaccgcagaaaccattggatcccactttggtacaaccgaacgaggaaaatttacaaaaaatgataatggaccgacgagtgtctgatgctataaagctttatca

SEQ ID NO: 11618 - DNA, 1542 bp, Heterodera glycines
  unsure (1)..(1542): unsure at all n locations
taaatgtgcgctttgcctacaatgttttggctcaacttaccgatgtcaagccaagagtatgtctatcagtgaaaaattaaacacaaanttggacatntagttgtttaatttgcctgatggggaaaattacatggaattgtgcaagaaaatcgttgacgttattgaacaattggaccgtcagaagcttgaaagagaattgaataagaatagcaaatgaaatgctttgttataataatttcctttcattgaaaacatttttatttattccaaattattttaatttatcgttcattcgactttatttttattgtgcatattcttttctggttatataagtttgtgtttctgtctttaagcagctttctttttcaaatggctttttgcactcgtccgatttctccgattttaactgaaagtaaaaaccgacaaaaggaattgattctggaccgtgataaggttgttgaagggattgccgtgtcatttcactttttcttcctttttgcagatccatcgcattgcgctgaacactccggcgatttgcgttctttcgcacgtcgcctcggcaaattgcatttggttcaaactctttaatcacatcactggtcaacttcaacttggcaggtgaaattgtgatgtttattccatcatttgttgtttctgtgatgtttagagaacaattaaagaaattggaccgtactaaaacagtcgaaagtgagtttttgttgatattccgtggttaaattcaaaaatagacctagcctaataattagggctgctaattttatgtaaaacatgtttttttcctggcttctccatgctctaaatggtaggaaaacaatttcttttttgtgtttgcgaacaaaagttgggacttttatttgtttgttttacctttgtttcctcatcaattgacccattagcaattgcatttccattttctaattgtgatcagcatctggcaaagattaccaatacgtgatggcccctctgaatgagaatgtatacgccaggggacgcgtgttgtgccgctgtgactcgaattggcaaattgtttacgtccatttcattgatgaggggtacggcgcttggatgtacgaagtacgtttttagtgacaaaaattagtgtattttaagatcatgatttccaaaatccctcctctataatatttcccattcattaggattgtttggctcagatggatcgctttttcttctcccatccttggcaagcatttccgatagcgttgttcaaaacatcgaaaatggccgagccaagcaggtttttgaccgtcttgttcaatacgatgaatgtgataattgttactatagggaggagttggtccgcattttgaagcagttcccgcgttttaacgtaatccccgccatgggcaatcagcgcattgcttcgagccaacaattattatgcccacgtcagggtaacaaattcagtcattcactaaaatggaagctgattgcttacaggcggatgtttttggcttaaaatcttcggaaggccaaacgaacgaaagaaatgatcggtct

SEQ ID NO: 11619 - DNA, 2654 bp, Heterodera glycines
  unsure (1)..(2654): unsure at all n locations
atataccgtatatgctctaattatagcccagtctctattaataccgcagtctccaattatcccccccccctttctgaggagtttaaaaaataatcacccagtctccatttatcccccatgacggataaatagaattttgagaacattgtttggcactaattttttctgaaaaacaaaacaattttccagcaaattggttgataatttgcggcaccggtcgctttctgttgaccaacacatagggcttgagcttatgtccattgctgcgggcttttgcagtagagaccggacaactggggtcggagggatcccgagtcgggatcccgaccgaatcccgatcccgatgaatcccgaagatttttttcgggatcccgcgggattatcgggatttgctaaaacccaattttttttaaatggctttttaatttttagttttgtgctaagttttgttcaagtgcttatctaatatttataattgattaattcgattgtgaaaaatagggatggtaattatattaggtttttatagattttttccaaaattagaatatctagggtcaaaaattagaacatttaacaacatagcttgaaatatttttacaatttaatcaattaatgtcaatttctgtattttcgcctcctattatcattttaaacaattttaaggaaattagaaaatcgtaaactgcatagggatcaaaaatcaagaattttttcgcagtgaattttttcaaaaactttaggggaacagggggagggccggcggtgccgataggcgccgccgggaaaattttgaatttgaaatgtaatttgttaacagaatttatcaaatgacaatattttttaatttaaaattcaagatcttaattaaaaaatggagatttttcgaaaaattatcgtgacttcagtcccgcgggatcccgcgggattggtaaaatggtcaggagggatcccgattcgggatcctgatgaaatccttatcccgatcaattccgatgaatttaaaaaatcgctcgggatggatcccgaatttaatcccgcgggatcccgatcccgtccggtctctattttgcagacggaacagctgtggcttcctccataaattgcgttacaaacacagcaaaaagactccattgctaaatatatggaatttttcaaatttttcatgaacagattttctgtattttacatgaaaatttgaaaaattccataggtactaggtcgatcctaaaaaagtatcaatgataatgaataattatatttaataattcttaataaaaatattttaaaatttatataaatattttattttttaattaattttagaccaattttcaatttcattaatacaattgaaaagtatcatcataatatttaaaattattattccatttaaattaaatgaaaattattttttgatcaaactacagaaaatattttaaccattcggtaaattttttgcaaaaaatttaattccattaaaaataacgtcactttttgagtccgtaataagagatgaaaacgcgagaaaaaagaaatgctaaaaatggatggaaacaaacataatgctatgcccatggcatttgaggagataaaagccgccaagaaccggcatggattttttacgaatctttcanatccggatttgtggccttccaaataatcaagtaagagcaagagaaaataaagttaataaaaaatattttcattttttatgtcaatatatgacaagaatgattttaacactgaagggggacgatattttataaattgaaaatttttattattatggcaaataatattgacagcattgattatcgtttccgatgtaaaataatatttcatcttaaaaataatttttattatctgcttaaatattatccatgaatttataattaatctaattattcattatcattgatacttttttagggatcgcccccatgtatacttttttaggatcgactcagcactcaaaaatgcattaaaaataattattttttgccgagctgacatttttggcgacatgttcaaaaaaaattcaaaaatttttcactaaacaaatcagtcgaaaaataatcccacagtctctattaatcacgcagtctctaattatcccctgtattctgaggaggttgaaaaataatcccccatgggctataattagagcatatacggtatgtaattgtatacaataaaataaaaacctgaacatagaataaatattgattgaataaaaaaaattacgaataaagcttttgagtaaaaatcgatcaaataaataaaagaaaaaaaattgtatttagggattccatttttaggaaaatgtcaaaaatttttgctcatttgatacgcaaagcacgaaaaaagaattttccgattggttaaaggtgtttaagatgacttttataatgcctattttggattttttgtgcttaatgtctaggggaatattttgtgccgatatctgaatttcggaaaaatcatataaacgtaataagcaaaaaaaacacttaagaatgataatttttcccaaaaattgataaagggggaaatactaggtatttcgaaaccatatctccgccttttaaaggtattcttttttaaaattttaaattccctagccccttatgacctgcagnnnccatgcaagc

SEQ ID NO: 11620 - DNA, 1640 bp, Heterodera glycines
tgaaatgcatgtcaattatttaatcataatttttttttaatagctcaaaatgttaatttccaatgtcactatttatctatttcgctagcaaattacaaaccaaattgatttcaagtaattcttcatggagctttaaaatacaaattcgcttaaaacacactttgatttttaagctttaggcttctataagaataatttcgaccctattaataatagtgacaagcttaatgaaaggagcaagaattgactgataaaagttgtaattttcgatatcacagtatttgataataaattgaaaattttttatatagcgaaccaaaaatatgacttaataatatttcaaaaaagagattaaattcaatttaattttactcaactaaattaagttgttaaactaataaaggtttttgaaaaataaaaaaacatacatacaatacataaattgcaaaaatttagtaaaattctaaattaaaaataaaaattttattatttaattcaagtgaacataaattaattaacgaaaactcatgcgttttacacgtgtaatcaatgcaaggcatgaaaaaatttcaaaagttgttaataaggaacaaatgatttaggaaaaattaaaagatcataatttaataataaaaatataaattaattttttatgaaacaagaaatttttatcagaaaatcaaatcaatatattttcaaaatcatattcaaaagtaaaaatataaaaaataaatgcaatcagatttgtgttaagacatcgttgaggcctcactgctccgtataaaaaaggtaattccgcaaaaaaaaatggaggttagctgtacaaagcaaaggtttaacatgtgaaaaataaatctataaatcaaaattctaaatataaaaaacaaaattgtcaaaaataaatatttaaattaattactgaattatatgaatatagtaaaattaattatgaaaattaaaaaaaatatatataaaaaagaaaattattattatataaaataaatttgaaatattcaacatatataaatagggataacatttttaggcaaatgcctatattttcctgagctccccgtggcctgaaacgcacgaaaaacatgttttttttgggctgttgttaagctacttttcgagttattagtgcctattttctaggcttttatttttagcgcttaaaaagcctaaaaaattttgaaagagcctatttttgcctattttggcgttttgcccaaaatttgtttaaaaaaatgcaataaaaacgaaaaatacacccctaagaatcgacctaaatttttttcaaaaaatacacccctaagaatcggctcgaaaattttctaaaacacaccccctaagaaatgaaaaatttttcaaaaatacacccctataaatcgacccgaaaattttcaaaaatacacccctgagaaatgaaaattttctcaaaaattcatctaacaaaatttctttaattattttcttaacgagaatttttgattttgaaaattatgtatatcctttatgatttggcaaaatatttttgctttttgaagaaaattttcgattttacacccctaaaatggaggtttttcgtgcctattttccattttttagtgcctattttgggggttttttagagcctaaag

SEQ ID NO: 11621 - DNA, 1067 bp, Heterodera glycines
ccccagtcctcacctgggacagtccctgcaaaaacgtcaaattttcttaaagaatttgctcaaaatcgcaaaattcgagcattttttgataaaatcttttaacaaatgcactcaaatttcagcaccatcggaccctctcggtttgttcatcaaaaatttttttttaagttttgaactaagcactaatcttctaagatttaatgcccatatttaaatttgagcccctttttgcaatatgatgacaacctggggaaattggacaaacttacgggaaacagtattcacaacgttgggaatctcctgcttgacttgcattatcgtgtactgcttcaccacttcacaaacagacattccttttttgacttcaattggattcgctttttcgccaatgccaaaaatgtcggtgattgttttggcgaccttttctaatttcgggcatgctgccaatgctgtcaaaagcttttcgaccaaaaatccgagcaaaactttgccgtagtgtacgcatttttcacccagccatttgccccaacagaaggcctgcgacactttatctgtcagcgcttcatatgccattgtgatgctcagtttcaggtcatcccatcccctgaaaaacaaaggcattttgtaataagtatttaaaaattgggcgggccaaggaacaagcagaggttgtcaacaaaagaaagtatactataccgtacggcgagactcaatattttgagttcttatggctatagcggatcgggatttgcagttattaattaaagtttttgcgttaattccaagcaaataagattttaaaaacaaaaaaaatttggaaaaatcccagttggatccttattattaaactaatgaccaatcctaggcaatacccaaacacagcggcaaaccctgattccggactcgctcagttcggccccagccaagttttaaatctataacttttttctttgtcaaccaaatccaacaatcttggtatcattcgagagctctttacatacttactctatcagccttacaaaaagcaaaacgattttcaagcctagaaaaaatttattaagaaaaaa

SEQ ID NO: 11622 - DNA, 981 bp, Heterodera glycines
cagagtaattaagtagaaatcgatttaaaaaaagaaagaaaaacttgacaaaatttacagaaattgcaaaactgaaaagccacgctcaaaaatatttgaacaaattttaatgataataaatcaaattttcgaaaatgtgaaaaccaaaactcgagtataaaaaataaaatcaccaaattgttttaaaactcacttcaccgatttgccttctttttgtgtctccgcaatttttttgtcaatttcgtaggcaattttgttgttccaaaaggcccaggcttcgagaatttgaataaatgcgtacaaacacttatcgcccgctttttcacacatggcacggatttcagggattcttcggcacattcgctggtagagagcgcctggaaggagagagatagagaaggcatgaacacgtgggcatcaaataataaattaatccccgcgataagaaatatttttacataaacggagcccaacagtccgatccgatcagtgtgtgcacagattaccattttaatgaccataccaaacacactaattaatgcaccgctcccacccccccccccccccccacatttggaacttgggtctttcactacacaccgtgaagcattattggcgggatgcgattgaggcggaataactcgagctgtgcggcaaccatttcatcgcgcttatcgcgccaatttgaccattcttcgtccgtccattgttcatctcctgcgacgccaagcagcgtccgcacgtgcgacttgcggacgatcagacagccggagcccggctgacccttgcgcgccacgcggccggccgcctgctcctcgacgcgttggttgcatggggaaaaagcggtgatgtgggccaaaccgccatgggccaaaacctattgtaaatagattttaattattcattggaaaccctttttttaatttgaatgtcgcctccctaatttttaggcctgctagaatttcaatcctggtgagtgta

SEQ ID NO: 11623 - DNA, 2340 bp, Heterodera glycines
aatgtgaatggacgatactgctgctgcagagtgagcaagcacggaattccgacaataaattttagagattggatttcaacaaatttacaaaaatttcctcccgcttttcgtgcccgaaattgttgcaaccctagtgggggaaatacgaaatacggtattatcacaaaagggtgccgccccttacatccggcgaagggttttggtccacgccgcgcgcgatgagtaacgtgccgatcagaatgtggccagtgcacatgtcctcccgcaacattttgcgttcctcttcagtaccctgaataataagggcagaaaaaccattattaataatgtgttttaaaaaatggccaaaaacccatgtggtttcgggatcgcttatcaaaaatggcataaaaattatttggaaaaatacaaaataaattaaaggcgtaaaaaataagatggcatttccctgtaccttagtgaacatccgaattttcctcgtttcggcaatctttgggtccgctttgatttcggcctcaatctcttcggcatctttgatggattcggtgattatcaaaaccgcccgcttttcagaatattccattgccttaagtggaatgctcgtttaaaactgtattttaatatcaacgatcagggggtatccctttttccaattcttatttaagcgcatttgccatattttggtacccaataggcggcgagtcccaccgatggacaacccatttattcacttagtctaagaaaacctataattagcctttcttggtcaaaatccataaacatgattcaatttgaaaatttccctccacctgagttccaaatttttaatgcgatgaattcggtgggttgtgatgcttcttctaccttttctctgatgcttttcaaccactcttcatcgctttcacacagtttgtcatcgtctttcgtgtattttcgttctttgaagcgtggcaaagtgatgttcattatattgaaagtgttgccggaaaagtcttgctcatcagtgtttccggtagttccggtgatcgacgttatgtcggcctttttgctcagaaagaagccgaggttatttttgtgggaaatgtgcagggacggcggggtgagctccacgtcctgcaatgactgaacacactgctgcagtccgttgctgtactgcgagttcttctcaatgatgccgctgttcatgttgtccaccggcactattctcatcggtgccgccatttgtaacattttgccgatgccgccgctgccgttgttggcattctgttcgtgggataaatggatgagcaattcggcttttgactaattcgtgtttctgatcatacataacaataagggtgggggtgggggggtcgaccacggtgggggtcgattgggcgccgaccagttgggcgccagcctgctttttgaggcacaactcctttcatagttgacagaactgaatgaatttaatatcattcaataggcctaaatattctcgattagcctgctaaatttcaaaaaatttggttaaatttcaaaaaagtcatgtacaaaaatattcagaaaaccgatttttttttaagttttttgtccataatatttttgaaacttaaccaaatttttcgaaattttctaggctaacagagaactcttaggtctattgaatgatattaaattcattcagttcagccaactatgaaaggagttgtgcctcaaaaagcaggctggcgcccaactggtcggcgcccaatcgacccggtccgcagaatcgagcccccccccctctgctgataagaaaatattttaatttgtacacatacatacataaattatgggcttaaaaaatcgagaccggatgtgctcatagcggggacggtcccccagcattttggcttggaggaggtagctttttttaattgaaaatttgggtgagggaaatcttggaaggggtattttaagtgtttctcagcgaaacaaaaggtgcagaaaaaagatttcaaaaataataaaataaatccgctccctttaattaataccaatttaattaaaattgccggtttgatcaaagcatcgaaatttatcagagtgaaaaataaaataaaaaatccgatcaaaaagcttcaaactgctgattgattcttctttccgctgtgttccgattgatcaacaacacatcgttcttctttttcggtccgctgttcacttttccccgatcatttcattgttttgacaaacgcccccccccccgccacttttcatcagtttcgacggggtggcgaacaaatccaaaccaaataaataatatgaccgatatttcacaatttaacaaaatttccaacccccatcgccatcgattag

SEQ ID NO: 11624 - DNA, 1129 bp, Heterodera glycines
tctagagtccgattagaaattattagaaaaaaaaattaggaatcaaaaaatgtaaatattgcgcttttacgcgtcccattaatggccatcctcagtttcttaggtcataacttttttcatgcttgtaatatttcgcgtaatatttcgcactaaaaattttctgttatctcaattcctctgtttttctctgctctcatctctatgcgattcactatttctctgtgagattgttctagggccactgatcattctttatctgatcacttgctttgttcagtcgtcgcttctccgtcaacattttcttcagcatttcccgctgttcattgcgcaaccaatccgagtcttggcttgaattcgacgtctataggttagaaattatcatttttaaaagagttgattgaatttttcaaaaaattcgtgattttgttggcattagcactttcttttccgtgccgagagtctcgaggagtgtcataatttataaaaactccaaccctaatttgctgttgttgttgctgctgttgcggttgtggcagttgtgccgcgaattgcactgaagttgctgttggcggtgccatcaatggcgctgcgactgttgtggcaccggcggcggcggtcgatgccaccgccgccgcagcgacggcagccaatggcgccgtgggcgctggcggcgacattttttcgccggtgggcgacggaatgtgagcagtgggcagaaagaatgccgccgtggcaggaggagccggccctggcattggacccatggatacggtacggcagcatactgtagaaacgatggagagagttgctgtacaaatctcggcactgtttatccccctcctcaccatttgccgatgttcgtacacaacagggcgattgagcgagtgggtcggctgctgctaccgacggttgctgtacaacggaagatggtagaaggggggagacggcatacggtagcgacggtgccatgaaaccgttgccattcatggcaccgcccgcatttgttgcggcggaaccaccaccattcgtgctgctcagctcggaggacggacgtaccgaattgacctggaaaaaaagtcagaatttgcatggaaatttacaaatccgagagtttcagaacataatttca

SEQ ID NO: 11625 - DNA, 1790 bp, Heterodera glycines
  unsure (1)..(1790): unsure at all n locations
tgtttagaaaatgaatttaaataaaataaaataaatataaaaacaaatttaaaagtgtttaaataggatgagagtgtcacttaaatgagttcccaagacttttttatntagaaattttcctgccattttttctcgattttttatgaaatttactccccgaccaaggtgttttttgttcgccaacatttttttttttggtttgaaccaaccatccccgacaaattttgttgccgtgggatttcctcctctattcccaacttttctttacccgaaggtcggggagaaacccctatcaatttcaaataattattttctttatttaattttaatttgtccaactaattattttttttttcaaaatttttgcctgaatttttggtccgtcccatttggtcgtctgacaaaaatgaagtccaatgagtagcccagtgaaacttcttccagcgaacttccgtcctattcaaatttgaatgttggcatttttttttttttctgtttggcaaaacgttcacagactttgcaagggaataattcttcgccatatccctcgcactgttggatttcgacaatgtacaaaagcgcggcataagctggctgcatggtgtgcaattttccataggcctatcatttttagaaaaattttttaaaacttctcttaaatttgaaattttcttttcttttacgacgccctcatgaaaaaactcaccgttaaaattcttgcatatgtctcgtcgttgttgatcttcggattccgacacatttcctatttttaaaacaaattttaatttaaaacaaaataaaaatgaaaattttttaaaaaatattttactaattattaattagtgttaattagtccacctgcggtaaaagtgacagcattttcaagtgttgtaatgttggcgaatttaaattgggaaattcaatttggagctgataggcggctgaaaaaaatatttcagaaaatatatatttatttaaatttaattaaaaattataattaaatattcaaattacccaaattaatgcatttgtccaattccaacgtggcaaatttgttgctctgaagcacatccaattttagcaaagtgtaataaatgctgcgcgaaacagtgtcatgcagcgtaaacacctgaaaaatatttgaaaataacattataaatttgtttatagtattagaaaattaaatatttttataaaccgtattccctaaaatagagcccccggggggctttattttccaaccctctcaaaaaggaggggggggggactttatttcagaggctctatttttcaaatcccatcaaaagggtggctttatttcaggggggtgggctttaaattgggggggggggctgtattttttgaaaaattttaaaattattgcattgtaaaatattttaaattaaatttaaaataattcccctcacatttgcgcacgcgtgcaaaatggccaaattgacggcccatttttggccccgtcggcatgcccaccgttccaattggcgtctgatcggcttgtccggctccacccatcgcatcattcgcttctccgtatcagtggcctttaattaaaaaattcttaattcagtctaaaaccaaaacaaaaaataataaaataatattaattggtcccaaaatttaaaaatgaaaaattcttggcccaattttgtaagacatttgttaaaagagagagaataaaattgaattttgtcaccttcatttggtactgtaagccgaacagttcgggctaaatgcaaaaaatgtaatttanaattaattaaaataaaata

SEQ ID NO: 11626 - DNA, 1171 bp, Heterodera glycines
  unsure (1)..(1171): unsure at all n locations
attcattcattcattttgaaaatccggttccaccccccccccccccacccctctcgggagccctttccccacatttttgagcagaccactctcgcggtggtgcctgccctctgctggggtcgtccccaccgctcattagcgggggcgcggacggacggacagacacttttgccctttaaggcaaaaaaagaaaaatgcggtaaaatgcgacggaaaggtgaaaaacgaaagaaatttctaatttaattagccgaaaaaatgagaaaagaatttctctctctttggaaattcaaaaatgggggcattttaaattggcgtgacaatttgcaattcaaatcaggtttcaattagattgattattcgccaacaaaaatttaataataattagagtcgatttcgcaattcaaaatttcattttgttagaaaattgttagaactcagtttaataaaacaatacaaataagaatatttttttctaaaaaaataccgggatcggcattattgatggcaagatcctgtgtcaggatgggacccttttttaatccggatccgcgagatctcgattttggattaaaacccaccatgctgcaataagcattggtattttgggagcccggccgccgccgccttgggcataatttaattgaagcggaagggtcgcacgcgcattaaacacaacgccaaaaccaaaacagcaacaacaacacaacaacaatcaacaactttcatcgcgccaaatcaccgcctattatcaccatcatcatcaaatcatcatcaaatcaacatcaaaatcatcgtncttggttgttgtcccccgcccccctccctaatttgctcccaccagttttaatgagcgccccgtcccgctcattagactaatgatgatgataatgatgacgaagatgatgttgcaccgcagcaataaggcaaaacaaagaaagcaatcaccataagcggaacaccaagcagccaaaattggacgagcaattcgttaattaattaattacccctaccctcggggcatgaagtgatcaaaactcaaaagcgatttcaatacttgctgatgagcaagtggntgatcactctcactgtcactgatcagtcaaagggggtagaaagagcaccacccccaaatganaacagcaaattaccgttttaactaatgataaaa

SEQ ID NO: 11627 - DNA, 1648 bp, Heterodera glycines
ttatttaaaaaaccatcaaataaaaaattttggcttataacttgctcaaaagcaacaaaatttttaattcttgatatcattcgatagcccttagtgttctctataagtctacaaaatttcaaaaaatattattgtttaaaaaaatttatggccaaaaatgttcgaaaatcaaggttttttgagttcctcgagctataacttttttgaaacttcacgaaattttttgaaattttgcagactgctatcaaatgatatcaagaattaaaaatttcgttgctttcgagcaaagttataaataattttcgacaaaaattttcatatcacttcacctggccgttggatccggatcccgaccctaccccctcccttccccgcgccgaattgtcctttaaatttgtgcattaaaaattttttttgtgggtatttaattaaattttcgaattactcccgctcccgcccgggactcccgttaaaaatggacgggagtttaacgggagcgggagttttacgggattcccgctcccgctcccggaaattttttttaccgggctctaaaaaacagacataggtacgcacaaacaaaatgccaataaattaatataaattaaatcatataacgcacctgttgcaaatctaagtgcaacagatgaggtttttaactggtgcaaaatgataatttttgcattaaataaaatggtgttaaatattatgattagggctgctaattttatgtaagaaaatttgcgaattatgtaaataaaatatgcataaaaaatgctaaaatatatatgaaatatgtacaaaaacccccaaatatgtactaaaatatgtaaataaaaatttttaaatggtcttttttttggaaaaaattcttcgtaaaaagtctaatcacaaaatgccataaaaatgatcaaaataggcttagaatcacattttattttagtgctttaaattttattaatttttggtatctgttttttttgaaaaaatcgattttttagggataaattttcaaaaaaatttaattcttcacaaaaaatttctataaattctcaaaatatggaaaaaaataaaaatgtgtacgcaaaaattttaaaatttttgattttttggggaatctaaaaaattttcgttaaaaaatcctcaaaaattgcgaaatatgtagaaaaaaaaaatgcgaaaaagtccaaaatatgtataaaaatatgtgcatatcaggggtgtgacttgtctcagaaaagacgagagcgagagtttggcgagaggcgagagtccccaaaaagacgagagcgagagtttggcgagaggcgagagtccccaaaaacacgagagttggcgagaggcgagaggacgagaggcgagagtttttcaatttttttctgtagccttattttttaatttaaaaaacttcaaaatcgtatattaattaggggtacgggcctgggtatttgggcaaataccgggtcagggtattgccgggtacagaaagccgggtcagagtcctagtttttaaaccgagtccaagtcatgaaaaatccaaacaaaaatctttaaaattttttcatgaaaattaaaaaatattttcatgaaatatatttattttagaaacaaactttattatttgtcccattttttccactcttttttt

SEQ ID NO: 11628 - DNA, 1747 bp, Heterodera glycines
tttaccctcataaaattgtcagaaaaaatgtttttctattttatgattaacaaacttttcataaagaaaagaaaaatgcattataaatgggatgaagaagtaggcagcaattggcgtgcaaatagcgcagttggtactagcgcagccacaggacccaatcgaacgcgggttcagtcccgttagcacgcaatattttttaacaaatttaataaataaacactatagcatcatttaaatcatatttattatttaatttattactgaatattttttaattaatacataggatgataatttttttaaatgaaaattttttttcaaggaatttctttctcaacgcaaaataggtgaagcgaaaatgtcgtcgacaaactacttttgttcattatgccaattatttataatcacaaaaataaagaatttccgagcattataattagggcttatatttgtaggctcttaaattgccaaaataggcctaaaaatagaaaaggctttaaaaaacctcaaatttaggtgtgtaaatgacaaaattttagtcaaaagcaagaaaattaagccaaatcaatattgagaaacaaaaattcttgccaaaaaataaacaaatttattttagagatgagtttatgacaattttcatttcttagtgagtgtatttttgaaaattttgtcgtttcctaggggggtgggttttcttttcattgcatttttgttaataaattttggccataaggcagggcttcgatcgaaaatttttcaaaataagaacatcaaggccaaacaaaaaaatttgaaggtcaaaactaagaacaatcgcaaaattgctcaaatcacttatttgtacaatttatttatctcattgaatagtaaagccggcggacaaacaaagaaaaaagcggcatttttcggcttccgaccatccgtctccgatcaccgctgcccctggtgctcgcgttcggcttcctgatcggttttctgattccctattatgcacttctgtttgatgccgtcgggcgacaacgttgctgctgccgatcagtgccaattgtgtcaccgctgccgacaatgcgctgttcccaatgctccgcattttgcacatcgatgccatcgccagcaaaattccctaataattactaaatctaaaattgctttttctctggttggaaaacattcatttcgccttacgtttcgcctattaacccaaaatcggagtttcaccgactaacctaaaatagatggtttgacaaagaatttcacctaaatttgtttatattattagctatatttataatgataatgaaatttaacctaaaagtaaactggaaaaaatatatttataaaattccagagaaattcttgtcattgttggggcttgggacacactcatggacggtaaaaaagaaaaaaaagcgacaataaatctttttatggataattatgggaaaaaattggcgttctgtcacatttactttttatctttatttctctcacttttatgtactatctcttcattgttaataatgtaaagaacaacatttacttcgctctatagaacttttttttcgccttacagaatttcttcatattttgcatatcgatagagaaaaaaatataggatttttcaatcgcttttttaaagaaaacaatcgcttttatttaactttaatttttattttaaggcaaatttaattatatggaaaaaaggaaaattgtgtgcaagcttaatgcaattaaatcggcacaaaaa

SEQ ID NO: 11629 - DNA, 5101 bp, Heterodera glycines
  unsure (1)..(5101): unsure at all n locations
aattttttatccaaaaatcatgaaaatatgttntgnaacattttagtcggatcatgcatatagtattatcatattcatgatcaacgaaactaaaaacatcanagtcaataaaaacaaaaattgtcaaaagtgtcttcgccctttgctntaatacctaaagggcaatctcgaatatagcatcggttttctgttcatttcacgcaacattttgtctttcttttatttttactgttgcattaataaatatattttttaatattaactgggttaaatggttaaatacacaaagttataaacaaaagaaaaaattacaattgttcatgcatacaaatatgaaaataacaaatgtaattagaactgcgaaatgcccagtgataagcccgaacaaaattagtgaaattttaatcaggcccgacaaaaaaaataacatttctttgctacttaatttatcttcctaatcaaaaaaacaattaataaaataaaaaaaaatttccgtcctgggacacgtgttggccacgcctttgtccacaattggcgccttcccaatctccgcatagtgatgtacatgctgttgttgttggggctgcaacagaagacggcgacggggaaataaatgcacagagtgtttgactttccgaaaatgattaatgatttttactattatgaaaattttgattaataattaattattcaaataaagccaatttttttgctgaacgaatgaaaatcacttcaatctctacactatgacccagccgcaaattgattttttttttttttgctttgtaaaattttattccaaaaccatgagtagaaatattattttaagtggaataattttttgctaatatttaaaaaaaaatttaattttcaatgattaaaaaatcaaatgttaaaaattcaaaattaatttttacattgtactcctgccagggggccacctcaatttactggttttcaagagtattaaatttttgtgacatgtttattcaattagataatatattttgtttttattcctaaaattgttcatttattattaccgaaaacgatagttaaaaaaacttaggacggatttaatgccggaaaatgccatgtcattctgtcaaaattataatttttctctataattcgagtaaatcattaatggcttcaaccgactaattaacatttttatatttttttaaatttaaattttccattttgtgccgtgaaattaaatttaacaattatttatttattttgtaaacaatgaaaatttccataatgcagtccacattgaattaccaggaaaaatttggtcttttgaccgagtcttggcttgatatttttcagccccgttttgttcatcgtccattaaaatattcgtcattttttccttcatttctcgctttttggcattttttttgatgtccaaagcaattcaatttattataaatgtaaatccaattttaactttgaaaataaattattttcttggcattcattgctaattttcttggctcaattaaagcataagtgttataatacgattatttgatgtactttggtatcgactatgtgcgatatggtcatctagtatgtcgtccgtttggctccgaaattggtttacgctttttctctatgtgtctatgcttattcaatgaacactttctctctctctctctctcttctctctgtctctccccctctctctctctcgctttctctctctttcgctctctctctccccctctctctcgctctctctgtttatagtgtgctctttcttttttaatttgtctcattcttctatttttatgctgaacgaataaatctttttccatttccccgtcattttcaaaattgctttatcctgacttttctgtattaaggcaaattttcagtgcaagaattggctcttttgcccccccccccacccccgagttttttcctcgcaattttggcaaaattccgtctggtcgaaggccaagcacacgctcgagacaaggcctaaaaattgaaaggaaattaattataggttctcgagcgtatcggtttgcagctctatgagcttcggtcttttcaaaccgacaccaatggaagaattaataaaaaaataataattattaattggcgagaatctgagttaaataatttgaaaaaataatgcccgcctatttgtccaccttttgggtcaataaaactttcggggggaaagaatgaaacaaaagaaaacaaaggggtctaacaaaagcttaaaaaaggaactaaacacaaattttgacggaaggcaacgcatttttcacatttaaaaataaattaaatatatgagtaagtttgtttttttatcttttaaaaatatttaacgataaaattaattgaaaagctttatatagatcgatagaggagacttttctcaattaataaatcttatttgggatttttatattgtttggctgatttttggccgatttttaaaagttggtggttacgcctgcaaccatgggtaggggcagggttggcgttttaccatggttacatggttaggtatttaaccataaccaccttcttttactacggccccagggggcaaccggaggcaaaatagtgcagcagtcgggacccgcacaatgcattttctggcgcgtgcgggtgactgatggccaccaaaattgcattaattgagagcgaatgcgctggtcaatatgcaagtgatgcgtcgcgtgattggagctcgtccaaccgctacaacacttgcgcatcaaaacattccatgagcaattcctgccaaaattgatcaaggctaattagagtaattaaaattttcaatttatttttttcaattcaattaggaaagaaaacttctaatctatttttcaaaattttttatttaaacattaaaaacaattaattgaatcacgttcttaagaaaaaggacaaatggcctaccaaattaaaattcaaaaagaatttaaaaattcagactaagtcttgagtaggcaaaataggacgaaatattatatactatcattcgacgtctcttagtctataaagtaagaatcaaagggttttatgactcttattccctaatgagtcacagacgcgggactgaactgtccaaaaaaaaagaagaatttcttgacagaaaacacattttttacgcgttcaaccactttttttcattaaatttggtctgtatttttttaaagattttgctttccaaaaatgacaatttttgtgggtttttatgctgaaatttaaggaattttaacagaatagagagaatgcgctatcgggaaaatttttttttttttggattttcttgaattgttaacaaattttgtccaaaaaataatcagcatttcaacaaaaaaaacctgctttaactcgttaaaagcatcaaagtatttttattttatgataaattttagacttttttaaattaaaattttaaaagactcttcttatcattcaatttttagtctttttacgattcaattcgttcaaattagtaaagcagaaatgcaaaaattttagtgataaaatgtttggctgataatttttgctaatgaccatcattaaacccaccatcgcgacccaattacatttgggctactgcttttctctatttgtaaatgttttaattgtagaacagtacaacccaaaagtaacaataataataattattatttattttaacgaaaattaaggagtattttaaaaatatataattatatttattattcgattttgctgatcaagatcctttagccccgggacctaaatgtttcttaaatattaattttcaaaaatttttataaattataatttgaatataggccaaaataggttttgccactgcgcatttggccttatattgtttgcattcggattatccacaattctcatctgtccacccaacacagggggtcactttatcttcgtcacatctgaggtggggggggggggcaaaatggatttttgtgccgctcccccgtccgaagcatccaaacagaaggcctttcgaatttaccattttttggattttgttcaacaaattaaaaaaaaagttatggttgctctaacttggtcggtacggaattgaccccaaccgacccattctaccagttgtgccgccggttttttggcacgaccattccggggggaagagcaatgcaaaattagacattcatgccctcgttaattcagtcaaagatttctgttaaaaaacaaacaaacaacttggcatttaatgattatattatttattcatcatttttcccggagatcttaagatcaaatattggcacaggaaaactaaaaaaattcaaattttcaaaaaattttgtttatttatttactcaaactgtctttgggactcagttgacccccccccccactaaaatcgtgcgcccaatttttcaatttattggccttatgcatgaataatttgtgtgaggtgcaagtggtgatggttgtgactggtggtgacccaacttccgcactgtccatgtcccaccttttctcccctcggtgacacttccgtcctccgtttcctcactcacttccccccccccatttgcgctaaatttcccctctaattaaaggctttgtgtgcacccgtcgaaggcaaaatggaggagatattaccccctccccccggggcacctttacgcttatagcacacacatatcgcaaaggtcaaatgtcaaaaggtcatcggcccgtctccgctggcggcgcgtcccattcggcgcccaactgcttaatggacatggaacgaaacgcaatttctatctatgcttgattttttaaaaattttttttagcatttcccggggtattgcagggagtcgagaaattcttaaacatttaaaaactagccttaccaatgtttttaggaatttttaaacttgcgcttatcagcaagaaaaagcgtatttccctttaggaaacattttttcatacagcaaagtatttcaggtcgtttctataaaaaatcattcccaagggcgatgtatttttggaaataaggacaattttacggtttataagccactctcctaaccaattatgtccttaccattcaaggacggctaatatgcattcagcagcagaaa

SEQ ID NO: 11630 - DNA, 1950 bp, Heterodera glycines
  unsure (1)..(1950): unsure at all n locations
ttttgactacattccagctggagatatttgtatagaaaaagtgaaagcgataaattttntggcgaaaaaatcatacaaatcttattttttattacttacttcaattataaattttgtatatgcaaattgtatattaatattaacatgtgtacaataaatcacgcagaaaattaattaaaaatcactgtcgaaaacacctggtacgcccaaaacaaatccattcctgaaaaatgaaattaactatatttgtagccaaattaatgtttgaagcaattttcgaacagccaacgtgggaatgcgttgaagcgatcatcgccccttctgcgatcggtcagtcagtcccccgggcggagattgtttcgacggaatgcccttctcgcccccgggtccacccattccataccctcactaatttatcattattccattttttatcattccgccgctcttttttatgcgtctccgacactcataaattttacatttccctttcacttgccaattccattctccgcgggaatgataaagtgtcaacctaaacaaacacaaatcaaagccgtacattttatggaagaaatttgtcggacgacggtcattcatttgttgaactggttaaagaaaaaaaagtggggggaggcaacaataaaaacccattctcattaactggagacgagtcacccccaactcatccatacccaactcatccataacgctgcgagtcatcgtcgtggcatggcattttctgcttatgtggtcgtggcatggcattttctgcttatgtggtcttgaccgtggacatttttgattatgccggtcttgaccgtggcattttttggttgtacggtgttagtcgtggcattaaatgccacggcgacgactcgtatcgtgctatggatgagttgggcatggatgagttgggtatggatgagttgggtttggatgagttgggtttaccccgttttattgcatttttgttaaggaattttccaaaaaatgtcgaaatagtgaaaaaatagtgacaaaacgccaaaatagtgaattttcactattttattgacgaagctccaaataaaagcctagaaaataggcactaataactcgaaaagtagcttaacaacagcccaaaaaaacatgtttttagtgcgtttcaggccacgggagctcaggaaaaaataggcttttgtctaaaaatattagccctatttattagctttaaaaagctgttatcggaataaattagttctcttactgtattttttaaacctaatcaattacttcccatgggcaaaccgaactgaaatttttgcaaaacatatcccccctcataaatattaagaacttaacaaataatcggaaaacttgaaaaatttgaggaaattcatgcgagtacaacttttggtgctgataaaaatgtcaattgcaaaacatgatcagataacgttttaagggtgaactgaaaaccaaaaatggctttaattcaggaaatttttggaaaaaaattccaaggggtggaaaaattgttcgcagaaaacgaatacgatgtacagaaagagaacaaaacttgctacaaatcgccttttgttggtgtgtctatgattcatatccgttgaattcggtaagattaaaaaaccgtcaaaatggtcaattccccttggaattcaactgatttgcttagtctaccagcgaaaaacagtctttgttgatccatcggaatgccttcaatgcgatcgactatggctttgatttctaaggtggtgccgcttggaagaacattactgagagtcagtgttttgccggtcaacaatcttacaaagatttgaattccgtgccgtttctgtgcatggaaaaaggaaaatgccatttanaaaatggcacaaaagataacacaccgcagaatttgaatcttcactaattanaatnttactggtattttctggccaattctttttc

SEQ ID NO: 11631 - DNA, 2317 bp, Heterodera glycines
acccccggaattccgatttccgaaaatttttgggacctcggaatgccatccctggagcaatcctgtctttacgtcagttttctgacgtgcttgcagagaagcaaaataagaagtaggtaaatgataagaaagttaagttaggaatctgactccattacgccagaaaagtttcaaaaatttaaatttttttgtcgctgctccgcatagacagacagtgcaatatttcctccttccctccgctaacaaataagggaacgcggaaatagtgcacagtctgcctttctgagaatttgatgaataaataaaaaacatcatttaataaattaacttgatttaaatggggtaaaaagagatacatataacaaggatgtcatcgaaaaatctttgaattcagaacttcgggctcaaaaaatcaggtttttgggttaaaaacagtgttattttataatttgttgttaataaaaaaatagcaattttaacaaaaaataaaatacattaaaaacatattgttgaaatatttttagaaaatattcaaaaataagataatatgtacattatatattttagaattttaacacatataaatcccatcccgttctttcggagaaatgtataatatctatttaaaaagttccatctttatgagtgaatttaaaaccgaaaaaccaatccccccggttttcggtttttggcgcaaaaagccggttttcgttttcggttcgcttatagaccgtgcccaacccttattacaactgtatacaatatagtttatttttaaagatattttctatttttcgttttatttttaactaagcttatagaattaaatatcgaatttttttaaaattatttccttaaaaatattaaatcaaaaaacttttcctattaaattttttattttattttctgtaaatcatcttttattttcttctcgttctcagagagatgagtgttatgttattgcttctgcagcactgcttaatttaataaatcaatgccagggaattttagagatattatgtatattatagatattatttttttgcaaatcatagattgatcaattggatagtgacagtaataaattatttaacagaaaactttttcaatggtattttatttatgatacagacgataaaattattcttttcattaatttaaaataaataaaaatcaatatgaaaatgataacaaagtgttttccttatttaaaatttagaggttaagctcattgaatgttttgatgctgcacatcttcagacttgcggtgtatgtgttgtcaaaatacgcatcgccataaactcggacgcggaaggcgaattgtttgatcgcaacgaatgggatttccaatgttttgatcaaattatcgatggcactgatcagacacttttgcagcattttattggatgcgcgatcattaatccaaatctgaaatttaagtcacatttagtggattaccagcaaaagtcattttatacagtttttagcataaatattggggttgtctgcgactagagaaaggccaaacgtttaatatattttttgcgctgaatcttattaaaattggtgtttaggtatttgacaaaccccatttcaaatttgcgggatcccgtgcaaaaatgcggtaattatggaaatttcgaaaaaatttaaattaaataaaaaagttatcaacaaactaaatataaacaccataaattttttgtgggatggcggcatacatgaaaagggagtggtgggtcaacagatttttcgaaagggtccgggggtttgagagagatgatggtcaaattgttaatgggagcattccataaaatttgatggtttatgttgcttttcacatcacttttttaaccgggaggacaaccgatttgcggtgattatgactccccaaatggctattatggatctttaagaaccaaaacattttcaaaatgtgcaaaaatatgcaaaatccatatgaatcgaccccctaataatcaaaaaagtgagtcacaaattcgtgatcagagctccttttgaccgggttccctttcccgggccatccatcacaaactcccgcccgattcttggtccgatggtaaagctcggccaaatgtgcttccctggtctaaccacgatccgattcgttttctggtgctttcctcctatcgcattgtgcccacctccaactttccaaagatcggtaagtcgatcacatcccacggcttctcctcttccttctcctcctcccacttcgccccctcctccgcttccgcatccaattccttcctccacattgttttgccattggccgtgtcgatttgccacctgagga

SEQ ID NO: 11632 - DNA, 1767 bp, Heterodera glycines
cgtgcgaattgcccacaaaactttgcccctttcgcaaataattctcccaccgatctttgccttcgaagacagcatttttgaaaaggatacgaaatttgcacaataccaactgaaattggactatgaaattgcatatttattttctttctcttacacaaaatgggcactgttctttggcatttatgtgcacgggaaagtcgccacattcgtagccccacaaagtccatttgccaagtgccaattggggagaaggacactttggcacggaaaggggcggcagaaggcttaaggaaaacaaatgattgggattggattgcttaaaaacacacaattggtatcagtttcctacaataatcctttttatgttttgctaaaaagctcgacttatttgagttgcagtttattacattttcatttttgaattatatgaaggtattaaattgtttttaattattttttaaataattattttttttgtttatttcggcacattttcatttatttgctcacccttttctcttttccatttcgttgttctccttttgcgtgtatttgtcaacaatttccttggtactttttgccatgatcaaacggagtcttaaatttgtccagagaatgttaaaattgctttttgcttcttccattacctcgtcccattgtaattgcttttggtgtatttggcaacgatttgctcggaattcatggcacttttttggtcaaaggcaataaaatgtaatttttaataatttgtcccggaataattaaacctaagagagggtttttattaaataatcaaaaacggacctttctaacaaataaaaaataaataaatggattccattaattgcaaaaattattaatcttcagtttcaatttaaagaaaggataagtaaatcttcgcagaatgaagaaatgagatggaaaatgctgattaaacttccaattctgtgaatgtttggcataataaaatatggaaaaaagaatggtcgccaatcgttggccattccatcggcgaagaaacacaaatgaagaaaaaaggacgaaagaaaggatggaccgaccaattgatgaagacgattcagcaaaaccaatggttaaattaaactgtgttcgatttgtttggatgaaaaacgaatttgaaagatttatccttaaatccaaaaagcaaaacttaataggagcataaaatcgaggggtttccagactgaaaatagtgctttgtcataaaaatagagccgaactaataacttgagattttttggaaaggggctcaaaaataggatttctacgtaaaacatttgcaactgcttctgaccggctgatcaacggccgggaattttttgcgaatttttccgaaagtcgaagttgccaatccgggaatgccctccatcatcgcagttgccgttttgcgaatttccgaacacataaaattggcaatatggaatgttctcccataaaataattggatcgaaattcttgtaggtgtttaaataggagtcacaggaaaattgacaaaataattcaaaagaatgatagtccaactattattattattcataacgaatgtgttaattttaatgccattaattatgacgtaagtgaagacaaatgccaacaaaaggtaagtgatgagaaaagtatgaggggcgggggtaataggattagtaaggaccaattatggattatgccaattgtctggctataaatactttaatcaattgccatttgaagcagtccatgagagcagcaaaatttttaaaaggtatc

SEQ ID NO: 11633 - DNA, 1323 bp, Heterodera glycines
ttcaactatttcaattcatgtgtttaaagatatttgtttttataatattttttgctcttcaagccaaaaattttttcttacagaagagtagccattttgaatgtctaacttagccatttggggtcaatattccaaaaaatataaggtaaatgggtctcctgcggtgccgcttacaattagaagattttttgggaattttaatgcgctttttgagaaaattggttaaaattttcgaaaaaagttatgtgccatcaggaaaaaaccattttagggtgttttatgctaatatataatatttttgttaggttaaagacgcgtgttgcgagaacgttgtcggctttgtgccgttgcccaccggtgtcgctggtccgctgtattttgacggaacttttgtccacctgccgttggccaccacggaaggcgcgctggtggccagtgtcagccggggatgtctcagcattaatgtatgagattttttaaggcaaattggggccattttttggattttttgattcggttaaatcctcgcccgaacttttttttgaacgtccactacccgagtcccggagaaaccctgacatttttccccgtcccgaatttgggagtcccgaggccgacatcgacaattttttcaacctacggaaaaaatattttgatttgaggaaattgtattgattattgaaattgcatccctaaaaaattcgaaatttcacccccccccccctcaaaaaacggacactaaattttttttataaataatgctaatatgtgccaggaagccatttccatgttgggcaacaacgcgttcagcgtgcacgtgttccgtgacggaatgagcagggcaccaatcatcgagtttccatgtgtgcgcgattccatgtatgtttcattttgtttaattttccaaaatggtatccaattgtggatttttggaaaaatttagcgtaattttttggtaaatttggatgactaattgtgagatcttggagaggaaaaatcgaaaattttagcaaaaaaacccaatttttcatttttctcgattatttccccccccctttttttacagtgaatgtttgcgctgggtccaacagaatcggacatttgtgcagcttaaacaaatttttgaggagaccagcaagtaaaaaaaaattttattaattttttcaaaaattttccaattagttacgcctgtctgcaacgcattgacgcccatttggagggcacctatttgtatttgcgctttgtcgcctcaaccggcgatgcgatgggcaaaaagatggtgaaccttttttgtcaatttttcttcgaaagttgggacctgca

SEQ ID NO: 11634 - DNA, 1607 bp, Heterodera glycines
tagcaatttgttcgtgaaaaacttaaaaaatcgcccggcgcagaataccctctccaagcgacatttctgggaaagtccctgtgttacacccccgacggtgttttccactcatgtaaatagatcaccttatttttttggggggggggggagggggtcccatttgtgtgggctttatcttttccctaatcggtcccgtttgatggcaaaaaaaaaaattttataattttttcaaacgttgttcagttaaaactttcgaacttattttgttataaattgttggtcttaacatttccttggtggctcagttggttaaaagcaatgcaacttacgcttttcttgtgtaagttcgagcacccgctgctgcgtgtgtgtgtcttaaatttgttgttgcaacgggggaaatgacgaaactgaatccattcgttgagaacggcgttcaaagattaaacagcgattcatgcaatcccgaagttaacgaccgatcccctcgagcaaaaaacattttttcttttttcaagtctttttgactaaaaaaacaatttaattttttggagaatcgcttcgcttaacttttgacaccgaattttttaaacttagaaatttctccaaaaggttcttaaaaaacttttttaaaaaaagatttcatgaaatcttttaaaagttcgaaaaaattgctagaaatttttcaaaatttgtatgccattagatgttgggctgtcgtcgtgccggactgaggccgggacagaatgcggagcgttttgcgcgtttggtgtgcggggcagtgctggccggtgagctgtcattgttggcctcacagtgcacggagggcgacctggagaagagccatctgaggttgaacaggtcagagtttataactgtgtctatttgaaaaatcttccgaaagtatggcctaaaatcgcttaatttttttaaaaatcactcaaaatcgcaaattttggtaatttttaaattttttcttgaaatttcattaaaaattattggaatgggggaaatatggtggacctgtactatatgggtacaccccaaaatctcgccgccgaaatttgaaattttttttcaaacagaaattttttcatggaaaaaagtttagaaaattttttataagaaaatttcaagaaaaaaaaattatttgttgagtttttttgaacattttttgaaaaaactaatttacttttgtactacttggtcatttggcatccttatttttttgcagatcaagcagaagtttggcgttaaacttggccagtggttctggccgaagcaacggcaactcgccacagcacagtggcggtggtggtggtactgctgctggtactgctccgctaccgtacgccccctcctcaccgtaccgttgttgttcatcctcatcatcaccacatcactcttccaccacaacaaataatcatcactaccatcatcatcaccattattgctgcactgccggaggtggcagtggcagtcccgatgcgcgacattccggaacacttaccactgttgccttcttccccacaagtatgcaagagggaacacaccggcggaagcaggacctcccccccctcccctccccccacgtaataatatttttg

SEQ ID NO: 11635 - DNA, 1506 bp, Heterodera glycines
  unsure (1)..(1506): unsure at all n locations
ttgctgttgcaaatgagtaggacttggatttttaaagggcaaaaaacccaaaaataggcacctaaaaaatatttntagattaaaaattcttgccaagaatctgaatttttgagaaaaattttttcatttcttaggagtgtatttttgaaaatttttgcgtcgatttttagggggtgtgtttcccgtttttattgcatttttattgggaaatttttcaaaaaatgtcaaaatagtgacaaaacgccaaagtagtgaattttcactattttagttacaaagcgccaaaatagtgatttctagtgaccgatagtgagatccaaatcgaaaaatttcaacgcaaaaatgcgttttttgagctcctttcttcaaaacaaattgagcaaaaaaattagttaaatcactaaaaatcgcagccctactcattacaaagtcatttcgctcaacaaaaattagcgtcatcagcttctccaatgccaaaccccaactaattaatggagcattggcaaaacattgcccccctccgggcgttttttcatatgaaaacaggtgtgccaccttttatggcattttggtgccaccgcttggcacacagggtgcctatttacgagaatggcaccattatggacgaatttttcgacttatttaaatcacaagacctaacacaaaaataaatatgccaacaaaatggcttctatatatattttttgtactctcgaataaattggttggcatttaaatgggtgagggagggaaggcattttgaatgtcgattttggcctcaggccggattttggctcccggaaaatgcgtaaatgttctctatttgcttgttagatttcgaaaaattttgcttagtttaaaaaaagttatggccaacaaaaaaaaaataataatcaaaaactggttcttccgatttttttgaaattcaatgaaattttttgaaatttagcaggcaaatactcagggctatggaatgatatttagttcattcagttcagtcaactaaggaatgagttatgttactcccgggttttgctaccttcacctcacaaaattttaaaaattcattagggctaggactaggcttgctttgtgacctgggctctctgatcagtgagtgaccttgaaaccccaaaatatgaattttttaaatctttcggggggggggtggcaaaacccggaagtaccggagttatacccaaaaactggaaacttcgaaaatctaatttggcattaaaattcctaatcatgaaaccctcagtttttaatgcatcaaaaaatatgcaagaaaattcagcggaccctcaaaaacatttttttagacttattaaagtaataattgtgccaacaaaatggcttctatatatttttttttgcctttttgaactcattatgtaagtgcccaaaaatttttagttcactaatcgccattctgtgattacggtggattaatgtttcatggccgttaaagggcagattttttttaattttgtttttagacctgca

SEQ ID NO: 11636 - DNA, 2704 bp, Heterodera glycines
agtgaggggaggaaaagtggggacagtgaaagagaagggagggcaaaaaggagcagccgaagcagtagcagaacggagcgacaccgacgacgacggtcatccgccgggtcgtcgaggcggagacggtcacgcgaccgaagtcgagagacaacgacgacgacggacaagggcaaagaggaggagagcagagcgcgtaaaaacgtgggttaccatcagcaaaatacctattttgttggacctgttattgaccgggttctatttttgtttcgtttttttaaataggaaaattctggaatgacaatcaaaaaaaaaatccataaagtacgcaattttttcaattgtaatgcaaccgcggtgttcatttgagatcaattcgtttctcaccccctcgacccaaaaaatcagaattttcattttattttgtagggttccgctagttccgccacccaatcgcaagcggcgccaccgaagaagctgactgctgaagagttggaggaacggcgacgcgccatgttgacaaatgcctcatggcgagacgatatgcgtgagcggaatctgcgcgatgcggccgacaaattgagaaaggaacaggacgagatggccaataaccgaggtggcgccggatttatgcggttggttgaccggcacactgactatataccagggaatgggagataatcgccaaaaaagtcgcaaatgattcgtgatgttgcccgccgatgttcaatcctaatttaattgtatagttaaaaaaatattgtaaatctatacaatttggagcatttccagattttttgtcgggaaatttttgcgttacaattttataaattgcatctggcaaaaaaaatatttagtgaatatgtattcattttgtttattaagtccaatgatgaacaccgcaactgaagacgcgtccattgagaaacgcttacaaagcaatcggatgaacattcaacgccaacatgatcacatggacaagtcattcgtcagaaaatgatatgattgccattgccgatttcgacacacttgtttttatttttaatgaatttttttacccatttctttctcctctttttgaaaattactgaaagttttaaattcacaattataaatgttttttcttgtttattgttcttctgtaaaattgttttttgctttgttttgtcgcgtcagaccacatcagttgcttatccgaaatggacgaagtaagtaatttattttttcgcaaaactatttagcgaatttatatgagaaattaatagaattttgcgtcgtacgtactttgacaaccccctcatcaaaaaattgctctaaaatgaaaggaatgacgtatccataatttgcgccccctaaaatccctggacatggcattttacacgacacttaaaaatcattttatcgtttgaaaaactgcgaggagataaagcacagtattaccaaattttgtttcaggaatcttctacaccaccactggaaacagataatggacagtgcgaaatgtgtgcaaattatgaagtgtgtactgcttcatctgcgccttcaatgaataacatttttttggttgctttttaggtgtctcttcaaacattgcaaaccgcgcaagacacactccgggtaaacaaattagtgttttgtcaattctcatgagataaacttttatttagaactaacaattgatatcatgaatatgaatggggtttttagtggcaaaaaattacaaataattaacaaaaatttgaagaatttctaagtgattatgtaattttacgtttttttcaggaacaattggcagcagcaaaaggtttttgctattcgtttaatagttccccttttcaaatgtttctaaatttccccccccccccccgtagaattgtacgaaaaatatgggaaggaattgtcggaagagcggctctatcgtaaagaattggaaggccgttttgctgcacttaacgatgaaattgaacagaaaattcaggcaaacttgtgctttttaaaaaatatttttatttgttgttttttttgtcacagatttttatggacagtgtgaatcggtcagaagaacgggttgcattgttggccaagaaacaggagaccgacttggccgacatgggccacgaattggacgtggccaaggagcagcaaacagcactgcagacggagttgaagacgctctacgaaaagtgggacaaaaattttaaaaaatgcggacaaaatttgtgtcataaaaaacccactcttttaggtatcaacgaatgttgcacaaaaatgcacaaaaggcggacgaaatgcgtgaacagtgcattgatttgccccaaactgttgacgaactgacactgttggcactgcaattgcgcgaagatttggtgagtgagtgagtgtatgtcagtataggatgcactatgcttccccccctgccttttgaaacaattttaaatgttttatggaaaaattttaaaaaaatctttaaaaattccaacaattttttgtaatttctaaatttattgaaaattttctaaaaattctcattctatgcatgcccttcagatcagcgagaaagcgagtcgagaacacgagtgccaagagttgcgtgacgagttgaccgttgcccgtgaacaaatgcttgaaagtgaacagcagttgctcatctacgcccagcatgcacaacagcaacaagaccacatggagcagttgctgcaccaacacc

SEQ ID NO: 11637 - DNA, 1347 bp, Heterodera glycines
aagaatgggaaggccgtttgctgcactaagcgatgaaatgaccagaaaatccaggcaaaattgtgcccttttaaaatattttatatttgttgttgttttttttgtcccagatttttatggacaatgtgaatcggtcagaagaacgggttgcattgttggccaagaaacaggagaccgacttggccgacatgggccacgaattggacgtggccatggagcagcaaacagcactgcagaccgagttgaagacgctctacgaaaagtgggacaaaaatttttaaaaatgcggacaaaatttgtgtcataaaaaacccactcttttaggtatcaacgaatgttgcacaaaaatgcacaaaaggcggacgaaatgcgtgaacagtgcattgatttgccccaaactgttgacgaactgacactgttggcactgcaattgcgcgaagatttggtgagtgagtgtatgtattaaaaattctcattctatgcatgcccttcagatcagcgagaaagcgagtcgagaacacgagtgccaagagttgcgtgacgagttgaccgttgcccgtgaacaaatgcttgaaagtgaacagcagttgctcatctacgcccagcatgcacaacagcagcaagaccacatggagcagttgctgcaccaacaccgaatcagcgtgggcgaggagggcggcggcgccgccggtggtgaaactggtggaaacagtggtggcagccgaagacaacgagcaggaggacaaccggacatggtcatcatttcttttggacaaaagactgacattgggcacatttttaaccaaccatgcaactcaagcccctctttcgagaatgggcaaattccctcttttgaggccctttaaacaaaatttcgagaaaatttctaaatttaaaattctaattttgtttagcatccatcaaacgctgttgtccgttctccgcgagagcagcgacgacagcaacaacaacaaactccaacagttgtggaagttggcgatgccgactgctgttgtccggatgcgaaatgccacgaacagactgttgagcttgaacgtcgactgcaccggtcgatgaatgaacgggcgcaactgcaggaactgttgattgaacagcggaacaaatgcagccaaatgcagtccgagttggacacttcggaagcagtacagaaaggtaggtactgtttgtggtggtgcactttcccatctgatagttgggcacaaaaaatggtctattttttgtacagattttgtgcgcctcagccaaaacttgcaaatggaattggagaaaattcgacaatccgaatgtgaggtctgccaacgtttgaccgtaaaattgccacaaaaa

SEQ ID NO: 11638 - DNA, 5611 bp, Heterodera glycines
atttgcgcaaccatcggacaaagcaggagaagaatttggacgaaattgacaaactgaaggtgtgttgcgttgttttgtggacatttttaggggagttaaaaaaatctttttgtaaattgtaatttaaattataatttagaggagagaaatgcgttgccaatatttttttataaccatttaattttttagaatccttaatattggcacagggaagggcggcttgtatgttcagattagcaacaatttaaaaaaaatgattttatttttcccactctttgggcggggggggggggggggggtcgaacgcagaaaaattgcaaatttaacagtttgattcgctgtcatgacgaaccaccacccctctgacccctctaagattttacctggagaaaatcctgcaaatgctagcaatttgttgagaaaaattaatacaattcaacaaaaatgctccaaatttttcattagcataggcttgcttgggcctaggtaaattttcgtttaaatatttaatatggagagagaaatgcatgcggatattttatttaacgagtcatttaattgtttcatttgttgagaaattttgtataaattcaaaaaatgcttcagcaatacctgaagatggcggatttacgcacttgaaaaatcacagaaaaaacgcattttaaattttggggctttctcctttcaataaaattgctccatattttatttcatccatttttttgtttcagcaaaaaattgacagcggcgagttggccaagccggaacagacgcagttggacaaattggcacgacggggcgagttggagcgtgacattgagcagctgaacgaacagttggccaaattatgacgacgacgacaaaaaaaaaacaaaataaaaaatatcactaaaattggatattttgttgtttttcgctgtttttacggaaggcctttctttttccaatttttggaaaaatttgtataatgtaaaaattttcaatttgaaaacctctcattttaagtatatgccaaaaggagaaatgttacagtttttaatgcgatttgtaacagattatcctaaaatgaaccaaacttttgaaattttgagccaattttttaaaagtaggcgcaacggggaaggaatttgggtttttaatgatttgatttagctaaattttttagaaattttcctcttcaccggcaccccctccccactgtttatcttcttctacctctctctgctgttcttttccattcgtttttcatcaataccaaaaagacaacacaatttcttattttttgaaaaattagaaattcgttgaaaaattttattttacaaaacccaaatttacttgggtgaaaaattccccccccccccccccctcgtccattctttttcttttacgccgtcaatgagcagaattgttgtctaaaaatgactatggcatttgtatttttatctgctatttttcattgtttttattttgtacaataaaaacaaattaaataatttgcaaattattgaaaattatttaataaaaaaagtaattttttcttaaataaagaaaaaaatatttaaaattagatttttgtcgtggaaatgcagaattcaaaatgttaataattaaacattaatgatttttaaaaaaagatggaaagggagggagagaaaaagagagtgagagtggctgatagagaaaaagcggagaacatgagaagataagagaaaaagagagagaaaatgggcaacagagaaaggggagtggcgagagagagagagagaaaaaaggtctatcagggggcaaaggaaaagatagagagagagaaagacaagttataaaagaataaaggggtagcagaaagagaaggaaatagtgtgaaggaataagaggagacaaaaatagagagacaccagaaatggttaaagagtggagtgaagcggatggttagagagagaaaatgaagggattaacgagggagggggagagaaaaaaggcattgtgactcattgccattcgctcattcacttcaccacaattttcactcgcctctgaccgaccgcagtagatgaacatcctttcaaaagcacaccaattctctcctttcttaaatatttacccattttccactctcaatacatttgatggcacttttatgtataactacatacatatattatgcttcttattctttaaatggcatttttaaaaccaaagctcttacatttttttgatgataccattacacccttaagaaaatgaaatttttgtttataattcatagagctttaaagagaattgaatgggcttcaaaatgagtataaaaagattaaaatcggttttctggtttatgagatattagaaattttaaactggtgcaagacttatttgtcaccctgtatttgaatttttttaaaacttttccaaatgctcatttccaaggacgtccttggcatccaaggacgaatgggagcctgcagtatttttgacgaaaattttcaattttacttattgatatcccctccaaaactcccctcacccaatttcccaaaaaattctttacattttccaaaaacagttgaaaattgttaaaaaatggtaaaatttcaaaaatttccccagcagcgcctgtcggcaccgccggaatcctcctgctccccaaaaattaacaaaaaaaagcgtgtcgcagaaaaggagtgaaaagcaaaaaaaaaaaaaaggtcgtccgtcaccagtggcggtgccccctcgaagccctaggccgaaattccctgggcggtcagtagggctgggaatttaagtcaaataatttttttttgttgcctttaaatgaccttaaaatgactcaaaagtgttctacactttgtttgaagcttcttcattttttggtgactttttttttgacttttttaaactttttgggttttttatgattgaagaaaattccgaaaaatgagtctatcttcgggaagttactgaaatttcttataccattaggattcaaataaagggattgaaaaataaaataaaaatctggcggtgtaacaattttgaaatatttttatttcgctaaaactaattggttttaaattacttttttgtgttactttttggctatttttccatttgtgccatccctttttccctccaattgttcccattgtgtcgtctctatttttccccttcggggggtttaattacccaagtttgagcctaatgataaattggattatttctgcgcactgctccttgggtctttatttcaacaacttgctctgaatactctgatatcctctcgccccgacccccaacaaaaaaccatttagtaataggtaaaatctttcctaaactgttaagcttttaaatgatataatatgcgaaaaaaatacctatatttatttttacaattttagcaaaaaaaattctctaaaatggctaatttcttcatcattccccgtcgaaaaacaattcaacttttattgtttattattttatttaaaataacgcttcaacaaggtgatttaattttttgtttttggcattatcatttttatcatatgacattctgtaaaattctttacaaataaaacaccaaattttttgcttaaactttgacgaaatttttaaaaataattttattgaaaataaaaaaaatccaaagaaaactaaagaaaaaaataaaatggtttttttaaagacaaattttcttttatttcaaaagtttatttgatttctattttagactcgctcattgaaactaaacaattggttgaccaagcaaaaagtttgtttaaccaagtaaacgagggaaaatttgatgccgattcgtccattgaatggatacagaaaaatgcgattggcattttgtctaatagcgaatttgaatcaaaaatggatgaaagtttgaaaaaattgcaaaatgaattctgtgattcattggaaaatggcaattatcaaaaaatgatgaaaatatttcaaacgacaaaaattgagaaaaaaacatttgacaaaaggcaaatggacaaagccatagcaaaagatcaaattaacaagggcaaaaacaagcaaatgtttaaacaactatttaacaattctagcaagattcttgaaattcatgaagatttaattgaaggtaaataataattaaaattttaaatataaaaaaaatccaatttatcgtactcaattgtttcgtaaatcaaaattcgttgaatatttggcacaaagtgtcaattataagttaaaattgaaaaattcaaatattacgcttaggtaaaatggctaaaaaattcaaagatgttcaaattttttgttttcagcagaaaggcttgccgtgcgccaacaacaaatgccaaacggttttatgggcagaagaaaaaagcgtgcccgcgacagtgcaattaagggctgtgtcactgcagtgcttttaacattaatctctgctccatatttgggttattattctaacaaatatgccaacgagggcaatgtcatggttcaagtcaatagatgtaaaaagaggtttaatgtccgacattgttaccaagtccagcagtcggttgtcacgcagatttttgagtggacaattctattagccattggactaatctgtgcactgatattttgttcttgtgtccgttgatcatctaattattgtatgattacaattacggtacatatgactttggcaattggtttttgttttttttttgctaaatttttatggctataagtttttttacaaaaattttaaacatcaaaaagatatgatcaaaattatatttagacttttcattttcagattttttttcatagcgaaaaacaaaagtttatataatttacaaaatttcattttccgaattgaaacatttgtttaaggatttctctattctgtgcttcttctttatcaatctccatttatcacaggcttttatcttttccctcttttatctgaaatcctttttattttcattaaaaaattcggtggttactcgtcaataatagggttgctccccgacccctctgggggcaaaatgtcgggggccgggaaccttcggggggcacaagtcgggggtcggggacctcgatcgagtagtgatcaacaaaattttttaacgaaaaaactaatttttctttttaaatgctcgtaaatcttcccttttttctctttaattttctgattcaaattcattcgttcgcgccattaaaagtgcgtccgatttggcattttataataaggcatcctaggcaggggtgggcgaagctcggcttagtactcgaagccgaagctcgaatcgaagcccaacttttttcgaagcacgaagctcgaagttcgaagcccaaaaaacgcgaagttttcgaagctctaagcacgaagtttttgaaaaaatgattttaccctaacaaaactttttttcaaaaaattttcgtgttcactaaaaattaattaaactataatttaaaaaattataatttatgcttttcctaataatttttcattttttgattttgattatggctaccaactgaaaattttcaaaatcatcatttggccggtaaaaaatcagcattttggtaaattttattccaggtttaaaaactcaataaaacgtttttgcggcgcgctttt

SEQ ID NO: 11639 - DNA, 1970 bp, Heterodera glycines
  unsure (1)..(1970): unsure at all n locations
atctcaatgttatcactataatacgttggtatgaaatgaccaaantacgggntaaggaaacgtgtaaaggaaatggtggtaaggaaacggttggtaaggaaacgtttggtaaggaaacggtggtaaggaaacggtggtaaggaaacggtggtaaggaaatgagtcgatcccttcaaaaagggttttagaacggtacacctcagttgggccccggcacccataacttttttctttgtcagtcaaatctaacaattttggtatcattcgagagccctcagatgctctattaacctgcaaaaatccaaaaaatttcgtcaattttgaacaaatttattgccaaaaaagttggaaaatctggttttttgaattcttttggccataaccggtccttatggatgcatttttattgcatttttggtaggaaattttttgaaaaatgccgtaataggggcggaattccaaagtgccaaaatagggattcctagggacagatagggctttaaagggaagaattttcgcgctaaatatgtattattcgtttttttctcattgaattaagccgaagaaaaaataaataaaacctaagaatacgtttcctaatgatgatgacctttaattttcaaaataaaaatgggaaaaattttttgaaaaaatataccaattctaaaaaatttatcaaaaatttcaaaattagactcaaaaatcgcaacttttaaaaatttgttaaaagtcggccataaattcgataatttttccggtgcgcttaaccctacccttccgaaaattttggaaaatcctggcgaaaaaagaagagactgaagagcaaaaaataaaaaggtcttcgcacctttgttcgatttaggtttgagaccgaagtctgagactcttttgagggataaaccatcatgacattattattatctttcaaaaatgataaatataatctttttacaaaattacgatacaaaaataaatatatatatttttttggtatttttaatgcattttggcattgatcaaattctttgccatctttctttacatcataatcaatcttctttctcattcttccttctccagccatgctcagaaaatagctaaaattttgtttttaatattttgaattatttagaatatatatatatatattttggaaaataaatgcttaaaagcatggaacatgaacaaaagtaaaaaaagcaaataattttgcttaaaatgttttagttccgaaatttttagaattaagggaaattttaaaattttcaagttaatgaggccatcccccactgaatttcgcataattgccatgtttttcgcggcattcttttaccggcattgtggtggccccgcattgtcagcagcagcacagcgttgccaatgatgacaatgatcagtttggcactggcggtgccaatggccgtcatcggcatggcgccggtggcaccattgatcggcatgctctcgatgtgaatgttcaacgtggtagggctcttctccaacttcttcaattcagtgttgctgttgcagctgtcacgatcattgcattttttgcattcccatctgctgcctgttttgtccgcgcaaatccccttgaattcatcaatgcagtcgtttgccttattacgacatccggtgatacggaaccgatcggcaccatccgctgtgattaatgcaaaattaatttttagttttatttatttttgaaattttctaccgtattttttacaatagaagaggcctgtggcctcctctgctgcctaccccaactacccagccgtccaaaaaaaattgtgaaattttcccaagaaaaaaaggtgctaggtcgtttcgtaaaaaaactgcctccgtcataattcgtaaacacaaccaaattaaataatcttgatatcatacgatagcttttggcttgtcctgtaatgcataaaaatttcagaaattttcattttagttttctgaaagttctgacc

SEQ ID NO: 11640 - DNA, 2357 bp, Heterodera glycines
aattaccgtacgacagatggacaaccgtgccaaggatgagcagttggagaacgattgaggcgacagtggtggccattgatgagatcggatgagtgggacggaagggattgaggaggattagaagaatgaacaagagaattagctaaatatttttaaatggaacatgaacacatcagttggatgattgggcccaattatgaccgtaatttgccaaattacggtagtcctacaaaaaacatttgaaggaacatctcagaaatgtatttttaaaaaaccgtttatttcgaatataatttatttcaaaaattttctgttttccaaaaagtctttttagatttactcaagagttagtgttgggactgggccgggaactccaggcgctacgaaaaatccaagcccagtctcggcttttctggtcataattttactaaatgtcgagtagtttatggtacgtggtctgcaaaatgattgcttggaactgatttctgggggcccatcaacggctatttatgcggccattttgggggcggagttttcgctgctaacgccgacaatccgtccgcccatcgttcgttcgtccgtccgttagccgaaggtccgccccaattgcccagcagcagaaattggctttagcattgtgccaaaagtggtgaatcattcattcattttgcccattttgtccatttttccaccaatttttgtacacttccgcccattcgctgctcattttgttagcatcgtttttctgttttcacagtttttctgctgttaatgatgattcattcatcatccaaccacataatttgtccatcaaaagcagtgaaaacgtaaaaaattaactgttctttcccaacgataaacggaaatggcagcaaaaaatgaaaaagaaaaagcgaataaattaacaaaacgaatttataaaaataatttaaataaatgatgatttatggtaatgggtataaaattgtgaaataattttaaccaattggacattaaaaaacgaattttgtatgtaaaaacaatgttaaacaaataaatattttaaatataatccagacataccgtaaatccgctatttgaatgcccctctctggtagaatgccccctccaattaaatgccctatttcggaaatccaacaatacaatgcccctctctggtagaatgcccctctccaataaaatgcccccctccaggagggatcgagtatatccgcagggattctggggctttgtcgatgccgaaagcgaaatctgattacagattcgttatcaacaccctaaaatacctctaaaaagtatttttcagctaaatttgggtgaaaaaatttttcccactcagaaaccatgtggtcccccctttggtcccaaattcccaaatcaattttatttttctaatcttttccaaaaaaatagtagaaatatgaaataaatacagttctatagagcaaaaaattgcgggttttttgagtatattaattttcgaaaacatcctttaagaaccgagttctgattttttgtctgaaaattcgaatttttccagaatttctggaaaaaatttttcattttgatgatagaaatttaaaataaattcataaaattctccttatttttctctatttttaaagctttattgtacttaaattgatccactttgaaatgagttatgaattttcaaatacgagtccaaattcccgagggccaaaatgaaaaattttcgaaattttttaaaaattcaaaaatttgtaaaacgtaaaataatactcatattcatgctctgcactataaaaccggttagaaaaatggttttcacccctttttgactcgcaaaaaaaatttccgagatttgaggggttgaacaatacagtgcccctctctggtaaaataccccatccaaggtaaatgccataattataacaagttgaacaaaagaatgccaagacattttaaagccccaggaattcctaaaaaataattttaaaaattagaattcacttcctttcgattaagacttgaaaaaggccgctcatacgtggttcggaggggtgatttttcttaagtgtaatttatccctgatgagatgatatgattaatttgaacatgcatatgacaatatatgtgataaatcatatgccgcagattatcatacgatttaattgcacagtgcctacaactaaaccataattttattttaatgataagtgttttgattaagtttttacgtgttttccacttaaaatgcgttcataaaaatttttttaattgcctatttaatgcaggtgcgatttttttcttcctttttaagtgcctatttcgtgtaaggttgtgcctaaaaacgcatccctaaaacagcttttcca

SEQ ID NO: 11641 - DNA, 1687 bp, Heterodera glycines
  unsure (1)..(1687): unsure at all n locations
cagtgctgggtccaggcggtccgggcgtttcagtgctgggtccaggcggtccgggtgtttcagtgctgggtccaggcggtccgggtgtttcagtgctgggtccaggcggtccgggcgtttcagtgctgggtccaggcggtccgggcgtttcagtgctgggtccaggcggtccgggtgtttcagtgctgggtccaggcggtccgggtgtttcagtgctgggtccaggcggtccgggtgtttcagtgctgggtcctggcggtccgggcgtttcagtgctgggtcctggcggtccgggcgtttcagtgctgggtccaggcggtccgggtgtttcagtgctgggttcaggcggtccaggtgtttcagtgctgggtccaggcggtccgggcgtttcagtgctcggagttcctggtccctcagatggtgttgatgtgcttgattcgggtccgggtgtttcagtgctgggtccaggcggtccgggcgtttcagtgctgggtccaggcggtccgggcgtttcactgctcggagtttctggctcctcagatggtgttgatgtgcttgattccggtcctggcgtcgatgttgatcctgttcctggcacttcatatggtgttgtcgtgtaacattctttgcatccacatggacaagttaccggaggacatgctaaattttcttttacattttatctttctgataaatttttaacccgttgttgttggcggaggataatagcctgttactattccaatgatggcaatacaaagaaaaagagacactaacttccaacccatcttcgatggaactaaaaaaaataattaattttatttttattaaataatttttaattcaaattatgattttttcttctctccgtcctgtttttatatacaaaattttatccttttaaatccgtctcccttctcccatttaccactgattaatcattgaaataaatggaattgaaaaagagttggcaaattcacgaaaaattcaagtgataatacatatgtccaaatggcaccactttgatgattaacgattgtcccttgggcgtcgcaaacattcgttttaaaatgtcagacgctaagccacgacaaattaaattgccattcttgagaagtttgagcattttgttatgacaaaggtttgtttggctattgcccccccccccccccctcaaaaacgctctgattcaaatgctttgggagtgtttaataacattttgtttttggctgaaggagacaatgtttctttctgtcactgtttgtaattggtagaagttgaatgtttgtcttaaaatgcacaaaaacaaaatgtctaaatataaaagatttttaaaattcctctctgaattctgtcattcgcgcagaaatttgactaaataaaaatattttgatttctatttagttttttacttttaaaagagcacaaaaaattaataatttttgtttttgtcaatttgaacagctaagctacagattagcataaaaaaatacaaagagatttttttgaaaaaagtcaaataaaaatttaaaatatatactatttgtgccatttttagagcccggtaaaaataatttgcgggagtccgaagtcttacgggagcgagaatcccgtaaaactgccgtcccgtaaaaattcctttatttatagcggggagtcccngggcgggagcgggagtaattcgaaa

SEQ ID NO: 11642 - DNA, 1260 bp, Heterodera glycines
cttttttatcgtttggaagttcttcacagcactgtcatcgcaatcagtggtaatatcccttcacaatagcgaccaaaccatcctggaaaatcaatgttttcgcttcatgaaatcgctttttcttacaattataaattgggttaaataaatatcatttgcataatgtcaaaatacgacgattttttaaatgtagctttttattgtataacaaacattacatattctcttataatcaaaaattgaaagaggggctgtccagcggattctcccatccccggaatttttctcgcgatgggccttaccttataagcgccagagcagtcgctagcgatggcattttccagtgaagtgccgtacatattttgatatgcctggcgaatgtcggccaagtcgacttcggagcgggtgacgacgaggcgaatctgtgaaaggtgcaaaaagctagcattttatataatttgtataaatttggagcattcgcttatccgttcgtccatttccttaccaaatcggtgtcgcgggtgccaatgccctaacaatgaaaaattaaagtaacaattgaaaattaataagtgccttcatcgaattgtggagaagctcagcgaaatatgaggcacggttgcgaatactcttcaccaaagccaaattggcatcacgaatgtcaccgcttaaaaaggaaaataaaatttaccaaaataaaatcccaaaaaactcgtagatgataacaagtgaaccgctcaatttgaactcacctaaactcgttgctaattgcctgttcaatggaatggccatgctgtcgttggtattcgtcaaagaccttcaaaacaacgggcgtcaaaaacaaaccaagacaaaaaacaccatgcgaagctgcgcaaagttctgcaccgccaaaatagagttgaaggcgatttcgtcggtgccgaggcgtgcctcaccggcgcgccacaatcgctgggcatcctaagaagggaagcaaagttcagtgaagggtcagtcagtcaacaaattgaaaaccaatttcttctaatttattaaaagccggcactttgtacttgataaggcatatttttattgcgataaagaaaagtttcggtacaattggaaaaatttgaattttggccagaagaaaagcattaaaataaaacgatgtttcgtaaaattactaggctattgaggcgaattgagaaacgaccaaaaatggaaaatcgaattataaaagcaaaaatttaaaaaaattcataaattaattactaagtg

SEQ ID NO: 11643 - DNA, 2761 bp, Heterodera glycines
gggagggggcttttccttccgccaaactccccccacccccgaggcaaaaaatagtttccatttgttttgttcgtgctctgccccaaccgatcggtgcctgcggcggacggacgacggatcaatggacgggcggccaacgccgccgagagaaatggccgacgcccgccgccgttgggcgggggctccgtgagttgcgtcaacaaaaaaaaattggcttcaaacaacggctcaaaaaccaaaacataaataaaaatgtggctcaaaggcattaaatattccgccggcaattcgaaatttatttgcccatttcattttcaaatgccgacatctgcctgcacttcaaatttctgaccatttggagaatggatttgcttttcttttatggatcttttctgactttttaatcacaattcttccatttgcggatgaatttatttgtttggcacttatttcagtttgggattagtagggcgccaatcccggattttattttttgggagcggatggagaatcccggaccagagcttttggccagtgtcctggcccaagatatttgccaaaacttttactgattttgtggaatttgctacctttggcatttaaacgggaattataaaatagatttttgattaagctcattaattaatttgtacagaataataacactgattaacaatcactccgtctgatcactgccaaactcagcgccgtcgttcatcgtcagatcgccgcgtgtgaatcgctgctacactgccatctgactttgtcccgcctcaacattttggcaattggcacccccaattaatcactttgtgccaacggatggtgccgccccgtcctcccttttggtggtgccattccgctctccttttcctccttctgctccatttttcttcatcgttcaccaaaacgcatgggaacaatggcattgtgccaacaacagaaggcgatgatggcattggcattttggagttgcatcatttgctggacattggccaaccgttgggcatcgttttggccacttggccaaatcagtcgttatctcgcgcgccgactgacattggcatgcaggcggcgatgcgcagcctaaggcgcatggaaagggaaacactgctgctgatcagtagtggcataggcggaatggcaccgatcggaagcggcagaaggcggagaaaggtcaaaagtgagtagagggggagagaaagagagggagaaagagtgcgcgagagagagagagaggtatagagagaaacagagagagagagagaaataaagaaatagagagagagagagatgagaggagggaatgaccagcagaaaaatgagaaaagcatcaatggcaaagtagtgtgtttgttatcaacggagccaatcagacaatgagagagtgcccttttgccagaattgagggccgccgcccctcaggggcggaacattatggtgctggaggcgacaagcccaaacgccaccaacgggggccgctgcatcatcagcgcggaccaagcggtgcacttctgcggatttgaggaggaaggttgggaacagagtgttctttgctctttgttcgtgccgtgccgtgacttgcgctttttttaaattttgttgtgccatcgaccaacacatcactgatccttttgttttggtgtctttggtgtcattattgatcagttaggctttttcttcccgatgactcatcaacgaaaatctcgagcagtaattagcaaaatgaatgagaaatatatgatggaagtaagcaaaacagctatggtattcgggacataaaatttttattaataagtttgacattgcactttcctaatttggccttttccatcgagtggtaattaattagcagttaattgtccttcccacaatccgtgataattttcaatatatgtttggatgtttttgctgtgaattttaatcacattgacattaaacagaagcaggatcaaattgtgcctaatttcagttaatgagccgccaattccgccgcctttcgacggaatttgcatgcaaagtgcgcgaagcgggcgagtgatctgttacccgaaatacgaagttggtggccttgatcagacaaactgatcagtgtattgccttgggcatatcctttatcattgatctcatctgactcggtctaaaaatttaatcaaatttcgggacttggacaccacttgtacggacgcagcttcgatcaacgaacgctcgggacttgtggcaccgccggtgattgcgcatgccaagtgatcggaagagaaatattttttgatcgcattgatcatcactttcagtgttcgaacgatggcatttgtgccgcccgataatttgcagagattgattcgacattactaccgaagatacggaaaaaaagcgtacccaaaaaacgagacggacaaaatcgccatgtaataataattaattcaattaatcgagactattcaaaaagcattctatttttgtcctaacaaaattttgagtagttgactcaaaattctacggtattccattttcggaaattatcaacttaattaatcaccagaaaataattttgaatcgaacttctcggtgaagaacacggccctttctgttcgtgaagtacggctgcgacgcgggctacgaaatggtggacgaggcggacacaatgttttgccgcaagggccaatgggtgcaaacggcacccatctgccggggccaaggcctttgcgaaatggacaacggcggctgctcccactcgtgcatttcattctcacacaatgca

SEQ ID NO: 11644 - DNA, 1388 bp, Heterodera glycines
  unsure (1)..(1388): unsure at all n locations
ctctagagtccttaattaatcaccagaaaataattttgaatcgaactccttaatgaagaaacggccctttctggtcgngaagnacggccttgacgcgggcaacgaaagggnggacgaggcggacacaaggnnnngccgcaagggccaaggggagcaaacggcacccagcagccggggccaaggccanggcgaaaaggacaacggcggcggcacccacncgngcannncanacncacacaaggcaacggncagaacaaaggcaaannngggcggcancagaagaagccggcaaaaacacgccaannngnngancganangcancgnccaaaaccacgcgcaannaagncacaaannaancangcaaangaagcnnnaancagcnaanaacgngaaccaannaggcnaannnccaanaanangncaccaaanacggncgggacaagagnnaaggngcgaannagcaaaaagcaaaaccgaaggagcaacagcagaagaagcatttattacgggtgttttaaggtggagtgccgttgccccaaggggatggtattggagccggaccggaaaacgtgcttgaagccagtgccgaagaatctgtgccgaaaagtttgtaacaatcaaagggatcaatggcgatcaatttagctattaatttgattggggattgggactgatcacactgccccccccccattggttcggcatttgtcctcatcaatttcagctcgccggctgcacatgcgcatccattgatgatcatcaatattcttgcgcgtgtccctctccgactgatcgctgtcttttgatgcggggccaacccaaaatttacttgtcccctccgccggactatcaggtcaaaaacaagtgccattctactgacattggtccaagaaatttaaatagcataaaaaaccgaaaagcagaaaattaaatggtcgaaatggggggggggggggggaacggccccaaccgaagattgcggcctaaatagtcaattaaagtcactaattggactaggtggagcctggcggcaacttgaacatcagctgtgccgcggtagccttcccatttccgcaaatcttttgggagaagggcgccgacgcgccgcagacaaacggcgcaaatggcggcgccggcgccggattggtcaaaagtgagcaggtgctgatcatcaaagaggtgagcaacatttctgatcaccgatcaggcagaatgatcggtcgttctaatttcttgcagattggaagccatccattgcctgccggttctcggcacagcaaagcactaatagggtgtttgactcacttcaaaaaataattcattacccaaaagttttttacaaccacttattgccaatctaatgtcttgcagatttaaagccatccat

SEQ ID NO: 11645 - DNA, 1470 bp, Heterodera glycines
atcaaaagtgagccaccacaatgaaattagttaattgtgatgggataaaagatcaggtgatactgaaccgagaaagtctcaaattttcaggagtagggacagaatttggaatttcgaggattcgggatttttcgtttgacgatcagaggcggaaaaaagcctaaaaacgatgggaaattggcgacgaattcaagaagttttatttcaaagtgtacaaactcaatgatcaggctggccccacgagaatgtcagtgagccgcatcggctgcacacactgcgcggtctgtcccccgacacaacttacaccgtccgaatccgtgcccacgactcgatgggtcccggcaaactgtccaacccggtgtccgtccatacgcttccgcccgccaaacggccgcttctcgcaattccggaaggcaatgagttgcgcgtgccgccaaaagtgccatttgccatcaactgcaacctgagcaggggtgacccaatcccacaggtgggaatttgtggaggcgaggagggaaagaaataagaggcacataggacaaaagacacaaaatattgggggggggggacaaagtatcaaactgaaaaagacaaatgactcaaataatgtgtcacttgtccagatgcattgggagtccaacggacggccaattcgacctgcgcaagacagcaaacacattgcattgcaacacattgggctgttggtgagtagggcagccaatatgcaaaagcggacaattgatcaaataatggacaattgatcaaataatggaaaattgatcaactaatgacaattggactgaaattaactggcaaattgacgattccctttttagtcattttgattttttgtgtttagatgacaacagagtttcaatgtgtggcagagaatgaggcgggacgaacggtgcaaaaagtgttggttacggtcagtgagttactgtattgtatttgtgtaccatacgtaatatttgcgtttatttgaccaatgagtgcacagaaaatgtgtcatttttgtgcaggtgacaggcccatcccaacctgagcaaattcgttaccacgtggacggaataacggtcattttgcaatgggacgagccaaagtaagagcaaaaaaaaaaaatcccgaggtttggggtggggtcgagacgactcgagactctaattctcgaccgatctcggggaaaattttgtcgaaaaccgcaagattgccattaataaaggggctattgtcgggattttgactatactcggggcttcgagctaagagaggttacaaataagctgttatcttcctagtccataagaagtggtgatctgttcaatcactctcgagtgttttctccgcgtgatctcgaccaacccttttcccactccgtgtgctgattagcagcttttcgtatttgcacttaacgttttgttaaggatcaccaacggtccgatggccgactacgaagtgttttacactgat

SEQ ID NO: 11646 - DNA, 2237 bp, Heterodera glycines
  unsure (1)..(2237): unsure at all n locations
aaagtaattgaagacggcttgacccncagtgtcctatntacactgttgttaatgtttgttgttatnttgtctattacatcgacncatcgtagagtgtctttctttgtaaaatatctgtacaaacgctcctttattgtccgatttgccctttcaacgactccggcgtgaagatcggggctatacatcacatttttgataataaatttttcctcaaaatattttttcatttttcctgcttggaattcaagcccactgtcactatatatcttcatcgggataattttcgacttttcgaaaacccgatcaaaagcctcgatcatgtcctcactcttctttgacttggctggtgcactaaagatcattcgactcagcacgtcgatgcagaccaataaatacttgtaaccgtcgttatgttttttcaattgatcaaatatgcataaatcacactgccaatcggtgtggaagccactcggtattgtctttagtctagggaaaaattctgtaaggcggaaaaaaagttctatagagcgaagtgaatgttgttattcctaataatagaaatattagatagtacgccaaaaggagacaaaaaattagagaaaaaaagataatgtttttctctggcactctctatttattggtacacatctcgttttttcggacggtgtgtataaatgcgaattttggatgaatttctgtttttgtgttctttttgctttctcattatttccaactctctctttttaagttacataacaacagagttttgcattgccttttgtgacacaccaatcaattggaaaaatggcaaattgagccacaaaaatgaatcgacggtaaggaattttttttaaattacaaaattttcatttacccatacatttttttacgaatctcagttggctttgtaacgacgtgtggatggacattctcccatcttttaaccgtcctcaactcggcctcaaaatggcattgctttccgaccgtttcgatgttttggttgacacgcattttgatggaaaaacggaattgacaatttggagacgtatcagaattgaaaaggacaaaggaccaaaagcgaaactgtctgttctgatcgatggcaaatttgtggattttccgatggcggaccattcgctgcccaacaaaatccgctttaaggaccttcggattgggtaaatcaaaaattatacagaaaccaattacttaatatggttggtcatcttcttcattatttcactttatcagttacattgaccattctgtactcacatttatccgttcaaacaagccaatttgggacagaatgaacaccaatttggagttgtctatatggtcaaacaaaactgaggatgatcagcgaatttgggatgttttggcctgtcaaatttggccaatttttgcgaaaagcattcgtcattttggctttcacgatggcgattatttggacaaattgcgtcgccgcatttcaccgacacttctcactgatcttgatcaattgatttcaatcgattctggacttctattacccgatggaattgctgatgataggccaaatgcaactgctggccaagcgttgtccaaatggttgcacactccgagcaaaaatggccaaccgaagcaattgcatcgcaataattattttggtccaccaaagctggaatgggtcaacaacttcaaagaggtgtgtctcgccagaatttccgtcaaattatttttgtgtttaccaattttttatttagacatttcgccatgccaccacttctgtcacttacaaaatttgttttggtgttttcttgtcgctaatcgagccatttgaattggtgaacgaacggaccaaagagaagctgacactgacgaagggtggagatggcactggtgaattcaattggctgttggagagatgcccaattattggggagacggcggcggcggttcagaaacagcagcagaagaaggacggaaattcggatgccaatttgaacaaagtgttcttccgtctttacgatgacattgggtgagcagaaaggaggcctttttgtataaaacacggatagggaacggtatcccatgtacagtactttcccagaatcttggcagggccatgggttctgttaagacagaacttcagtccttgttttgtcttttttgctctggtccatcccgnaaaactcctgctggtccgggtttttgcaataattacgggctgtactttcgaaaaangttatccgattcaa

SEQ ID NO: 11647 - DNA, 2134 bp, Heterodera glycines
tatttgtgggaatcacggataaatttgtgggcttttctttgccggaccgtccgctgcccaacaaaatccgctttgctgacattcggattaagtaattcaacacattttgtaacatttctgcctctatcgcattttgttattcctttttcaggtacattgatcactctgtgctcgcatttctccgttccaacaagcaaatttgggacagaattggcactaatttggaattgtttatatgggcaaacaaaacggaggatgatcacccaatttgggatgtttttgcccatgaaattttgccaatttttgcgaccaacattcgccagttgggctttaccagtggcgatgctttggacaatttgtgtcgccgcacttcaccgacaattctcactgatcttgatcaattgcattcgatcgatttcgctcttatgtgctccggcacgattgacaatcaaattctgtccaaatggttgcacacgccgagcaaagatggacaaccaaagcgattgcgtttccgtgcttatgtgggcccaccaaatctcgaatggctcaacaatttccgagaggtgatcactgatcagccatattttcattaaacgacgactaattgatttaattgtccttgattttgacgagcagacaacggaaaatccacaaaattgccaccaatcgatacattgccatcgattagtaaagacattttctgttctggtccattatcgtttgcttttggtacttcgtccttgccaattctgatcatcctccaaattaccaaattggatttgtatgtgcctttatatatgaccgaaacttgggatgtttttgcccgtcacatttggccaatttttgcgacaagcattcgccatttgagctttgccgatggcgatgatttggataatttgcgtcgtttggtttcccctacaattgcacactccgacaactgatggtcaaccgaagagattgtttgcagtgattatttgtatccaccaaaaattgattggatcaacaacttcaaagagtgtctcgccatttttctcaattgtttttgtttttcccaattttgttttgacatttctccgtgccacctcttcggccagttacactgttcgaattatttttcgtgtgaaaccaatgccaattgcgccatttgaattgatgaacgaagtgacaaatgagaagctgacactgattaagggtggagctttctgtgggaggcctgaaacgcacgaaaaacatgtttttagcttggtatgaagcttctaggaaggatttctatatccatatttttccatatttcgcgatttatgtccatatttccatattttggcatttggtccatattttatgtccatattttgcgaaaggatggagcttttcgttggctgttgaaacggtgcccaattgttggggagacggcggcggcggttcagaaacagcagaagaaatacgaaaaattggaccgtttgaacggagtctacttctgtctttacgatgccattttctcgactcccgggcacattgatcagcggaagaagaaaaagtgatcatttgagaaatcgccgaccattaatgatttttgataattgggttgattgatgctaattgtttgctctgaactcatatcacttttgtggtggacttttcaatgttactataactgaatttctagacaatcgtttctattgatactaaagaaatttcccaaccaaaaaaatcaacaatggtttatataattgaaacaaaagaattaacaaaagcatttctgagagaaaataagcacaacaaattgagatcgatcatttctcaaatagaattattcaattattcatttccgtacacttaatcagcagacgacatttccgttgcttttatccgctttatcttcttcttctttttcttctttcgttggtggcgacaatggcctaaaaatgtgtccacaagaaaaaacagttgaattgtgtaactgaccgaagtggtggcacggcgaaatgtctaaagaaaattggtaaaataaaaacgaaaatatggcggtccacctctttgaagttgtggagccattcgagatttggtggaaccacataagcacggaaacgtaattgcttcggttgaccattttttgtcggagtgtgcagccatt

SEQ ID NO: 11648 - DNA, 2006 bp, Heterodera glycines
accatcataaaagccgattcgacaggaatgggtcgttttcattggaaaccgtggcaatttgctcccatcaacggctttgccaacgacctgtgaagttcgcaccgcattggaatgccaaattgtgaattgtaaagttgctaatcaggcactggcacttagcaatttcactaatttgatgttggaaccgccggtgatgccattcgaaggggcagagagtgaaaaatggctgcaaatatttggtcaggctccctggattctagagaccatccgggccaagatcgtgcaccgtttgccgatgttggagacgccgcgggtcataatcggtgactttacggcccaacaacttaactccgaaatgacggacacagcgctggtgacttccgtggaggatggcctggcaggaattgtgcgccaatttgcaagcgtcattttgtcctcaaaagtgcgcgccgttctcgttgtgcttggccgtgacgcactgctctcaggggagacgatggacacaatcaccgaatatgtcaaacgcatcaaaggactgtgccttcgttaccaagacattcaaattgtatgggccatcccgccatatgtccacacccaaaaagtggcatatgatcagtttttggaggcacttttgacattgactgaaaattgtcccattcaaatggcctttgtgacgcgaaaaggacgttcattggccgaaattttccgttacggcggtactcacaatggataatacgtaaatcaaaccgggattttgactgacgcgggaatcaaggctgtccttatctggttgtataatgtggcaaatttcccgggagagcgagagatgggacgaaggcgttcagtgatcgggaatgtgccttcggggtctcataaccgtctaggcgacggtagtgggcgagaaaatgccgaaaatgaggtgcctgggcgttctgagtcgcgccctgggagttcaaccggccgccgttctttcatggccaatcatcaccgccgtaatgatgctgggtgcaaccgccacgaccggattccgatccgcgatcgagtttcggcgtctaggcgacgcccggaattcggaaattcgcgttcgaatatcgccgttagcactcaccgccaccgatacctgacgggtcagccgaatcgcagctttatgtgacttttaagcgtcggggcgccgctttctttgaggggcgggatgtgataattaatgttttattatttaaattttgacttgattctggcattctgtttatttttgtctttccccaaattttgtttcccatcttctaaaattttatgaattttggaatctctctcttctgataattttaattgtaattgtgcttttatttaaattggtcgtctcgtaaattgttggatttgatcaaaagtgtgaattggacgtgtttcccaaatttgaagcggtctttggattctctccagtttccatttttgaaaatcatactattatctattatcaaaagttttgcctttttattaaaatgcaatatataggaaagttcttccctaagaattgaaaactttctctaaatttcatttcctacatttatttattactgtctcaacaattataacatataattttttataatgagactttaattaaatcaaaatcttataattacgaatgaattctcctgaaatttcccgcgcaatgcttggttttacatctatctatctccaatacattctcatcaatacattaggtttttgtaattatgattgatactttactgatttgccttttcagcgattgacatgccgaatattaccgagagacccatcgatttgtttctgctggaatttgcgaccagttattcatgcaaccaatagttttcaacattttaactgagaaagcagcgcctatgatagactggcaaaaaatggtttgttgttttcctatggttttcaaaataatttcgatatacttaagtggaaataatgtagattgacccctcttactgtttcttatacccaagatgttgagg

SEQ ID NO: 11649 - DNA, 3298 bp, Heterodera glycines
cggggccaccccactgctgctcacttcgcaggtcgcctgtctgatcatgcaacaaaaatacgaggaggcagagaaattgctcttggtactacaacaacaacaacaacaaaaaaaacactgaattttaactcaaacttgtcgagaaatttcgcaaatttttagataagcccacaaaattagcaattttaaatttgttctaggaattttctaattaatagacaattgaaatttttccaacacgacagagtgcccaggagcgtgatccgaacaacgctgatgtgcttgtcggtctattcgtggttgcacaatttcttggcaaaccgatggaggtgagttgaacccaccttctaggaagggtgatcagaaaaaccaaagggctaatttaataaaggggtcaggcggaagttggtggatgggagagcaagcagttcaagcatttcatcaatatttcaataagcgatcgtttttttttttttgaaaaaactgtgataattaatgttttattatttaaattttgacttgattctggcattctgtttatttttgtctttccccaaattttgtttcccatcttctcagattttatgaattttggaatctctctcttctgctaattttaattgtaattgtgcttttatttaaattggtcgtctcataaattgttggatttgatcaaaagtgtgaattggacgtgtttcccaaatttgaagcggttttgaatccaagcaatttcccaaattgcctttctctccaatcccacaccgcaaatttattttgacatggcgctccctgaagctggtgagtgctagcggtttctttgggtttacttcgggtaaaagcaagttttgcgtgcaattgagctgcttatatttgggtttggaaaaattttaaaacaggtacagttcaatatctaggcgatattgttctgatttggtggcaaataaatatctaggcgatattattttgcattttgaactcacctcgacgcacatgcaacaaaacctactgccacatcggaattatttgactcgtagaagagcacaaacactgagagacgagggaaacatgctgaatttgtcagagatgagaaatctgctcgagccaatgccgcaaacgaccaaatcggcattcaacaaaacgcagaacggcgtgaaaattctcagtcgagacatgaaaataccggggatagagctgcacgcggggaacaacaaaaccgtggaaggaaccgagaacagcccaattttacagaaagaatggagtacgacgaaagcattgtcgacgacggagcggtgtcactcgtcggtgaagctgacgaaaacgaattgttgggcgtcagcgacgcacaccatgagcagaatgagcgggatttggcaggtttttaccattttccacggaacacaaatatgcaacagagcctagtcaggcagaaaagaactgtgggagacgaaaatagtggtcggcatgttaaccgcatgccaattttggaaaatttggaagcattcggtggccatgattttgagtactcttttcaacgccaccatagagaacaacagtccagacagagaccgaattttgaaggggactcaagggcttacccccctcctcctccttggtatgggtcctacccatggatgccaccgccatggttcaacgctgaaaaagcaccacccaaccaatgccaaaaccaaagggaagccaccgaaatgcaacaaagcgcttcccattcgacttataatcgactcgaagcaattcttatcttggataagctgcccgacatcaacggaagagagggctcggaccgaattcgagcattctttcgaaaattcgaaattggcaccgaaggctggaccaacgcagaaaaattaaaagcgttacaactaaaagtcacgggaaaggcggaaaggtctttgaatgccgcagtcgattttgagcgcactgcgtccaaaatagggatgcgtgaagtgaaattcgacctgattaaaaaggaaatgctacaaacgctggacgagttggatgcgcgcgagacctcagcttttgatgagctattcactggactgcaaagaaggtcgaacgagtcaattgaccaattggccgaccgcgttgggcgaacagttcaaagagcctatccaaatttgaactcaagagacatcgacgaattgtcgattaaacactttacgggccttagacagccatgagttggcattaacattggaagtgtctcgcagtccgtcgatgagctatgaccaatttgtgactttggcatcgcgagccgagtcaacaaaacgagcagtgcaaaaatcgatatcaaggcagcgccagtatgacaatcagaatgtgaaccgtagttcggttagcgcccattttccgcaaagtcgagcatctgttacgtgtttcaattgtgggaaagccggccacatttcaacattctgtactgaaccgagacagaataatcctttttcacgcgatgcgcgtaatcgagaccattttaatgcaggaatgcagacaaattcaaggacagcaaatgaaaaccgtgacagttggcaaaaccgtcagaattttccaccgagaacgggtggaaaccaacagccattaatgcatcaaactttcaaacgttcaccgaatcaatttggtggtaccaatgcagcaaattgcattcaaattgaggaaattccggcggagaataaatttactatcggaacaattggaacgaaagaggatgttcaaaactggctggaagagctgattttgctgaataaggaagagaagggggcgcaaaaaattgggaagctggtcgtgttggagctgttcatcaatggtgcaaagacttcggcaatgttagacggcggcgcgcaactttgccttatttctgccaattcgctttataagctcgtccgtgaagggactattcatctacataaagggaactataatagaacccttaaaacggcatacgactttaatggaaaaaagattaacaccttcggtgttgtcactctttcagtaaatcgagataaattagaaccggttgaaatcgagtttttcatcacatctgcatctttcggatttgatttgttaatcgggacgaatgcactcggtattttgggtttaaaattgtacgacgagaagaccgattcgataatagaattcgaatgcatacccgagaaagaaaagactgcgaagaatgaaatccgagtcgcatgtacaactgtactcgctccgagatcgatcacattagtgccgctcgaaatcaacaaagacattaaaaatgattttgttgtgacacccaatggacgaattg

SEQ ID NO: 11650 - DNA, 2770 bp, Heterodera glycines
  unsure (1)..(2770): unsure at all n locations
tctctatctctgtctgtctctctctctctctctctgcctcccctctttctctccctctctatcaattcactctctccgtccctctctgtctcttacccacccaataaatcgcttccatcagcgaatgcgctcctttgaaagtgaatgtgtttgccaatttcttttttaaatatatgtctcattcggtttacctcagttcggccgtcacggttcggcccaagcgtgtttttccactataactttctataacttttttctttggcaaccaaatccaacatttttggtatcattcgaaagcttaacatgtttagaagctttttctaagctattgcttcgcgattagacaattaccaaaaaagttatacaagaaaattgcgaaaagccgaaattttttaagttttttcttaataaaattttttccaggcttgaaaaaattttcgctttttgtaaggctaatagagcatgttaagagctttcgaatgataccaagattattggatttggattacaaataaaaaagctatagtgaaaaaacacgttggggccgaacagtgagggccgaactgagcgagtccggtctcattacctccatttgtgatcaacaaacgcgtccgatgatgcgcttaattaaagggaaatggtgacggggtgtactgtatgaacgcaccaagcaattcgttttgtgggaaaaagctggtgatgttcaggtgaggcatgcgttcagaaagtccatcaatttgagaaggggaaaggccggggagcgaaagtttgggagaaatgcgccaaaaaattcggtagtcactgagaagtgcgaaagtgtccaacagagaacggataaactgaaccaagtaactccaatcacacactttctgtttcgcttggcttggccacctctgttggcattgtgccggtgtccatttgagtgccaaaagagcaaaggatgacgccctttccattggcttccattgagaaattccacggctttaaattgattggcttatttgaatgtgcccctaaattcagtttcatactgaaaaaagaggtcgaatggaatcgatgtgaactccgccgacgggcaacaaattattgggaaatgccgaagacggagcttcaaggaaagggtcagagttgacaaggaaaagacgtgccatccttctgagcttaaataaagaaacatcctttattgtggtcatttaattctgcacctcggcaactttgggaaatttgccacggaatttgcgattaatttcaaaatctgaagcgaacaaagcatcaattggggcatccaaatgacgaaatctcttcgataaaagttgggccagccacgggacggcactttgggcgaaagactcggagagcagagaaagagaacgagacagacgcagagtaaaggccttatttgttaggcaaatttcgaaaataaaccaatgataaaaccccgaaaatgctgaaggcattgccttccaaggccaactcgggcaaattccaaggcgcctttacaaattttccatgggaaatattgcgaaagtgttgaaaatgacgaacccccgaggcgaccaaagtctcttcggtgattccctcgaggtcgaacagcacaaaaggaatgcccacggagtgcaccaagcccatcttaacacatcgtcaaatatagccatttacagcctttatatggcctcaaaccaaacacgggtttcccgcgtagagaatggccaagtcgaagtcaccccgggccatcacttccatgagattgctgttcagcatctacataatgtggacttggctttccccacttttgccttcttccgtgcgcaccttcccacatgaatgattgtgtgccgcccaatacggcaccctcagggcattttccgcgtccgtttcttcgccccagggcacattttgtccgacatgcgccaggggttcggagagacgccttttgataagggaacagtgattaattagcacgtgtttttatgctctctgctgagtgtatggtgttgcttcagcggctcctttggtggttactgtatcattagtcattggacattttgcaattcttttttccctttgtccgtttttcaattcgattttccaatttattcacctcggcaacacatctttgagtactttctcattgaccatgtgcagaatgggctttacctaacaaaaaaaaaccgaaaatttaataattttcagggaaagggagggaaccaaatggcaaatgttcgctgtttttccccatttatcaaattggtcggagatttaaccattgaatttttaaatcccccgggcatttgtccggtgtttcatttcttccctttcctctgcttttttgtaccaatcgcggttcctccggcaccaaaatgggcttcaccgtcatcactttgtgagcccttcgcgcaaattcctgtgccataaactcaaaagtgtgacgttcgaactgattggtgccgatgagaaaaaagagaaaactgagcccatccgccgaaaaagagaaagacaaaagccaaaaaagggcaacggaaacaccgccggaggaaaacatgggaaaatggagggaaaaccaaattaaacaatttatatggacgaactttgggtgcgcataatccaacttacaaaagaagcccaaccccacccaatctcgggggaaaatcggacggaccaacccatccatcgggagcaaacaaaaaattcgttgaggggccaaaactcgcgaaaaaggtcgatcagcgagaattaaattttactacaccaagcgattgaccnntgcagg

SEQ ID NO: 11651 - DNA, 2320 bp, Heterodera glycines
  unsure (1)..(2320): unsure at all n locations
tcctctaaaacaattgaccgtcaaagcaatgattatctcaganataganaagattgccatgcggaaccatcagacgagcggcaagcgttgaacagaagtacacgttgcgcagcccaacctcgttgatgtcatcccaaaactccggttcgcattcccaaaactttttcccggcattttcaatcagactcttgaacgggagagggatttaatgactgtgcgggcaaatttagtgtcgaagaaactgacaggcactccggaataggcattgttcaccaaaatgtgcagtcggccgttctgttcctcctcaacgcgcttaaacaaacggcgaacgtcgtcagagttcgcgtggtcacaatacacaggatgagcttctcctccacgacttttgatttctaatttgacataaaacaccacaaaattcaatcagtgactcgcccttcgctgtttgttccaaagatggaagtcccttctcaatcagagagtacgaagcggcaggagctcgtccagtgacataaaccgtagcaccagcttgaccaagttgaagcgcaatccctcgtccaataccacgagaagcaccagtcacaactgcaattttaccttccaaagctctcactgctgaagccattaggtattattttaaatctgagtattttgagcagcaatttaaaaattaccttgggccttagttgtatgtctgggaccccgaactcaggtaatcctgaagaatgggtgtccctaaattttatattttttttaattttgggctcaaacccagtttttagtggttatcgagggtgctgattctgaatcttaactaaaatttgcccaattccgaaccccggaccctaattcgaacaaaaaaattgaatttttttttcaagaatggattttttagggtaaaagcttctaattcatttaacaactatttagtttgatgtaaaacaatgcttaaattgttaattggacaaaaatgcgcaatttgcgtcctaaatttgaccgattttaacgaatactttgcaaattttgccccgccccgactccaaaattgtacaaagttatactcgattgctgacaatccctgttattttttccactcttacacagggacaaaaccattgtttatgcgttaatttgtgtttttgtttgtgcggtttaattattggcgttttaatctattttgaatttattaaaatattttaaaaatcggaaaaatttgtaaaccaaattccaaaccaaagcaaaaaattttattcatcaaattttcttctattacaatattttatccttcacaatggcagatttaagaatggaggtaaaaataaatgatttcctttcatttattcctttcatcttaaggccggcaatgatgtgatcgttcccgtcaatgttgcaattcgcatattcggttttgttagtagagatgatttggaaaattgcaaactcacctgcaaatcatggaaagacgtgtaaggcattgaattttgttttttgcaataaaaccattggcaaataaaaccgattattttaagaattgattacgcagacaaccgaaagnaactcggagttgcaactgaggcacattgacgccatttgtctctcaactaattctgaattttctatcaaaatttactacaaccaaactattcgcgagttttactacaaaaaatatttcgctgatatgttaggcctttttttaaataaaatagaaacattttatcttcagggaaattgatgaaattgaagtgaaaaaagtcaggcatttaacgagtcaatttgacgagaaaaaatacgttttcccatgtggagagcatttgccaattcggcaaagtcattcctttgtttttccagcggttgatatttttcaccaacacaggtgtaaaagtaggtaatctttgggttaacggcagttcgtacaattttttaattttcattaaaaccgaattttttatcaaatgatttttttaaatttttgcgacacttttgctgtttaattttttgggtggtttcgagtctctgaattctaaagaactgcgatgacatcaattcttttgattaatttgtaagctaaaaataatttcaattttttcagtggtgaggccaaccgtttaccaggaccatgtcaattacacgcgaaaactcttcacacctccgctcagtttttatgaacgccttcaacaaatgctcaaaaaatgtaaaattcgtctggtgattttccacgcgttcactttcactgatttctttgttgaaaaaatgcgtgaatttgcgtccgatgcgtttacgagggtcgtttttctttcccttcactgtaagtcccaatttt

SEQ ID NO: 11652 - DNA, 1072 bp, Heterodera glycines
  unsure (1)..(1072): unsure at all n locations
ttaactctaaaacaggcaaagaatgaattgcttgcccaactttctctcttcgaccaaattctccttcccaaaacttttctcgttggcgagcgtttgtcccttgcggacatttccgttgcgattgatcttctgccggttctttatttttttggttgattttaatttaaaatcgcatcaggcttatcaatacgttttgggagaagaagctcgcaaaggccttgtgaatgttaaccgatggtttcaaacggtggtcagtcaaccaggaatcagagaagtgctcggggagttcagcttcatcaaggatcccttgaccttcgatggtaaggctcactttggacctttttgtttggtttcagcttaatgctcatttcagaaaaagagtacaacaaactcttgaatgctgctggtcaacctgcgaagaaggaacaaaagccggaaaagcagaaaggtgccaaagaggaaaagccaaaaagcgctaaagaggaaaagccgaagaaaaaagccaaggaagaagccgacgaggaaatggacgctgctgacgaggctattgccgctcagccaaaattcagcgacccattggctgcgttgcccccgggctcatttgtgatggacagcttcaagcgcgtttattcgaatgaagacaccgcaaccaaagcaattccttatttttgggaaaatttcgaccccacaaattacaggtatttaaaaagtatttgtttattaatttatttcttcccatttattagcatttggttttctgaatacaaataccccgaggaacttaaagtatgtattgagtgcatttggtagttttttgcctttagcaacatttattttagttagtctacatgtcttgcaatttgattggcggtaattaaatattggtatttccatgggctaattaattgaatttaattcgttaaggaatgtttcaacgactcgagaaaatgaagaagcatgcgttcgcctctgtttgtttgttcggtccgttcttcttaaattcttattgtttttttaatttatgacttttaggaactganncacactcgacaaatctcgggaatttggatct

SEQ ID NO: 11653 - DNA, 3219 bp, Heterodera glycines
  unsure (1)..(3219): unsure at all n locations
ggaggtattgtagcatttttatcgtcaccaaaactaaagtccacttttccagggtgactttggtggtaagaagttcaaccagggaaaaatcttcaagtgattctgatcatgtcgtaatcacagttttgttgcctacaactgttattttttgttgacgaatttttatactttattcaagtgattaaaggtggatcatttataatcttaaacataataacagggtcgaccaataggatgagtatcggtgagaagttacaatatcaaattaatttaaaacactcaaaaatcagcgtcaagacggaattcacgctgctcttctgttgaaataactcccatcttttggtactccgacactcgcttctcaaaaaaattggtcttgccctgtatcgacagattctccatgaagtcgaacggattgaggacattgtatttctaaaaatggggaccaattgtaagtgattatatatacaggtaaaggctaatcctgtattttattggtcccataaaaaagagattaaaaatcttttatttatgggaccaataaactacaggattacccagtaaagtaaggaatgccttgtcatagcctagttcaaccagcaaatggtcagcgacgaactcaatgtattgacacatccttaacaataaaaaatattccaaattaaaacgtttaattacaaatcggaattcatgccgatcatatagacaggaagtgcgtcggttaggtattcctgcaaaaaacggcgatttattgtctagcaaaggcccaattacctgttcaatttttaccgcgtccgagatgatttcgtagatgcgttctttgggtggcgtgtttttgaggtgggtgtagagaagacaggcaaagtcacggtgtaagcccttggaaatgcggtttttgatatttaaaaaaaaccaaagcaagtcaaacttcgtcacgcgaaattaattcgttgctgtgcgtcagaccgggcaaaaggcctcgttttttaagccaaaaaattgcagcaaaactccccgagaagaaaatcccctcaaccgcagcaaatgcaacgagtctctccgcaaaagaagcgtcggaacttgcgatccaacgaagggcccagtcggccttctttttgataaattcgaactcgaaaatggcattaaaaagcttagcactaaaaggacaaataggagggattaatgtatgaaaataataccgttcatccgaatccttaacgtaagagttaatcaacagcgaatacatttcagaatgaatgttttcaatggctatttggaaaccataaaaacagcgagcctctggaacttgaacttcttgagcaaagcgctccacctagcaaaattaaaattctaaataaacaaacgaattttactaaattttcgttgacaatcccatcagaagctgcgaagaatgcaagtactcgagaaataaaaaatcgttcattatcagttaagcttttccaatcggaaatatcctttgacaaatcaacctaaaagcaaaattaaaatttcattcgttttattcaaacatttcacgcaaatacctcctcaactgtccaaaatgaagcaactgccttcttgtaaaattgccatatgtcatggtatttgatggggaaaatgacaaaacgatttgggttttcctgcagaagcggctcgtccattcttttcaattggaattgggcagtgacaatctgtgataatgttttgctggttattcttttttcctaaaagcgatgctattttgaattcgtttctgggcgcgctattttaactaagttttcagtttctttagtaaacgaattgaataacgaatggaggttaatcctgccgatttgaatttccctaaagcagtgatcgctcgtataatcaaagaagcgttgccagatggagttacagtttcgaaggtattttttacacactttcatgtaataaggaggttattttttaaattttgttttggatgctggacgtaattagctgattagattaaaattttgagattaatttcaggaagcaaaaaatgcgattgctagaagtgctgctatatttattcttcacgcaacttcactagctaatgacaatgcacaatcaaaaaagagaaaaaatctgatcgccgatgacgttttatatgcaattaatcaattggaatgcgatgagcttgagaacccggtcagttttgtgcaaatcgaattgtaagaatgaattatcgcacttgcatagtgtcaatttggaaaattagtaaaaatacaaaaagggaactttatccttggtttccaacgccataaattttctttcttggtcaatgcctgcatttttgtattcaaacgaaagctcagtttctcaataatttataaatgcaaaaagaaaacacgaaatttagcttttttcgggtggtaaaaataattttttgtctattatattatcccataatatagttaaaccaaaaatgctgtagacttaaaaatagacaattaccaagtaagataaaagttatggcctaagaaactgacaaatgagatggtcattgatttggacgcataaactgaattagaaccaattgggcttcaaactgactctgttttaccaaataaaacccctgacaggtaaaggaagcactcactctttacacgcaaaagaagaatcagcgacaacaacaccgaagagagagaagggcaaaacaaagagaggaaaaacggtttgaaaccaaaggaaaaggggagacagaagaaaaaggacagcaagaggatggacaaagcgactgcgaacagggaatggagaacggtgacgacgatggagaggaggaggaggagatggaagacgaagtggggcaatagtgcgcatttatttagactttaaactgcatttttgcataaattctttttactacctattttaaacggccgttttccgttcaaaaggctttattatacttctaattgtaaaaaggaatctgttttttgaatggtattagcttgtatggcgacgcatgattctgaaagttgttcagcagaacaggtggataaacacggatcaaagcactaaagttttggaataaataattatttcctccctataaaaggcttctactgccgatgaggttgagtcgtccagtaggaggtccagcacagataacttgngaggtgattccgactacggcgatgactcggtgtctgacacagattcggatgacgaaatgaaaagagcaaaagttcgacgctg

SEQ ID NO: 11654 - DNA, 1604 bp, Heterodera glycines
gaaagctcagtttctcaataatttataaatgcaaaaaggaaaacacgaaatttagcttttttcgggtggtaaaaataattttttgtctattataatatccccataatatagttaaaccaaaaaatgctgtagacttaaaaatagacaattaccaagtaagataaaagttatggcctaagaaactgacaaatgagatggtcattgatttggacgcataaactgaattagaaccaattgggcttcaaactgactctgttttgccaaataaaacccctgacaggtaaaggaagcactcactctttacacgcaaaagaagaatcagcgacaacaacaccgaagagagagaagggcaaaacagagagaggaaaaacggtttgaaaccaaaggaaaaggggagacagaagaaaaaggacagcaagaggatggacaaagcgactgcgaacagggaatggagaacggtgacgacgatggagaggaggaggaggagatggaagacgaagtggaatagtgcgcatttatttagactttaaactgcatttttgcataaattctttttactacctattttaaacggccattttccgttcaaaaggctttattatacttctaattgtaaaaaggaatctgttttttcaatggtattagcttgtatggcgacgcatgattctgaaagttgttcagcagaacaggtggataaacacggatcaaagcactaaagttttggaataaataattatttcctccctataaaaggcttctactgccgatgaggttgagtcgtccagtaggaggtccagcacagataacttgggaggtgattccgactacggcgatgactcggtgtctgacacagattcggatgacgaaaatgaaaagagcaaaagttcgacgctgagagaacgcatgaaatatacggactcgaaaatacacgacggaaaaacaagtaataaacgttaattgtcaaatgggagagacacttcctatttgtgctcagatacacaaagtgacactgagacgaaaaatttgctggatgacatgggcgaggaaatggacgacgatttgtcgatattgcacgagatgaattgtcgtagtaaacagaatgggtcgtcagagttaggtatgtttggatgtaaaaatatcaattccccatttctattagactcaaaactctttgagctctccgatgaacagttgaattattacaccaattgctttctttttcttatgcagaaatcgcaggttggctttaactccctttttcatcttctaaacttaattttgaggggttcttttctctgcaaggggcgctccaaggtcgtattcttttccgagtccgaatttctgcttttttaaggcaatgacagaacaattcttgacttcttccgcaaaagttccctcgacgattcaattctttccaaaatttggtctctcagcgatgtgaacgaggacggatttttgaatttggcggagtttattttggccatgcatttggtcgttttgcacaccaaagtgaaacttcctcatgcccatattctctctctcatttctcttcttatttagggttctgttcctatcccaagtaggctcccttcctccgtccttcc

SEQ ID NO: 11655 - DNA, 1904 bp, Heterodera glycines
tttttctaccgtatcccctttgctttttgccctcattgatggtacgtcgggtactgtagccccaacaaatttcgctgcaagcaatgactgtaccgtatcctgatcagcagcagatttcgctaccattggtgatgcttgtactgtatcccgaatagatttctcttccatcactgctgctggtgatgaagactgtttgtgtttttcttccgccgtcggccctttgtccattactgtctctaccgtatccttttctgctgttggccaattgtccgttattgtctctaccgtacccaatgcttctttttctccttctttttccttttctttttccccttctctgtttttttccttaatatttttctgctttttcattttcgactttttgcttttgaatttaatttcgtttcctttttcaattttttcgccaatttttttcaattggccaattaacgcagaatgatctattttaattgagttcaatatattcaaacatttttctgctccaacagatccatcgttaaattgttggagtttattgagttgagaacaatcaaacactgaatgaattcattatttattttccccttttttggcttttccttcccctcaccaaattgcaattgctctttgaactgtccatccttggccattaattcgttaattgtctccacgtgcttttccatcattagtccctcaaagtgtttgtactgtcccatttggctgtatttcacaattttcagttcggccgtcactttaagcagctcataaatttgttcggtcttctcaatgatttttcttaatccattttccatggctttttcacttttggcattttttgcactcaataaactgtccaaaaataaataaaattcattcaataaatttgtttggcaaatttcaaatgttggcatttcgtcgctgtgctcgtcaaacaatcggtcgtagagaatggcaagcagaaatttgttgcgtgcccaaaagttggcgcaacggagcgcatttttttgctctttttgttgcaaaattttggcatccatccaacggacgaaaacgaataaatccaactgaaaatgccatcaaaattagcaaaaattaattggctaaattaattttaattgatcggattgctttttaccttcaatttgagattaagccaactgctgacagcattttttctgaccaatgtggaaagaagctcagaatattgggcagacagcaaaggatcattgtaaaacactttaaaatgggagaaaatgggaaaaataaaattattttatttaaaattaaaataaaaataaaaacaaaaacttttttattaaacaatttatggtaattttacattcatcggccatatttccatccatccaaagccatttaatcagcggtttgttctgatcgttgtcccaaatatttggcaaaaatgccattgtcatttttgcgttcaaatatttcaaaagccgcgttttggcacccaaaattaatgacaatttttcgaaaaacgcatcaacttctttttctcctttagttaatgtctcgccgagatgaagcttgtacattatttgattgtatttaatggcactttaatttacaccaaatttaaaaaaaacagaaaaataataaagaaataaagtacgatttttgtttaccgtaacctttccataccatttcaattctcattttaacagtccccaaccccataatgatgtgtcatacccagggcccggatttttaggttttcacatatgttttttttgcggataacatatggtgagataaacgcaaaaaacacttcgatttagagcgactttttagcaactttttttcaactattttcgcttatgaaactttttaacaactatttttactttaaacactatttttttcaacttatttttgctcgtaaa

SEQ ID NO: 11656 - DNA, 2534 bp, Heterodera glycines
  unsure (1)..(2534): unsure at all n locations
ttttcctttctctctcaatttctcttttcccctctttgtttccctttttcctatcttctcctctncctcttncctctccctctttctcctcctctttctcctcctcctcttcactgctttcctttgttcccctccaccgtattcctcttcttcttcttcttcttcttcttcctcatcgttacagaaatccgctaatgactttaatgactttgaattgctcatataatgcctaattatattttccggttcatcagtttttattataaagttattattccccagaaagtggcgcaatgcgtcggtaattttcttttcgtcggtgaaatacaaaactttaaatttaaaataaaattttaattttacataaatttatggaagacggatttaataaaaataataatatttgaaaaattgcatcaattttaaataatttaaatattattctgaaaattggataatgaaattgattgtttttcaatttaactaattttccaacccataaaagcagcatttttgttctgatcactttccaaaatgcttctcaattccgcgttgtgcaattgccaaatccatggcccaatttggccaatttcctcctccgttggcttcatctctcctccatcaaattgcttcttcccatttctgatcacttttgtcccccttttttctccactcttttcgcttcctttttcccccaaattttcttcagcatattttttcgtttcaacgattaatttccgtctcaaaaagtgctctcttactgtcagttgcatttggtccaagtcgaaaatttcttcataaaattcgtccacaaactcaaaaaatttgggcagcagacgccggtctctcccggcggcgctcagttggcgttggacccatcggacgaacaccgccaaatcggcactgattttgtgcgctttggccgccaatgtgtcgggcttttgcaatgcgcaaaaataatgatcccacaaagaatcgtcgcttgtaaacgctggaaaatgataattaattaatgaattaattgaattcgttaattaattatttaattaggaattgttaaaacggttagagaaatgtttagtaaaaaaaaaatatataaacgattgaactgaattaaaacaaaaagcgcaaaaaaattcaaatttcttttaaaaattgaagaaattttttgatttttgtttataaatcgtaaaaaatgcttctttaatgctttaattaaaatgataattttttctgtatttattttacataatttgacaatccttcaccgttttccgcaaaaagtgccgtcaaattgaaccgttttgcaaatgctttaaaccgttccggggtgccgattagtcgcgcaaagcgcctctttgtccccgagcatttgatcagtgatcggaaccgggcgggtgacgccttgaccattcccgcgatggcaaattcgatcagttcgcccaattccgtaccgctgctcccctcaattagcttttctcgcgctttccgttcgtcgcattcgtccgtcctcaatttgagcagcgttttctctttctttgccaccagtgtctgtttgatgcgtgttccgaaaagtatcaatttgagcatcacgcaaaagtgccgggccgagccaaagtgccgaaaagcgtcccgccgaacgtcggcaatttttgtggccaaagtggcaatgcccggcggcattttgggccaatcattcctcaaatggttgccaaattttatcatgtagtcaatgagaagggccgtgccgaactgcaaaaaattgtcgttgtcggccagcggagcatcgcttcggcgcaacaaaaagcgacgaacgcgcacaaaggcactttcgttggtcattaattctggaaattaaattttgcaattttctttctttaaaatgaggtttccaagatttttgtgcgtatgaaattctcgttttttaatgaaatttcacagccattcccgacaaatttggtaggatttttgcccccgatccccggcatttaatctctccccgatggtcgaaaaactacactaattatattatataaataaaattgcttcaatattaattttaatttattattataaactttcttattttgtttctatttttaaataaattttgatgatttaatttaataaatttatttcatttttttaattttcttaagcttaccaacgcgtaaaatctcggggaatttgttctccaaattgacaaaacattcacttttgaccatcccattcaaaaatattttcactttgataaagtttttttcttcttttatttcgtgacacaaaaaatgccgaaaattttctcttttttctaaaatttccggtaaaattttcccatttattagcagcaacattttgttggtcgtcaattcatttaataatttaacaacctcagagaggttcatgcaattcaccgaattcgcatgctaaatgtataaataagtaagtaaataattaattactaatgcaaatatttttttaaaaactttcattttttgtaattaaaaacaaagaaaagaaatttcatcatttta

SEQ ID NO: 11657 - DNA, 2196 bp, Heterodera glycines
  unsure (1)..(2196): unsure at all n locations
tttatatatnttcgggatttttcaaatgtaatttctaaaacctatttaaggcctatgtttccgagttcgccgaaggagtggcagatttagttgaaatgttgcaaatgacggcaaatgaagaatgaaaattttttttctttttctcctaagagaggcatttttcaaattggaaattaccattttacattttgtcattttacaaaatattacatattatcaaatcctgattttttttgttatattctatgaaataaattttccataaaaatgtaaaaaaaatgaaaaaaaagattcatgggttagcgagtgtccttgttcttttccggcaccgagcagggtcaaaattcgatcatcccatcaataacatatttttaaatgttattttagctttgtatttatgagctctatagaattcagtttgcctgtgttttgttcgccaactcagttaaattttgtgattggaaagcgagatttatgcgagagcaaaccgatacaaatgtaagctaaaatagccttaattattaaataaataaaagttttggctgggttggtcggaacattcgtgaagaatatgcaataattgtttcttttagattcaacccttacaatcatttactgcgctttaaattcttttgtaagttttttttggatttatttttccattttctgataaaaattactttgggatgcaaatgtggtggggttaaggggccatttcggcatcgaaattgttaaactattttttcgttgtctaaccaatttcctaaataagagatatcaaccaaatttctactcttctcaaaaattccttcctcccctttttagcaaatgcgcctgagcgttggcgcgtggaaaatgctcagggcggcatccgggccaacaattacgtcacgacgacagtccaactgcgcgagccgcacacaatccgacagccgaccagcgactgtctccgcgtggaaattttcagggacggcgaaagcgttgcggtcggaagaaaaggtttttttgacgtttagtttataacttcagcgcttttaggctgccctgactaaaaaacttaaaattgaacccgattttgacttattattaggcgcaattactcggcgtattccccctccccgggaccaactcttttattttgaaggccaccccaggacaacgtttttgtattcgtttttgaattttttttgcgcatttttttacatgttcaaaattaaaaaacgattatacgaaggaacggtggtaccgatatgcatcgctgaagatttttaaaaattctcttcctttttttaacttacccaaaaagttttattgacaaagttttgtaaaaattcgtcttcgccacattctttttgatttattgcacagctctgctgtttgactacatttttcatatttttttatttctcatttttcagacattttgctcaacattttgacggttgagccgccctcttcgtccgtcgatggcgcaaattttgtcgaattttctgacggcaccgacgcggcattaaacagcacggcacagcgcggcgaggccaaattgcggacgaattccatccacaatttgacgggcgaaaatggccaacaacggcgacaccagcaaacggtcattagtgatatttatgaaataggcatgacagatagaagtttgtcagtttaaacttttccgagcctttggccgtatctcgatgttttgccatctttaaaattttgaatcattgtcgtaagggaaaatattttttgtttttgcaaaattaacgcaaaatttggaattttgttttactcatattttttgttttccattcaattaattttatggttcattttctatttgcttttaattttgtcctatttttcctttcagaggccctccccctggcaattgtccactttctattggctcgccttggccggtctcttcgcctgccttttctgccttttgctgccccccacggcgccccctccggtgaccgacccccaccgccatggcattgccctttccgtgccgcattggctgcgcccctcgcacacacaacactgtgtggccgcttacattttgggtacggcttttttggtgcttttccctccactcggccaagggcataacccaaagcattggcttaatttttcggagccccgaacatttgcacttatgtccaaatcggattcaaagtgattttttttcaatccctg

SEQ ID NO: 11658 - DNA, 1661 bp, Heterodera glycines
tctaaaaaattggctgacaaatttctcaaaaaattttttttcttgaaattttcgtactaagaaaattcctaagaattttttttatgaaaaatttctaggtttgaaaattttttttaaaaaaatttttcgggggggaaacgacgtgggggggaaacgacacgggggggaaacgacgggggggaaccggcgggggggaaacgacctgctccccttatttaatgctgtttaggcaattagggatggaaaaacttaattttgaagccaattttggacaaaggcgcaagtgtcggtacagcgaatttttctcagttctaatggcaattttgggtccaaatctaaaatgttaatagaatctcgtaaactaattcatcttcaataccaataaaatttggagagaagtttttttaatttatccacggataaaaaaattccaaacaaaaagtccaaccatcgagtcgaacgagggcgtagccagacccttggcttcgaagggaaggggactgaagtcaaaaattcgatttttaggggtgtatttttcattttcattcgatttttagagtgtgtatatttctttgaactcccaagttagggggtgtatttacaaattttttacccgttttcgccaaaaaattttggtctccatttttcaaaatttgatttttgttttttagggctactgacgatgtatttcttcttgcagatgaattgaaggaagattttcattgcatttggacaaaacaatcttttacttaatttcaaaaaagaatgaaataaaacgggtaccgcttgacaatttctttgtgtccatttttgtggaaatcgccaacatttgtcacctttttgtacaaattgcagacattttgtgttatgtacttattggggaaaaaacattgctttacttcgtttgccttttaaaaataaagatggagttgagtcaatttttaattaccttttagttgaacttttaaaattaaactcaaaaactataaaagcgtggatttgaaatatgagaattgtgtgcaaaatgttttttataaataaaagaaaagtttttaattgacaggaaattgttcgtaataaattgaaattttttgttaaattttgggtaaagttacattaatttcaggcattttgaaagtcttgatctttgctctttcattatgcatttcagtctaaatgtggtggcttcatcaccatttctttacgcattttttccggtttcatttccctcctccccaaatttgatcaccggcagatgcattctatgcgcataatcggcgttaattgttgttccattttcgacttggcccaacagccaaaaggtctccatgacgcctttgccctaaagcacaaaaagggcaaaaaaataatcgaatcattgtcgttaattaggcagcggaattaattagttaattgccccaagtgggtgacctttatgatcacttcgcctctgctctccgtgtgataagagccgttgaaatttttgtgcagcaattcgagcgtttcactggacatgtgaattttgtttgctaaaagtgaattcagaaaaacccaatgacaaaattcaaagtgaaacaagcgtacggcttgaagaactttccatgcgcgaggcggtgtttaccgtatccccaaacaaacagtaacggggcatggccaaccct

SEQ ID NO: 11659 - DNA, 2526 bp, Heterodera glycines
  unsure (1)..(2526): unsure at all n locations
tgcatgcatgattttaataaaattaataattggttttattttactagctgtgcaccaacaagttttggtatgtattgagaataataaaaattttaattctttataagtttataagacctttcattttaatgtaaataagtgatacattattttctcagcaaataattggcccaaagacaataatagtcatatttttgatccgaaaaatgattaatatcataaatataaaattatttcaagaaattctggttgctaaattcggaaacaaaataaataaaagtaataggcaattttactttataaatgtaacattatttaaaactgctaatattgtcgggaccaaacagaggcaaattcggcccggcaaaaattttggcaaaatagaaattgggacaaacagtagacaagcaggggaatgatgttttattccgactgaaccgatttcaataacaattccacgacttaaatagggtgtcattcgctgaataatacatttttgtgtgagaaatgaataagaattgaatgtaaacaaacaaatattttttgaatagaacgacgaagagggggaacatttccaattaaattaaggttttcccatttttaatgaaattgcatcatgctttaaaatttatcttttccattttatttctcgtgacgtgagtcgcgacactccccacagcaaagttgtcggggggttcagttgctgcaagtctgcctgtatgttgttgttttatttcttatgcctcattccgggttgtctgtgctgagaaaggcgggcggttgattttggttaatcgtaaaatctgtgaggtgatcagttgcccaggctgatcccttgttgcttgtgaagatccgctccgcggcggtggacagcgatcagttgaccagactgactcctctccgtcctgtcgcccttgtaccagcgtctgccacccgctgatcacaagcattcatcagtgcataggttcccggccgttgcaccacttgtcgggaccaaacagaggcaaattcggcccggcaaaaattttggcaaaatagaaattgggacaaacagtagacaagcaggggaatgatgttttattccgactgaaccgatttcaataacaattccacgacttaaatagggtgtcattcgctgattaatacatttttgtgtgagaaatgaataagaattgaatgtaaacaaacaaatattttttgaatagaacgacgaagagggggaacatttccaattaaattaaggttttcccatttttaatgaaattgcatcatgctttaaaatttatcttttccattttatttctcgtgacgtgagtcgcgacaaatatcgcaagaatagatacgaatattagcttttttcgtgtgcggaatattaaaattgcattttaattcaagttttaacgcgttttgcatgcatgattttaataaaattaataattggttttattttactagctgtgcaccaacaagttttggtatgtattgagaataataaaaattttaattctttataagtttataagacctttcattttaatgtaaataagtgatacattattttctcagcaaataattggaccaaagacaataatagtcatatttttgatccgaaaaatgattaatatcataaatataaaattatttcaagaaattctggttgctaaattcggaaacaaaataaataaaagtaataagcaattttactttataaatgtaacattatttaaaactgctaaaatcggaagaatagatacgaatattagcttttttcgtgtgcggaatattaaaattgcattttaattcaagttttaacgcgttttgcatgcatgattttaataaaattaataattggttttattttactagctgtgcaccaacaagttttggtatgtattgagaataataaaaattttaattctttataagtttataagacctttcattttaatgtaaataagtgatacattattttctcagcaaataattggaccaaagacaataatagtcatatttttgatccgaaaaatgattaatatcataaatataaaattatttcaagaaattctggttgctaaattcggaaacaaaataaataaaagtaataggcaattttactttataaatgtaacattatttaaaactgctaaaatcgcaagaatagatacgaatattagcttttttcgtgggcggaatataaaaattgcattttaagtcaagtttaacgcgttttgcatgcatgattttaataaaattaataattggttttattttactagctgtgcaccaacaagttttggtatgtattgagaataataaaaattttaattctttataagtttataagacctttcatttgaatgtaaataagtgatacattattttctcagcaaataattggaccanagacaataatagtcatatttttgatccgaaaaatgattaatatcataaatataaaattattcaagaaaatctgggtgctaaattcggaaaaaaataaataaaagtaataagccattttacttt

SEQ ID NO: 11660 - DNA, 1737 bp, Heterodera glycines
tccttgaatttcaatgacgccatctttttgccttgctcgactccgtcctggaaaacctccggatattggaccacttatgcttccaattcctttttgttttcaacggcacgaattgtcggaattccgaaagctcggttcagatcgattttcagtcccatgatcaaatcgcggccgcacaaattttgtgcttaccacttatgacatgaatattggactcaatcgttcttccttcgtgcgtcagtttcacttttgcctttcctaaaattccagcaatggattttccgccataggcaaccaatccttgggatggttccaattttggctttccaatgcgtttccagtcgatctcgtcaatcactgtgacgtccgcaccgctgtccaactcaaactccaactttccattgtgaatgttgagttgaatgaaaccaggatcggcagaaattcccttgatttcatgaatgacgctgacatttgaacattcaatgttcttgatttgtcgtccgttggtccttggcttttgaccaaattgttgaccaaaattggcattaccgtctctgtttttgcttttgcaaccaacggcccaatgcccaatttttccgcattttctgcatgtcgaattctgattcgggcacacatttgcaaaatgtcccggttttccgcaccgaaagcaacttctcgtgcttttcgtcggcgttcttggtcctctttgctgattgccaactttcgcgacctcaggcattgcatttgagccaattgcttgggcatccaaattggactgctccaacaaaacggctgattcaactgcgtccttgaattttaggtccttgtcgccctttttgatcaattcaacccgaattgcatcattagagatgccattgataaacaatgcgcaaagacacatgtcaatgctgtcgcggctccattctatagagcgagagataaatggcttttcatgaataaacggtgctaggtcgttcgcaagtcattttcaaattttttaatttttcaatttttggcatcacttctcgccaattttctacatttgtagtaaacacaacctgacgccattgataccgttttgtagagctcatcgagctgtacaaaaaagccgctggtaccggcaagcttagctttggttggccatcgacagggtcgggggcgaggctgagggtcctccggcagatttgcccgaaccatgacgggctccaagtgaatggataaagaaccggacccggcctgggagatagcccttgaaaaactgaacaaaaaatttttcttaaccgggccggtccgggttgcggatcaggcacttttggtgcccgaaagtggtgcgataggcttccggaaaatgaccaatcaatcactgagttttttgtggaacgactcaccacggaataaactgatagagaaaaaggaagaggctgcgagtcataggtgcatcaagggggggggggggcaatttcgtaaatatccggcatttcaccgtgggttgttgccgttgtcggcgtcgtcatcattggcatttccattgtttccggcgtcatcattggcattggctgtgttggcattctgttgatgggtgtcgccgccgtcgtttgttgctgagtggctaatagcgcgagaagcagcgactgctccagcaactgttgctgcaggttgttgttgtccacccttctgaacagattttgagccaaaattgaaggatttttgaactataaaaaggattttcccgaattt

SEQ ID NO: 11661 - DNA, 2213 bp, Heterodera glycines
gcaggtcaaaaaaaatccgaaatccttgaaaatggacgacagagaactgtgaagcgacgcgccatttgaatttgtggtcacataaggcaaagtcaatagcaacatttcgggtcaagattcttctagggaaaatctctttaatcattcttggctcttgatcttcaattttgctgcacatttgtattttttaggcatgaaaatttccgataacttttctagttcggtatggttctgggtctcatcaaaaaagcatcaaatgccaaatttttggcagaaaattgttcataatcttgctcaagtgaaaccaaattcttaattcttgatatcattccataattttaaaaactttatttcaaaaaatttatggccaatggaactcaaaaacccactgtttttgaacatttttggttaacgaattttttgaaataggataacagagaatatttagctattaaatgagaaattttgggaatgattgactcggattcgaaaaggatcaaaatggatgccagaatcggattctccgaccctgaaaccccataaaaataaaaaaaatttcgaaaagggtggctaccatcagaatattaccaaaaaatgaaatcgaaaataataagcccattcgttttttgttttgttcaagtatttcaggagtttagcggtttatgcgaacggagggcgtagccaaaccttggcttcgggggcggcggttgactaacccaccccagaagagcgacgaattgaccgtttgcccttcgtccacttatgtttcgccacaattttaagtaatttttgaatggtagggggtgaattttggccgcgttcaacaattttcttttcataaaaatagagcgaacatgagcaaaaaaaaaattttttttttttttttgcccgacagaccgaggcccaatccaaaggtatttaaatggcgaacaaaattaatatttgacgtatttgtttatttttggaatcaaattacatgataaagtcaagcaaaagtgtttgattccaatcatacaaaaactgcttttgtgagaataaattaaatgagtcggcagcggcaaagtccctgagattcgtagaggcctcaacgacgagacatctgagaagacacggcacggcactcaacctaaacattggcataaaacacacaaaatcaaccaatgtttgagtaatccttcggaattgcgacccaacggaaaagagaaaaaaagatttttttttcatcactttttctagggtaaaaatgcgacgcgctttttttgtcatgaacaagttcaaagaaaagttttttccatcgggaccaaaattccgagaacgattaaaagaatggcacaaactacggaaggaggcggccggtgacgcgggggagggtgcacagttcctccccgcgcgcatcaatcgcgataattttaaatttgtattcttcgttggaaggcgctccgacttgaaacgtcaaactgtaaggctccatggagctgcgctaaacaaaattgtgtttattccgatggcataagggaaggagggagggggggaggggtcggagcagtgaaaaaactacgaattgtcagccgaaagtgttgtagaatgggttcaatttgctaatgatttttaattttacattgctaagtgaaaatcagcgaggttcagaacattgaaaatcggaatttcaagtattacttatttaccgccgcccattttccgagaattttttatcttccaagtcatgaaaacatgtttccagtggttttcggggtcgctgacctcgacgtcacccatttcgaccaattccgaatcccggacccgaattggaataaaaagttaaaaaacaaagttttcgctgatttttgcgtatttttcacttctttgtatccaaaagcaccactttcatacccaactcaatccttcccatggctggctctacgcctttgaagcttagaattttgaaacttacaacaggaagacttccaattcgtgcccaatcgtccaccccggacagttgcttaacaaatgcctcataacggtcaattcttcggtcctccattccgttccagttgatgcgaaagtaacgcgggtatttttcgagccaaacgatattttcagcgtgcatttttatctaaaatcagaatatgatatcagatttgcaaaaatcattgattctatcattgattttgaaatcatagattttctaaattgtgtcaatattgtcaaatgtt

SEQ ID NO: 11662 - DNA, 5621 bp, Heterodera glycines
aaacgggcgtcagtccgcgccccacccatccgccctccgtcactggcaaacacacgcaatcggtgatcgggtcggcactggaaaagtgcttaaaaccaaaattattaaaatacaatttgctgtccgttcttcggtcgggtgactcacacttttctccacacagtcgtggaaatggtaaagggaattggtgcccccgatgaacatgtccacgccgtagacgaacaacgagcgaatgtcctccgtcaaattactctcaaaggtcagaaactgtttgcccttgcggctgtagccccggacctgtgccaattcaaaatggcatttggaagaatagtacaactccctcatcagaggatgggggggaccaacctcagtgccacaggcgacgaatgctttgtcctggacggagccgagcgcaccgcccaaataaatgcgcgaaatgggagagcctggaggggttttgaagagaacctgggaattattctcagtgaaattagcccataaaaggcgcagccttcgctttccctcacatttgtgtcgttatttcgcctttccatgcacagcaaaacgccgttctgtcctccgatgaccacctttcaatgtcatggccaaataaggaggattataagtcagcttattgtgaaagtttgccaaaaggcccccggcggttcgatgatggtcggtcccccccccccccaaacacttcaaaaccactttaaatttgaacccaaattttgtcccttttgttccataggcatttgtcccatctttcccctcactttgtcttccgctgcaattgccattccctttcggctcccccgccgtcccctccttcccaatttctccgccttttctcccccatcctccgccaaagtaatcggctgatcttcggcacgtccgactggcgactgattttgaattacacacaaacagccttttcagtgggaaatggggaggggaaatagtgagaaaaatttggtggaaattgaaaagtaaaattcggcacaattgtgccgccaattcgaccgatggaccaatgtttggatccgatctttgcttcactttgtccattgttttaagccttcattccctttcgccaacctttcgaagtcgtcccaacgtgggcatagtccacccgactgagcacaacttccattttcgggtgggggggggggaagaatctttggattcaaaaaaggtactttcctgttttggggtcacatgtcaaaaactaaaatttaaaaatgcgcaaattcacagtcgcgtacagtattgtttgggtgcataaatacaataattgttcctaacaataaggctcccgtaaaatgccagtgaaaatttaaatgtcaaaaaacaagttccttttcggacttcagaacgatgttcttatagaattttccctttatacagtacctacaataatatttaatactgcagaactttattttaaaatatttgtatcactgacgcattttccggtcatggttgctaaattctcgtcaaatggatcagcttgagaataggatttgtgagaattctgtcatttttgttgttttttaaaattttggtgtgtgacccaaaaacataaagaacccaaaaaggaaaggttgccatggaaatgccggcgcggggaggggacggtaatcgaaatttacagtaatactaataaaaataaataaagcgcaaaaaattgcaaaattttgaccacttttactcgttgaacacaccacattcatttcacatttaattaggattttttagcaaacgtaaagctcttgagtttagaaagtgatacataattgaaaagctcataacaacacaaaaaggcagtgatcagtacttttgaattaacgcaatatttatatatatatttctttttgaaatgataaaaaatgtaaggttattcgaaaatgaaaatttgattggtccaaaaactcaaattgatacactagtttttttgttggaaccacttttgccattcacaatcgacatgctaggaaagatgagcgaattatctgtcctttatttaaatttaatttgaattcaattttagagagatggagacactttccatttctttacaacaagggcaagaggtgcagcaaaacgaaaccaattcagtttccacgtcttccacagattccaatgatatcgatatccaagcattggttcggccatcggctcggcggcagggcgatgtgatttcgtaatcacgcagatttttaatgccatttaatttgttctcgtctattttaggcctcatcgtgcggttttgactctctccaaaagcatgttcaatgccggatgcttctcattgccttacgcttggatgctcggcggaaaatgggtgtgtgtctggtggcttccgattccctttctgtttatccgttcttcaggtgtcattggctctcacttttgtcattgccggctttaattggtacggcaaccacattctcgtccgttcgtctcaacatttggctaaaaagttaacctctttccaatttcttcacatttcaacaatttcaggtccggtgttgcctctctcgattatggacattttgcgaaaagagtgtgcgactacagcgaattgccatttttgcgacgtcacagcaagcgaataatgtgccgaattaaactgacattgttatgctttctcacattttcaggtacgtcgtcaacatcaccatcctcttctaccaacttggtccgttcccatgtccatctttctcatttactttctttaggaatgtgtgccgttgccattcttttcattgctgacaatatggtgcacatgcttggctcctggcttggcaattccaccactcttatggccaccattgccattgttttcattatctttacgaacatgtaaatccgttttcgtacttgcgtttgaaattgcttcattttctgtcttaaaaggttcaccgaaatgcgcgtgatcagtgtttttgccgccgtttcttccgttttctttttgcttggtgccggagtgattatgcaatttacgctgactcagcccagcaaatgggacgaattgccggcctacacaaatttcaccgatacggcatgccaatgtgccatttctccgatattaaatcctatattttcaggtgattttcattggaatgtcaatgtacgcgttcgaaggacagacaatgattttgcctattgaaaacaaattggcaacccctgaagattttcttgacaattttggtgttcttccaacgacgatgtgcctttgcacggtgaaaacaaaaacaattttgcgcaaataatgttccctatctttcccatcagttttttatgatagcgattggattctttgggtacaacggtttcgggacgaatgtcagagagacgatcactgtaaatgtgccgcacacggggttagtatgccgaaagataaatttaaatgaaaaatggttgaaggtaatcgaatgaatgcaaattccaagcctatttattaatgggtttttgtaattatgctagtaactcttgctgattcagtctctattccgccgtcaatggctttctgtgcattcagtccatgcttggccattccattgcgatgtacgtcgtgttcgacatgttctacaagggattccgcagaaagttcactgctcgttttccgaatgtcccttcccttgtgcgttttcctttgttaacagtttcattttatccaattgttcaggttgtcgacaaagggtttcgcgtcggttgggtttttctcacttatctgatggccattctcatcccccgtttggctgtgatgattcccttggttggtcgattttttaaaatcatttttgcatttgcttttaggtcggtgtcacttcgggtactttgtgcgctttagtttatccaccattttttcaaattgtcactttttggagcgattggaaagtaattatttaatatattattattattattttattttttgctctattccaatttacgagttcaatcagtgaccatccttaatttattggccacaactttttatttcttccttggtcaatgtctatatttttggtatccaacgaaagtttaagtctctggaattgattagcaaatgctgacattaagaaactgagtatggtcactgattgaatgcgtaaacattgattgactccttgtgaatgtatggagccaaaaattggtttttcgggtgaagccccgattccccagtattgccaatattactgctaattatgtttaatgtctctaattcagttgaatatgagtcccgttcgacgtgcctttctcattggacgtaattgtttcgtcatcgttctcggcttctttgcaattggtgccggcgttgcagcaaatgttctccaaattcttaacccgccgccttcttagcctgtggctttttactccttacaattagtcgtctttcatcttatttactgtaaaattccccttcccctccccccgggcatttcagtccctttccttcgcttctttcccagctattttttcactgtcatttccatttttgtgacctatgcatttccttccagtttcatatcttttcattgttctattctttgttatatttacataagaattaaagtatttattgttcgtttttaagtgcaattagctctgaataaataatttttaattacttctacattctaataaaatttgacgtttaaattgaacacattaaaatactcatttttatttgtgaattttgcaaattttagaaaaaaaaattgttttaaaaatatcaaatgccaaagaaaaaacctgcgaggctgttgaattttgaagaggaggaagatgaggaaatggagcccgaattggaccatgagctattcggaaaattgacggaagaattggacgaggccatcgaaaagtctatggaaaggacgtacagcgacacattgaacacattcaatgaaattctgagaaatccaagcaaatgttagttgagagatccctttttgccatcttcgggtaacatatgatcgaccattttttggactgaatttaaaattgatttaaaaccgatgggaaggagaatcactgcctattttcagataattgaattgaattaaggaaacccttttaacctgcacgaattaagtttaagcatctgaacatcgcatcccgactttgttcctttgcggccattgtttggattggaattggctttttaatcgccttcggaaatgccacaagaatttgacaatcaaaaacaaagaatttgccgaagtgtcagaggaattgacgacggacagcaaaaacgaaagtggcgaccatttaaaggcaaagggaaaatgggagggaatttaaaacgaaagattttcagaaaggcgggaaaaaagtgattttgtttttccaagacaattccttttccaagagagaagtgtttgagcgaatactttcactgttcggaaaaaagtgagtttaaatatttttattgggatttggaatatctcacaaaatgctggaggtttatttccggaagattccatgagaatgctaccgatgctagtactcttttttgaaaaaaagttcaattttatcgagataatctttttcccagtgtgttcgtccttagcaggcgtccaccactccccatttcattttcattcatcgatgaa

SEQ ID NO: 11663 - DNA, 4108 bp, Heterodera glycines
ctaggaaggcaaaacagttgtgccgttcgttgacccttctgctggagagttacatggacaaaattgcgccccaactgtccaacatcagcgagttcatgctgctgcgcacgcaagacaacaacgaggagacggcgctggaggcgtgcgaattttggctggcatttgcggaaaatccggacgtgtgccgccaagtgttgcggcccattctggcccaactgttgccggtgctggtccggtgcatgaagtacaccgagacggacatcattttgttgaaggtatggccggcaaaacgcgtgtcctcccaacgcgtccatttctccctcccattaaaaaaacgtacgaatcttttcataagaaaattcaagtaaaagttttcaatgattttatgaaaatttatgatgaactactaacaataggttattttcaaaatttttctttgtaagatcttttttttgaaaaatttcgactgaatatctcgtttttataactttttcacaagttttcatattttattaaaacggtgagaggtggacaaacaaaaattcacgggttaaatcaagaatgagctaaattagaaaaaaattttatggtttttaaatttatattcccattttcccctccacagggcgacgttgaggacgattcgaatgtgccggaccgagtgcaggacatcaaaccgcgcttccaccgggccaaaacccaagggttggccggctcttcttcgtccgcgcccgcgctgcccgtcgatttggccacgggactgccggagcaacaaccgccacagcagaacaacagcgagggggatgaggacgacgaggaggagggcaccgacgacgaatccgccaccgagtggaatttacgtaagtgttgttagcctccacgtctggcatttgttgattgttgaaagtccgggacattctaacaattttttattttcttttttttgagaactttggaaaattaaattatccttttaaaattaaaaaaatggaatgtaattcaggcaaatgtgccgccgcttcgatggacgttttgtccggcattttcaccgacgaattcctcgtccatttgctgcccattctcaaccaatcgctgtcttcggaccaatgggaggttgtcccattccccccaatcttgaaataataattgaatttttaatttaccaattgtaatcaaactttcattcaggtgaaggaaagtggaattttgacgcttggtgctattgctgagggatgtgtcagtggaatggtgggtgaacttttttaaaaatatgacccaaatttttttattttgacaggtgatttttttcagaaagaatcttatttgttagggagtttttcctaagctttcaattaaaagaattttttcttcaacgataattttacgatgattttttcaaaacttttcaaaaaaaagtcacatttttttttgcttgaattttttataggaaaaaattcctaggatcttttaaaattgcaccctaaacaatgactttcccccgtcagactccgcatttgccctggctcgtcccctttctgatcgactctctccaacatccgcgttcgctggtccgctccatcacttgctggacactgtctcgctactgtcactttgtggtccaacaaccgcaaagcgaactgttcgccaaactggtcaaggaggtgagctaaaaaaaggggaggatgtgcatatggtcgaaccggctgacaatgagcattccaaccacaattcatttccaattgaaaatggtctaactgataataatgagacacaccgagcacatctcgagagaaagtgcagatatatgaaattttgaaggataaattgtcgaaaaattatgatttgttcaagaaaaatggtttacttgtgaatcaagcgtaaatttaatgtcatggagcttaacggtaatgatgggattgattcctgacatttattgggccattggaaaaggcaaaagtgaaatttgaaaagttaaaaaagtttcacgctttctattccccaatattgggaggcaacaaatgcttaaatttttttgatattaatcacttacttttctgcacagctgttggctcgtgtgttggacaagaacaaacgcgttcaggcatgtgatgagtaattttgatggccagtaaaattgtacaaaagttgggttaaaatgatggcggatgactcaatcatgtgttgtggcatggctcgtgtaaaattcactgtttgactcgagtcaaaacattgctaaaagagtcaggggaaccggtgcaaaaaggcagaaaaagcaagaaacgatgcttaaaactcccgagcacaaaaaagacaaatataaaaaaacatttaaatttcataattatttaatttattttaagtttgttcatttattggagaggaatttctcttttttcaggaagcggcttgttcagcctttgctacattcgaagaggaggcgtgtaagtcgtcttttgtagttctttgatgttctcaatccttttaaattatatgtgtttttaggccatgaattagtgccttatatgcccgagatactcggcactcttgtggaggcgttcaaaagatatcaggtgaccattttgtggaaaggggtcacgcatgaaaaacggggtggggtcaacaataattttgtcagtcttattttgaggcaaaattttcgggccagaactttttgtttctaaatagggcaaaatataacaaacttgatttatttgaaagctatttgaatttatttattgtagaagtgattgtttatcaagttcgtatcgatccaaattcaattagaaaacaaaggggacggacccttaaatttaatgtaaattatttccggttttaaatatttctttctcaaaatggaattattttgaaatacaatatttattgtcccttcccacacttttttaggccaaaaatttgctgattttgtacgacgcggtgggcacattggcggacagtgtgggcggcaacctggcagagccaccatatgccgaaatgatcatggacccgttgatgtccaaatgggcccagttgcgcgacgacgacaaggagctgttcccgctgttggagtgcatttcgtcggtggccaccgcactgcacaccgccttctacccctactgcgagccggtcagaacagccttattgcataaattgggaaaaaacagggatagagtataattttatttggttctaatatcgggagcagttcgtcctccccgtatcgtcccgccccggaaaattcaatttttcaagaaaaaaaaaattagaaaatcttgtgtaagttatgaattttatttttatcgcgtttttctagaaactttgaacagtaatcggttcaaaaacaaatttaaatagaacttatacgacatttatgaatagagcccggattttgaggcatatgccttcttttttgctaacttgctatggcctaatacgcacgaaaaacgagtttttaacttggttagaagcttctagtttaaacttttttgtgccttttttgcaattttggtgccttatggcgggcacgtaattttggtgcccttttcatgccttttttagtattttatgcaaaaaatggaaaataagtgcctatttgagaaattttcatgcctaaaagtccgggctctatttatgaaacacactacaattaatttacttaaaatacaatcacacacacaaaaaaaaaattaagcaaataacagatattagccaagaaaaattttaaatttatcagttttatttttctacaggttttccaccgctgtgtgcgtctcatttcccacacactcgcaatcagcgaggcggcgcatgaatttagtaaatcgaatttacaaaaattttctttccattctcggagaccaattattcctttttaaaagaccgagaagctcaacacgatcagccggagaaggactttctgatcgttgcgctcgacctgctctcggagttggccgaagcgttgcgcgattacattgacccgttggtggcccaaagcaacatcatccagctggtgtacatttgtgcacaggtggtgaaaggggccggaagactaaatacaaatggcaaacaacgacaaaacgcactctaaactgcttaagattgtgcaaaaatg

SEQ ID NO: 11664 - DNA, 4961 bp, Heterodera glycines
aaaaaattttttggaattaaaaaaaatttggaaaaaacttcggcttcggctttggaaactttcggggttttgggcttcgagcttcggacttcggctttcgaataaaattgggcttcgctttcggcttcggcttcgagtgcaaagccgagcttcgcccagccctgatctaaacccctcttttctttctttctcccctttttctctctcccactctccttaataatcgcaaaaaccaacctttttttgttgaaaatctgttaacaaattgcacccaaatttttaaaatttcccccggcggcgcctatcggcaccgtccggacccctttttcccaaaagttttttgaaaaagcgctccgaaaaaagtgatgtgaaaatcaaatctgaatttctattaatattcgatgatttagtccaaaaatgattaattgtttgaaataattgaagaaaatttgtttgaaaattttcattaatttaatttattaaataaaaaaccaaataattttgtattattttcacttgatataaattaaaatttgaatttttttttaaatttttaaaatttttttgaatttttaaaatttccccctgcggcgcctatcggcaccgccggaccccttctttcccaaaagttttttgaaaaagcgcttcgaaaaaagtgatgtgaaaatcaaatctgaatttctattaatattcgatgatttagtccaaaaatgattaattgtttgaaataattgaagaaaatttgtttgaaaattttcattaatttaatttattaaataaaaaaccaaataattttgtattattttcacttgatataaattaaaatttgaatttttttttaaatttttaaaatttttttgaatttttaaaatttcccggttggtcccggttcccggtcccgaaaaaaaatcgaggtcccggtcccggcttctcaggtcccggtcccggttttgcccaaaattcccggtcccgctctactctaataaaaatgccataatatggacaaatatggaaatatggacataaatcgcgaaatatggaaaaatatggaactccatcctagaagcttcaaaccaagctaaaaacatgtttttcgtgcatctcaggccccccacagtccaggaattccccgccctacttataaccctaattattaggtatagtccattttgcttaatagtattttttttgcagaaatttaatgattgcagaaaaaattaaattataaattaagagaataattgcaagtttttagaaagaagtaccagtccattcattacttaaaaaatcaaaataaaaattggatttttttggggtaaaagctctaattcatgcaacaactattattttttgataaaataatgcttcaaattgttattgggtaaaaatgcgcggtttacgccagaatttgaccgatttgaacgtatatttttgaaaaaaaatttcaactttttgttcgaattcgggcccgggattgggaatttggcaaatccgagttcagattcgtgatcagcaccctcgaaaacccctgtatacctatttttagctcaaaataaaaaagttaaattagggacccccattcttcaggattccttattttcatataaaaacaacaatttaaaataattatacccctaaatatggaactttttcgaccttattttcgcccttatttacggccttattttggacttttcgtccttaaaaatcccagccctaataataactagggcttatattttaggcaaatgcctaaaatttttgcgcacttgatacgcacaattaagcacgaaaaacccgttttccgcttgggggtgtctacaatggcttttataatgcctatttttgcctaatttcgtggtttttgtgcttaatgcctaaatgcatatttttgggcctatttagccatttttgacgcctttttcaggattttgggaaaaatccttggatcgctgatcacaaatccggtatccatttagactaattccggacccaggaccctaattcgaaagttcaaattttggtctaaaacggcttaaacaaacacacgaacggaaacatgctgaaagccaatcagcagggggacaaactacagtattattaaacaaaacaatatatagatgaacaatacaatacaattatttcatttcccaacatcctcctcccctttttcagtcttatcctcagcattatcatcatcattatcatcatctttggcattgttttgcgcttggcactcctccgtgtttgattgatcacttccatcagcaccatcaccaccattattattggcatttttgttgccatcgccgagaccgctgctcatcaacatctgcaggagacgtgccgccgcattggtcaccgtccgtgccgggcttggcgagcgcgacgtctgcgtgtgctggtcccgatgggtacgcgtgccgtacgtttggaacagacggcgccggtgctccgcatggccaacccgtcgcagcagagtgcacaaccgttccacatagtcttggtgcttgtatatgtactccttgaaaaatgcgggcagtgataagaaccaatgaatagagttccggggcatggacagacacatgcctttcccagaatgggagcggctttaattaattttctaatttttttttaatgcattgtttgaaaaaaatttcattttttataaagaaaaaacatagatttttgtttaacttttgaaagaaaaattttttgtaaaaaatttaacctttttatttgaaaaaacctccatgaaatttatgggggggggggggtgtcatggtaattttctgctttgtggtccggattttttgatttttccaaaaaattgctgaaaattgttccactttcgcttgaaattttcttaaaaaaatgcattaaagatgaaaaaaaatcatgccccctattgttgtgtttttaattcaaatttccggtgccgttcaaacccgaaaagtgccaatgccataccaaaatgcaataaaaataattaattaataatttgtctgcccaatttttgaaaatcccaaaaaatgttcccaccatacaatcccacatcattcgcgcaatgtccgcgtcatttttctcgtccattgaaatgttgcggaacagcggcgcactgaggcgaaagaacggcgcccgttgttggatgcaaaaagcgccggcccgcagcaccggcaccccttcggtggcagcaaccttttgaggggaaaatggggggaaaatgtcaactttttagagagaaaaaatctaattttccatttttaaatagggaaatttttaatagcaaaaacagaaaaaaacaatgaaaaatttaatttattttccatttttaaattggccaaaaaattgtggaaaaaggtaattaatttgtagggagaaaatcgatgaaacatttttacttttcatttttatatttggaaaaagacactaataaattaaaaaaaaaattttttttttgaaaaatttaagttttcctttaaaaacatttttttgtattgatacaatacagtacctggtcaaccagaatttcaccgatggtccaaaaggcgtttattgaggtgagcggttgggcgatccagttttgcgaaacttcgatataagtgggctggaaattgcattcgaattaatgacactttgtttttaaaaaaaccttcaatggagtgggcggaatgacaccggtgccaatgctgagaaagcatccaacgttcacggcattgggaaaattctgaaaaaacgaaaaaaaaatttaaaaaatttattttgctgttgttattggtgttttaccttgtacttgttgaagctgttccaaaattggatttcctggagcagttccaatgacgggttgttcgcaataatgcctgacaaaaatgagtgagggttatggacagaaaaaacacatattctaatgggatggaatttcatttaaatttcgaaaaaccgcttttttcttgtcaccaaatgcattttgattgcccaccgattaatacaacaacaacaacaacaacaatcaaagcaccactgttcacccacctccatcaatgtatttgttgtccacactggcaaagtaggtaggggcttaaaatttttttgtaaattaaaaaaaaaatttttttttacccgccgatgaacgccttaacactttccacagcaacaaatcgtcgggcgtccggtagccgagctcctcattctcctcgtcatttgtcggcagtttgtagttgcgcatcagctccagctgaaccgggaagaactcggcccgcgtggtggtgaacataagtctggaaattttttttttaaatgaggaaataatttcaattttcaaattttatcttcccatataaatatttttcggcaacgtccccgaaattttaaaaaaaagaagatattttcaagaaattttacaaaaaatttttttgctttcaacgacacaaatttttcaaaaaaaaaattccaagggtttttttccgagatttttttcggcgatgctatgtccctgacacattttgggaacaccgaagcaaccttggccatttgaggtcgctgaacattgtctcggcccccatctcctggcgaatgaacttctcgagcacctgcgtgttgtgcggcctacggttgtcgaacaccatgtctttgaagcgcaagtacagctgcaaatgcatgcacacaaaaatcagtaaaataaaaaaaattatctaatttttttgagtttttttcaattccaaattttcagcgtaaaaaataataataagaagtgtttaaaaaacccaaaaaaaaaaaattttttttttcatgtaagatggacagacaaaattctctgcttggataaataaatttagattttgaattattgcaaaaacatgttgaattgtcaatgcgataaaaatggaaataataaaaaataaataaaataaaacccgctgaatttggtgcagtgtttggcccattgcgagcccggcagagac

SEQ ID NO: 11665 - DNA, 1089 bp, Heterodera glycines
cacccactcactcacctgaatgatgaccagcccacggatgccaccgccatccaacgaaaggacattgatgaaattgtggtcgggcggactgtcttcgtctgaggacacttcgggcaacttttccaacacctcgtcatatatgtccttaacaacatattgtcgcaaaattgaaaattctccatttatttctggccatttaaatggcaaaaattttccaaaaatcgctgaaaaatgttttaaaaaattttttcttgcaatttcctaatacaaaattttttttttttttggaaaacttctagggttgaaaattttatacaaaaaatttttcggggaaatgaggtgcacccccatgtcaggtcccggttttttttcttcaaaatatcgagctctacaaacaatgaactccgcgaactccgtcccccccctcccaaaaccaccaaaaaagaagaagaaaagaggacttaacaaactctttacattgtgctgaatgtccaacagtttgttgaagcggaaatgttccttgtcaaatgcccggttttcaaaatcctccaccgtcaccgacgtgtagctggccggctttggtgccgttgttgatgctcctgctgctggttgtgaggaggttgctggttgagctggtggtgccgtagcagcagcagctgcggtggccgacgccgctgccgatgttgttgaactgcttgacgacgatgacgatgccgtcgaagatgttgaagtggtgttgccggtggcggatgatggcattgaactggtggacgtcctcttcagctcgtgcaactgcttctcgttgacacaaccggacacacagccaacctaaaatacggggaaaaaaagaattttttaaacacaaaaatgcgtatttgtggattcacaaaacgtgagagatggatgtgtttacccaatttgaaaccatgaaaaaatttttggaaggcaaagaaaaaattttttttatatatatatatagcaaaatctgtgcttgttaccttggtgagtggacaacgccgagcatcgcatatgatcagacttttcagcaaatcaaccctgaaaaattttgacatatttaagaggacaaaa

SEQ ID NO: 11666 - DNA, 1869 bp, Heterodera glycines
  unsure (1)..(1869): unsure at all n locations
tgcataaattataagaaaatattttatatataaatagagagagcattcgtgttgctcgagagtcaaagtttttcgggagtcgagacaagatgaggaaggagtgtccccattttcacttttttatnttttcatgtttcgtttagtgtttttaatttttttttctatcattatccgtttcggcagaccgaaatttggacgaaaacccgaaaatttacactcccctaacagccacattttggtgaaaaattaaggtgctaggtcgatccaaaaaaaaaaactcagtgattgattggtcattttccgaaagcctcggggtaccaaaagtgcctgatccggaacccggaccggcccggttaagaacaattttttgttcagtttttccagggctatctcccaggccgggtaaggttcttgatccgttcgcttggagcccgtcaggggtcgggcattctgccgggggaaccggccactttggcgccagccattttggcgccaaacaatataacatttttatttctcatttaaattaaataagcttgatatgattttaaagcgcttgatagtccctaatagcctgcaaaatttcaaaaaaattaattgatacacaaaaagttatggccaaaaaacctcaaaaaactgactttttctggccattttggcgccgcacgctatttcttttgttaaaccgaatatatttttctaatattttgcaggctaattaagaacatttagacctatttgatggtatcaagattattttatttgattgggtaagaaaaaagttatgacactttaaagtccgcggcgccaaaatggcccgcgccaaagtgaccccgacccgctgtgaatagcattggctatcctcagcgtatcattctgattttgcatgtaatgaatagggccgcaacttttagtgacgaaaaataccgaaatagttaactaaaatagtgagtaaaaatcccaatagtgaagaaacagtgacaaaaagtccgaaatagtgacgaatagtgacataattttcagccaaaaattgagcaaaaataatttttattcactgattgcagtttcaaatgagtaggactgggatttttaagaacaaaaaacccaaaatagttacctaaaaatttttgccaagtaaatttttgagaaaattttttttcatttcatagtagttttgaaaaattttagctcgattcttaggggtgtatttttttgaaatttttttatgtcgattcttaggggtgtattttttggttttattgcatttttgttaaggaattttccaaaaaatgtcgaaatagtgaaaaaatagtgataaaacgccaaaatagtgatttttaactattttagtgacgaagtcgccaaaatagtgatttctagtgacgaaaagtgacgtccaaatgaaaaaattttaattagagcatatacggtaagtaccaagtagctgcgatccacacagatttattgctctaccccattttgagtgtaaccaaatttaatggaagctaatcttaaaaaagtcaacattgtcacgcattcatttaaatctttaactcaaaaattttcaatgattttttgccaaaaatatctcatgaaaaaaacatttggccaaatgcgtgtcttttcctaatcagctaatcacactgtaaggccgcgaaggaaagactggttcgtgagatcgtttttcaactttttaaaatgagaactcccctgccccagctttttgggttggagaatccgattcctactcccatccgaatttaaagtgacaaaaattgtcacttacaatgtttattcgcacacacataacatatacatacatacatatatatccacacacgcaattgaatgacaacagtttttttgggg

SEQ ID NO: 11667 - DNA, 3492 bp, Heterodera glycines
tcgtacaccgcgcccatggagtatcggttgttgcgctccgtgtcccagatgtgctgcatgacgaactcgacgaacttcggaggcgcgtcgtggggaaattccagccggtatccgtttgtcacctgcaaaaagggggaagcgattaaaaatggaaaattttttgggttttcactcaccgctgccgcgacctcgcttccgctcaactgcgcgaacggcgtctcgccattgttgaagacttcccagcacagcacgccgaaggcccacgtgtcgctcttctgggtgaagctgcggtccctcagagcatccggcgacatccatttgacgggcagttttgcgcctctctcgatttgctttgaaagtgccttgatcgccatgccgaagtccgagattttcacctgtggggaaaatgaacaaatttagacgtttcatgacaaaaaaaatttttttggtgctttttcacccaccacgccgtccgtgtagaggcagttcctggcagcgacgtcgcaatggatgatgcccttcgagtggatgtggtccagtccgccagctgcgccgaggcacatgtagagtttgacccgcgcgctccgccgctgctgcttcaagtagttggtgaggctgccgtccgtcgccagctccatgacgatcatcaggggctcctggccaaccgcgacgccgtagaactggatgacattggggtgtcggagctgccgcatgactcgcgcctcattcatgaactccttgatctgaaaattaataaatgcggacgcagacttccaaccccccccccccctttcctcacttgctctttggtgctcgtctgagacacctctttgatggccaccgccgctcgagtcccctgctgatccacgtagacgccactcttgacgaccccgaacgtgccgcggccaagttcattgcccaggatgattgaagtgtgcgacagctcccagtgcgcgcggggcacggccctgatgagagcgacgtattgttgctgaaaagggaaaatgaaaaaaaaagatttcaagctgtttgacttacagtggtgacggaaactccggtgcgcagataattgtcgacgaatcgttcgattgttcggaagcccttgtcggagttgaggtccacggtgaacattcccttgtgtcggcggaaagatgacgtggttcaggaagccgccgacgttcaccgacagtgcatacacacgctccgtgcccgaaatttcttctgtcatgcgcaccaggaagtccccatcgttcggcagcagctccactacgtcctcgcgcggcaactaaacaaagttgaaaagacattgaaatgtggaaagtgggggggggggggggggtgggcggtgactgctcctcaccagtccgtggtagtagggcagtttccacatgtcaacgtccattgtgcttggagccggtgcgcacgcgtcggtggtgtaataaaattgaaatacgagaaataatgggagagggaagtgacaaaagagtgaaatcgcatcccttttatgtaaccacaaaacacctcaaacccagcaattcgaaaaagtgattgtaaatgaaaattttttttatataaaagcattctttttcctgaacgtccttcatttgggctcggtcggttattaaatgcctacattcttcgtatcgtcaaaatgcatctctcattttggcctactatttcttttgagtgttaatagacaaaaattgaatttaattcatgacgtttataactcgatatgtaaattagaacagagccaaaatgcctaacagaaaataatttttaaaggacaaacatcaaacatcggggcatctaaacagtgaaagtgccaaaaaaaatttcaaggagagtaaaacgggattctcgtatttttccctttcccgtaatgtcatcgttattcattttactattctttccagatgaagagcattagcgatctttgcaatgaaataaattacgtttaacgatcaacaatgggctgatgaatgctgggtggaaaatgatggagaatgccgtcatttatttgtggagtaattaaatactttaataggaagatgttttctaattacattggacgtcgttcagattgccaaatggacttttcacacttgaaaagatattgcaatcggaacacgaggcaaccatcggattattggctctgaaatcaacaaacttttgaagacgaacgctgttgaagtggtcgctgaaacaggtctattgctttttcaccgcaaatccgaaagtttccactcatcattttcccccatttcagtccaatcgaacagtttcaattcaaatgctcatcagaaattgctgcagcgtttgcgtcatgcgattgaggacaccaacgcggaggctgaccgtctggagaacgactacttcttgttgcaggaacaaatagcagcaatgagacaccaattggttgtgcatttacgccgtcaactggagcagcagaagaagataaagaagcacataaagaaggaacaacagggaggagggaaaagagtgggagaaagcgaaagaggaggggaagacggacaagagcaaagggaagcggatgaagagaaagatggaggagggggagagaaggaagaacggcagagaggaggggcagaaaaggaaggcgatctatcacatctattagattcatgctttcttatgtgctttttaatgtcagaaatgtgtaaatattgtctgaaaaagagtaaaaacaacaccaagtttgaaaaaaaagatggatgaaaattttgattttaggtcatttgaaaaacaaatttttcttgaattttgaatgcaattagagaatcttacgggctattgaatgatacaaagtttaaataggtcgcctttaacaaaagttgagccttgtcgaaaaagacagtacgttggctttgttcatgtaatttactgttctatcaatttgctaaatctgagctcagcatttcaaaattttattttccgacgggagaacttaaggcagagttttgatggatttatcgttccgtggtcattgaaatacatttcatgatgatgaataaaacggaacacaataatacaggacagtctcaagatacggatatggatcgatacagatcactcatttcttccgttcgtcgttctagttctttccaccacgaaggcgcaagacgagatgaagagttgattccttctggatgttgtagtcggccagagtgcgtccgtcctcgagctgtttccctgaaaataagggttatgtataaaattgaatgttgcaacggcttgaaagttgatgtaccagcgaagatgaggcgctgctggtccggcgggatgccctccttgtcctggatcttcgctttcacgttctcgatggtgtcactcgcctcgacttcaagagtgatggtcttcccggtgagcgtcttgacgaagatctgcatccctccacgaaggcgcaggacgaggtgaagagtggactccgggaagatgttgtagtcggcccaaggtgcgtccgtcctcgag

SEQ ID NO: 11668 - DNA, 1190 bp, Heterodera glycines
aaataatctacaaactaacactagaacgttacagttaatattgctgtgactctatcacacatacaagataaataaaatcgtttataatctacagataaaattcatcttttttataaaattcataattgtaaaaaataatcattagatataagtttatatcaaaagaacataataaatatgatttaacaacaagaaaatattttaaattccgatccaaaactattaaaaaatgaattcaaattgaattaatcatcattaagaaattattcattcaacaaaatattagttatacaatctattaagtgcgaatgctaaatacaaagtcatataaaaaataaaaatcttaaaactattctatacaaataaatgtcttaaatcagcggagtataatcacaaaataaaaagataaaataattattaaaagggacacaatcactgatgaaaaacggccatcgtgtaagcctccaaaagtgaagtacgaaacaacccggttttaacaagataaataaaaaatatataaaccttcctttattttaaaattttgaaaaatttgaaagtgatgaacttaaataataaacgtgaatttaagctattgatttaaattacttaaatattaaattaggatttagttgcaaaaattatcgagaagaatgtaaaaatcatttgcaatactttaaattaaaatttattcaaaactatctcacatgtcagcttcaaaaaattcaattcaaaataaaaatttgttcatctctcagtaaataagtcagcagcatattcattctaaaaatcttcaataatattttattctgtcaatattttttttattaacgatataccattctaagtaatgaatcatcatgcttttcagttaaatttattattaaaaaattatctaaataagtaatcaaatggttgcttaataaatattatgattttcattaaattcttattatttgtgatattttacagtgttttaatttaattttatgtcatgaatttattaaagtgtattcagttagttgcttttgtttagttgtttttttaattatacttttatttttgcattatttttgcctcaatttaaattttgcaatgtttttcgttatttttcgtttaggtattttttttaagtaaataatcatgtacttacctaaccaatttaaaaatgttttaaaatcattatatttatt

SEQ ID NO: 11669 - DNA, 3566 bp, Heterodera glycines
gtgctcaccttacactgccgcatgcacgttttccacgtgttcatgtacttttgggtgcagggctgtattttggagcacaggcactgcttcaccttttgtgcatttgccacggagacaaacgccgccgaaatgagggcgaccaacagagtacagcaggaggaagaagaaagcatttttataattataataattaccgttattctacaattaagggggaagaggttcaagttcaaacagtacgcgctcaacaaattagctctgatttgacagttggcttgtaaaaattgtggggtacttgtaggtttgctacccccccccccccataaaaatggctctaggaaaatccggctctaggaaaatccgacaccggaaaatccgacactggaaaatccgacacaagcagaaaatccgacaccggtggaaaatccgacacaagcagtaaatccgacattggaaaaaccgaccccaactttaaatttaaaaaatatttttgattgtttgagttaatatctggctaagtttatcaagttttcgatttggatttaaaaaaattaattgattctgccattcgatgggatattgatggcaaataataaaagggttgtcgattgttgcgagtcgcataaatctctgtgagattcatgtcttgcaccaagtacattcttatgcttcatgccctttcatctgattccatttgccggattgttacaattttttgagatgatcaaaaagaacattgaaataatatgattattatatacctacctttaatctattttatagcaataaaatatttattttaaataacttaagtatttaacttttattatatgtattttaaatatttactaactcaaacaatcaaaaattatttttaaaatttaaagttggggttggtttttccaatgtcggattttctgcttgtgtcggattttccagtgtcggattttccgcccccccccccctcccccctttttttttgcatctcagtaaaaggcgatgcgatggaacagcgatgaaatggccattaaattggccaatacattatcgattaggctcaaaagatgtgttcaattttgttattaaattaaaatattattattcgaattcggctttttatttaaatacttggtatttttttaaaataattattgtctattttttttattctttattcgccaatttctttagccattgcattttttacaattgataattccataattaattccaacaacaaaattgactttttctaacttttttgataaattaattaaaaagtgaaataattaatcaaatttaaggaagcttttaaaattcaaacaaaaaatatcgccaaataaaataaagaagattaacatgaaataatttgaaattatggtttaaaatgcatgcataagtgaatatatctaaaatttataaggtacattgtttaatacctacaaattcgcacacacaataagtatcatcacataataaatatatataaaacaattgaaaatatccttaggctataaattacatatactgattatttcaacaattaatggcataatttgatattttgtttagaaaaataaaaatcagaataaattgaattgtataatatatctattaatgattttattaattctttgtatttgtttataaaaaacaaataaaaaatataaaaaagcaattccaattccgggagtatatatgctataatacgaacttattattattattattattattatttttaagcttttacaaatatataaataaaaattaaagtttattataaaaacaatattttattgtaaaatacttaaaattatttaatcattgatttaataatattcaaatttaaaaatttacgtaaaaatataaaaattataaaattttggtaagcctgagcaacatcaaagacaaaatgactggtttagaagccatttgataaaaattatatgaatttgaggagcttttatttttatttactcaaattaccaaatgagaaaagtaaaaatcttaaataaacttgttctaagaatctaaaactttaaaaatatatttatcaattttacattatcaactaatatttgaaaaataagcgaaattaatataaaaaataaagcattataaattacaataaaaagtgtcagtaataatacataatggagtaaacatgtagctttattgtaatctttgaaatgagtaaaaaaataacccgagaagcttcttgcattaagaaagaaaattcagaggaaatagaagaaccggaaatatcaattgagaatgttaatgatagcaaaattttgacatatgaagatagtttggttttaatgaattaatatattatgaaattgttctaagaataaataatcaatgtcattatagtaattctgcactggttttttattaaaaaaactatttaaaattttattgatttataatattttattaaatatgtttatgcgattttatattttatatttatttgtctcttatgagcaatgcagagttaataatttctgtgtcaagttaattttttgttaataattattttatttatactatttaaaatttttcatgtcaaacatttatttttatgatgaaaatttttttctttgcaattaattcaaatttatttgttattattcctattaaattccaatttattataacattgcccatcctttattaattaattttttataattcatttttaatttttttaaattaaatatcgatataaaatttttattttattaaaaactccttcaactatctgaaaaattgagtttttagttttttaaaattttgaaagcttcatttaaattaaaaacaaaaaattaataatcagaatgaaaataaaatgtgaaactgtgaatgcaaattttcttacagaaaatcgggtatgttaaaaaattttaataaataattgtttaaaaaaattatttaacgaaagtattttattgatctacatattatattataaaaataaaattcataaataaaaagacaattaaattgttacgcttactcataacttacaaaatcaatttattaaattagaaaaatttgaataataatatgaatgtataatttaaactataaagcaaattcatcatcttattgacaaaatttttttgactcggtaaggcgctttgacaaagacggctttcgttttgcaattagtcggtcaacattcggaaattggtctcgaattttttcggcaattacgtgcaatcattttaaaagaaaaaaaacataaaagctaaaatttattaatttttttagcgcaaaatcaacaacaaaagcgaaattttcgcttttttgcttattttgacataatttattaatttttaagaaaatttaaatttattcaatattctcgagaaattttggcgaaaaaatgattttttgaaaaattttcggtttttgggctcaaaaaggctaatttagctgatgggggccgttctaatagaggtttttttgaaaaatgccaaaatatggacataaaatatggaccaaaatgccaaaatatggaaaaatatgaaatatggacataaatcgcgaaatat

SEQ ID NO: 11670 - DNA, 2518 bp, Heterodera glycines
tcttttagtaatcaaaagtatttggaattaattattctgagcagtaatggttggttggatgattcacattcaatcagttgtcatcacaaaaaatggctaacattaggcaaaaaatccaaaaaaaaagtaatgtgttgaattatacaattagaagaaaaaataatttatcgattttattaataattattttttaattaaatgatggagctgaaagaaaaaataatttatcgattttattaataattattttttaattaaatgatggagctgattgtgagttattttttgaggttttttgaaaaaattttttatgtaagcttcgtcggcggcataacaaaactcaaaaaatttaaattttcattatgtgaagcaaaggaaaattatataaaataaattaaattgaatgaccacaaattaataatttcattttgctattttatgaaagcgagaaatcaaatgcatttgtctcctctgaataatcaaaacgaattatgcatttgcgaaaagcaaaaataatttccataaattccattagagcaatgcgttagagaggagttttaagcaaataaatattctgattttcaatcacaaattctcttcacttggaaaatttttataaaaagaattattttgtataattaacataatttataataaaaaattatacgcattttaaataattaaaattcacagttacagtaaccaaccaaccaaccaccgtgtgcgcaatgttcaaacttttgactgcattcacttttgtgctcgttttgagcattgcatggtgtagccaatggaagagaccgtaaattttcattgaaaattgaaaaaaaaattttgactcaaattttttcttttcctttttttgatcatttttcagttatcagtcagagctcgacattttgaaaaaaacctttacctggacctgtattccatgtggacctggacttcctggacaaaaagccaggaaaaatccaggctcttcaagacctggatccaggcctggacctggattttttgattgttttaaaaagcaaacaaatgtttgaaaaaaacaaataattgctgaggaacatctaaatattcatttttcagttatcgatttaatgaaatggccatttaagcaaaatttttgttttcaaggacgactaattgtgagaacaaattctaggaattctgaaaacaatttatgtgtataatttcaggcaatttatatttttttatttttgaaaaatttttagcttctctaaaggcacttacataatccttttatggaaaatagccacttctcaaaatgccttaaagtttttttattagcttgcaaaattgcacaatgccatagaattttaattttaacgactttttcggcattttttaacttgtcacattcaatttttagcccagtttgctgtgacccgtgctccaaaaagtactgggactgcaaaacaaagtgcgaaacggacgacccggacaacatggcgtgcgagccgaactgcacttttgcgctggacaaatgtgcgaaagcgcactgcaacaacaaattatgcccacgcccgaggggcaaatattgggaaatcgatggatgatgggccaaggaaaagcgcaaattgtggaaaaaagggaattaaaaagtgtgataatgtgttaaaattcactcacactaattaaatggatggatttgaataaatgtggtaattaaatacgaaaagatttgctagtgaatttccaaaataaaatatttggtacttttccactgtgctcgctcctcccccgcccccccccccaaaaaatgtcattatcccgacaaatcaaggcacttttctaggtagtttttttagacgcctgatcaagaaataaatttcacatcattgatcaatcgaatcctctcccgagagggaaacgatagggaatcgattggtacaagtttcagggctgtcccaaaaagtttttggaaaaagcgcgccgcaaaaacatttttatgaatttttgatttggaataaaattttaaaaatgatgattttcaatcccaaatgtgactttttgtttgcaaaatgatgatattgaaaaatcccggttatagtacaacaaattttgtgttgggatgatgcggaccatttttcaaaaaccaattacaggatttatggcttacaatttgtttccgtgtgtttaaaccaattttgatcaaaaatacgaaattcaaaatgtggacttagactttttattctaattcaggtcaatggtttaatttggaaaaaataaatcaattaaaatcaaaacataagaaatgttgcacaatttaatagtttttatttgagaaaaagagacaattttttgtctgggatcccaaaaaaaaataattccataaataccacaaattcatttttaataacatgaaaatatttgtataaaaaattcaaaaaaatcgctcaattttcttattttattggtattaatgtaaaaatcgataatgccgtgattttttcgaaatgaaaaatgtttattttaattaactataatcagt

SEQ ID NO: 11671 - DNA, 1345 bp, Heterodera glycines
tcgtgaaaacatttttatggggcttttggggtctgagaaccagaatccaacattcattttgacgaatttcgaattccgggtcccgtatttgatcataaaatcgagaattctagattttcaacattctctcgtttgttcctaaattgaccaaaacaagttaaatttagtcaaacccatcgaaacatcaaaaatggtcattctgtacaggtatgaacataaaagtgaattttgaaaatttgaatgttcaactttttagaaaaaaaaaaattttcttccgaaaagggggaccttccatctatagtattacccatgactgtatgcgattccgtattttttgacgccaggggcttatttcaatttcagtcatatcagtgagtgatatgatgacggaaattgaaatatgccccagaacgacccgcgactcaccggtcccaccccttataagccattaatgtgggttggtttaaaatctaactgtacctcttttcactaagactttgatcccgatgccacacaaaagcgctaatgcaacggctaagagtggcccaaaaatgattgtaaggacaaaaactggaaaaagaaaatattatttaacaatttaatatatggtatttcatttcatttaaataataataataatggtttttatttatatgcataaatttagaatattattttaataaagttttcagcaaatttgtttgataaggaatttaaagaccaaaaagtttcatttgcgcaaaattaaattttattagctccgttcatttatcagggcatacaaaaaaatttaagttttcaaagtgtcaattgaagatttttttgcatatcacagcaaaaatcaaatgcaattttaaaattaagaaaattttcaagaaaatattataaaaatttaaaaacagcgaatatgcatataacccggcccctaaaaataaatccatcttttatcagttcgaatttaaatgtcccgacttttctactcccggcaagtcccggtcccggtttttgtcaaatttcccggtcccgctcaactctacttttgcgtgattgtgttcacacgaccaaagcgaacttcaccgtcagcactcggcttgtgaaaaatgtatgaatgaccgttgtgttgaagctttgtacggttcttttctgttagaattgcctgcattttctaatctataacttaaacaaaaaaattattgtcttataatttacgagaaacatcaaaatgttgaaaaccccctttctgtttttgaaattttgccgaaaaatttcgaaaatttttggtatgaaaatggcccaaatgccttagtagggaactggcggcagggaatcgggcggtaaggaattg

SEQ ID NO: 11672 - DNA, 2211 bp, Heterodera glycines
gcggaaattgtgaattaattctcagaaaaatggctatctctttttagggcaattttttatcttgtaaccccgatgctaatccgttccgcagagcctcttcaaaattttttccattgccgcaagagttgcggaaattgtgaattaattctcagaaaaatggctatctctttttaggacaattttctatctcgtaaccccgatgctaatccgttccacagagactcttcaaaatttttccattaccgcaagagctgcggaaattgtgaattaattctcagaaaaatggctatctctttttaggacaattttctatctcgtaaccccgatgctaatccgttccgcagagcctcttcaaaattttttccattaccgcaagagttgcggaaattgtgaattaattctcagaaaaatggctatctctttttaggacaattttctatctcgtaaccttgatgataataaggtccgcagaatctaataataatagatacaatgagacttgaacttttgtaaagaaaattataaatgaaaataatcaacaattaattaattaggtaataaaatcttttttggaaatagcttaaacgctgcgatttatatatctattttggcttctttagtctttgtgctttcgaatgacaccaaaaagacaggttttgttcaaacatgaacaaagttattgtataaaaagcaggtattgtcaattgattggactcataaaatacctttggactcataaagtgcaatatagcaaaattaagtgccttttaattattataaattaatttgattttgtgcgcttttcagcaaattgccattacaacaaaagaatcattgcgagaatttaaacatctgctgacccaactgtacggcgagcaaatatttgagtgccgtgggacgttgtcccttatgttggatctcgtcgaaattttggtgagaaaaccgtttttggtcgattcctaaagtgcaaaaatcaaaaaaacgattttttctatgatttttttcaatttttaattataaataagtaaaatttacttaaattgtacaagtttttttagatctcgaataaaaataattaaaatttacctaatattaaaaaaaatcattaaccaaattactttgaattttgaaatattttaaagttcattacaaatggattaaaattaaaaaatgaactcaaattataatccgcttcaactataaaatttataggaattgaaactttaaaatatttaacaaattcaaagtaatctggttaatgatttttagggatgcaatttttaggctctaaaaactgcaaaaataggtaggctttaggctctaaaaaaccccaaaaataggcactaaaaaatgaaaaataggcactaaaaatcctcaaatttaggggtgtaaaatgacaaaatgtattcaaaaaaataaaaaaattaggccaaatcagtattgagataaataatttttaaatcacaaattcttgtcaataaaataaataaataaattttggagatgaatttttgaaaaaaattttcatttcttagggatgtatttttgaaaattttcgggtcggttgttaggggatattttttgaaaaaaattttacgttgattcttaggggtgtatttttcgtttttattgcatttttgttaacaaattttgggcaaaacgccaaaataggcaaaaataggctctttaaaaaatttttaggctttttaggcgctaaaaataaaagcctagaaaataggcactaataactcgaaaagtagcttaacaacagtcgaaaaaaacatgtttttcgtgcgtttcaagccacggggagctcaggaaaaaaataggcttttgcctaaaaattgcatccctacttattaatgtatttagaaaaaacgaatagagggaaaaacagcaaatgatgaacaccagcaatgacaactcgagaatgaaatgctttatttttactacacacatatatcaattttcattaagcatagtgatttttttaaataaaaatgactttttgggccagtttgaccctgaggcagtttgcttcgggcaaactgtggattccggcttgttcatgtgaatacataataataataaaataataatttaattctctgtcgaaatctgccactgtcgaaatcagtcactatcgaaatcagccactgtcgggaatgtcggaaaactgtaaaataaatgaaaatagttcactgtcgaaat

SEQ ID NO: 11673 - DNA, 3352 bp, Heterodera glycines
aaaccaatgcccaaattgtgatggtaattgcaattttttcaatactgtacaaaaatttttttaaaattttagatgatgaagttgacactgacccttcacccgaagaagttgagaaatggacgccgaaacaagtgattaagtgggaccagcgttgctacgagaaaatgccagctgaagaagagctttggcaagaattcctcgacaaaggagaggcaaatgtcagtaaataaaaattttgatccattttttaaattatttaagccgcaaccaggcactagcgcaccagccccaagcacagggctgagcactagcaccgtgtccaaccgttcgccgcaaagtgtcaggccggaggccacaagccgcgaccaggcactagcacaccaaccccaagcacggggttgggcactagcaccgtatccaaccttcgtcttaatgcgtcaggccggaggccacaagccgcgaccaggcactagcacaccaaccccaagcacggggttgggcactagcgccgtgtccaaccgttcgccgcaaagcgtcaggccggaggccacaagccgcgaccaggcactagcgcaccagccccaagcacggggttgagcactagcgctgtgtccaaccgttcgccgcaaagcgtcaggccggaggccacaagccgcgaccaggcactagcgcaccagccccaagcacggggttgagcactagcgccgtgtccaaccgttcgccgcaaagtgtcaggccggaggccacaagccgcgaccaggcactagcgcaccagccccaagcacggggttgagcactagcgccgtgtccaaccgttcgccgcaaagcgtcaggccggaggctacaagccgcgaccaggcactagcacgccaaccccaagcacggggttgagcactagcgctgtgtccaaccgttcgccgcaaagcgtcaggccgaaggccacaagccgcgaccaggcactagcgcaccagccccaagcacggggttgagcactagcgccgtgtccaaccgttcgccgtcaagcttcaggccggaggccacaagccgcgaccaggcactagcgcaccacgccaatatcaaaacaaaaaacataaaaatgaatgaatgatgaaaaatatttagacaaaattcaattcagtaaatattaatgcatgagaaaggtcagagaattgctggacgggcaaaagaaagagggggaggagagaacggggggttaattatctcaaaattcagttctgtacgatttttatttaaatatttttttataaataattttaaaaaactttttagatttttaaaaaaaaaatgttgtgcaaatgcggcgaatgcttcgagtgcgaagatgaaaagcgccgcctcaagcgcaatcgggagctcaatacccgcaaagagcaaattaagaactgcacaggcaatcatctagcaccggctatgatggacctcaaacgccggaatatggaactgtttaaaaaggcttataggccggtgaagggcgtcatcaataaaataaccgggggtgagtttaaaaaagaaattgaaaaaaaaaaaacaaaaaaaattttttaggcccttggaatgtagaatgtgaggtctgccatgagaccttcacatacttcatggtggagtgggaaaactcccggaccgacttctcgtggggtcccgggaggaccatggtcgaagcggataacatagtaaaaatttttgaaatttttttccagttaaaaaataattttagaatcagaaagaaattttggctcactatgtaggccaaaatgatctactccagaatgaggtggactattatcagaatcttggtaataatcctccgttgaatgtgtccccaatgggggaggatgctataattttgaccagggacgatggtatgccgattggtgcagaggtaaaatattaaaaaaaaaacaaaaaaaaacaaaacaaaaaattaaaggcaaatgatggggcacggtcggtggccggggaaagcatcgttagcaaaagagggggagggcagagaaagagagagagagagagaaagaagagggcggaagaagcgaagaaagcacaaagagatggagcggaagaagaagaagatgatgactttttcttctttgcgagaaatgggggagagaaacgaggggaaatggacatggaaagcatggtagtgaaaatgaaatataaatttaaaaattaaaattattaaacaaaggaggggtcagtcgccagcaccacaatgagcaagagcacgaatcgcaccaatcggagcagtggaaaaagaaagcgagagaaagcgagagaggcgaagaagcttagagggttggaggaggaggagagggaaaaaatgcaggagacgccaaaaacaagccgaccgaggcgcgggcgtgatggacagggaacgagcatggggacgggagggtgaagggggaagaattgcattttttgaaaagggggaattttcaaaaaaatgtttttgaaatcgatcaaaaatcatctgttaatttttttatttatgttgagtaaaaatttcaaaaattaaagtgcaaaaaaaaagagattaaaaaataagctatgaaaggattacataaaaatataaatcggctgggaattgaaaagaatttaaaatattattaagctgggaatgtaaaagttttttaaaaacggctggtaattgaaaagaattaaaataaattaaaaaaggggttgttgggaaatacgttagtaaagtttaattacaaaaaaatcaatttgagacgctaaaaattgttgttgagttttttggctgtatgagtccactctacggcacattgcgctgtgtgcgatagagaatgaaaaggaagagaaaaaagatagagaaagagagagaagaagagagaacatcataagtgtgggggagagaaaaagagaaaaaatgaccccccacacacaccgtccactcaataatattgagcgcaaaaaaaaatgccccccccccttcactaatccccccgcccgccaacgttcactgaccagcagcagccaacgacgccacactttatcgaattacaatttatgtaatatcgatgccgtcgaaatgtataaatttttattacaaaattacagtttaaataggaaaaaattttattaaaattacagtataatgaggaaaaaatgtggtaaaattccacccccacacacaccgcgtttaaaaaaattttttttaaatacagtaccccgaaaaaaaaatgcggtaaaattttgcgcgaaaatgggccccggacacctgccggtaacagattttttcacaccctcaaaggtgtgaaaacacatgttttcacaccaccccaatccctcagacggggcccgggccataactact

SEQ ID NO: 11674 - DNA, 866 bp, Heterodera glycines
ccccaagcacggggttgggcattggcacggtatccacccttcgtcttaatgcgtcaggccggaggccacaagccgcgcccaggcactagcgcaccagccccaagcacggggttgagcactagcgccgtgtccaaccgttcgccgcaaagcgtcaggccggaggccacaagccgcgaccaggcactagcacgccaaccccaagcacggggttgggcactagcaccgtgtccaaccgttcgccgcaaagcgtcaggccggaggccacaagccgcgaccaggcactagcacgccaaccccaagcacggggttgggcactagcaccgtgtccaaccgttcgccgcaaagtgtcaggccggaggccacaagccgcgaccaggcactagcgcaccagccccaagcacggggttgagcactagcgccgtgtccaaccgttcgccgcaaagcgtcaggccggaggccacaagccgcgaccaggcactagcgcaccagccccaagcacggggttgagcactagcgccgtgtccaaccgttcgccgcaaagcgtcaggccggaggccacaagccgcgaccaggcactagcacgccaaccccaagcacggggttgggcactagcaccgtgtccaaccgttcgccgcaaagtgtcaggccggaggccacaagccgcgaccaggcactagcacaccaaccccaagcacggggttgggcactagcaccgtatccaaccttcgtcttaatgcgtcaggccggaggccacaagccgcgaccaggcactagcacgccaaccccaagcacggggttgggcactagcgccgtgtccaaccgttcgccgcaaagcgtcaggccggaggccacaagccgcgaccagg

SEQ ID NO: 11675 - DNA, 2435 bp, Heterodera glycines
tttttcatcaaattaccaaatcttgtggatttgtggccattcttgtaagaaaaaataggagtttcgggggcgcggcggtcccgataggcgccgccggggaaaaaattggaaatttcgatcatttataaacaggttttcactgaaaattagccaatttataggtaaaattttgaaagattttatgggaatttaatccaattcttaggggtgtaaaagtcgcgtttcgcgccaaaaagcgaaatgcgaaatgcgaaacgccaaaaaatgcgaataatgcgaaaggcgaaatgcgaaaagcgaaacctaggcacatccctggtaggtaccagggctgttgcaaaaggaaaaataaaaagcgaaaaggcgaaagcgaaatgcccaaaaaaagcgaaaaggcgaaattttttttccaaaaatagatgaatttgaaagtctcaaaaaattcaccttttaaaatgcttaactgttctgaagattgactgctctttggttttcataaattctttatgcaaagattaataaaaaagaagacgtgaatcggcatcgaactcatgagagagagtaatgtcaatgctaatgcactaaccactacaccacaatagacatttacgtagcaaagcaaatttactttatttaataaaaattttagtaaaatggttaaaaaattcaaaattttgtgtactttttctcccacgaaaattccattgtttattttaaaaatccatctttaggggtgtactttttttcgtttttctgcaaaaagcgaaaggcgaaaagcgaaagcaaaatgcccaaaaaaagcgaaacgcgaaaagcgaaacttgcaacagccctggtaagtacgtatgtgtacggtatgcgtgccgttcgcagatttaaaaaatggacgcacagttgttacacatttataaatcaactttcttatcccaaaatttttattctggcgcatattttttagcgcatatttcagcacttcttggtacgtattttattacatatttcaggatttttagcatataaaatcccatttctctaattaggcatttttagagaaaaaaaaattccgtaatgaattatttggtccaaaaaatgacaaaaaaaaattttagccaagaaacccttaattgcgaaactcaagtggaaacattttttcagacccaaacaaaaccaacggcacgtttattttgaaaattgaaaaactttccgaatttgcgcaagagaaaaacggcaccaagcgtagcagtgaaattatgttcatcagaggaataccgtggcaaataatggcaattaaagaagaagatgctttatacttttacgtccaatgctccgatgataaaacaggtggctaattagggggaaaattttgaatgtattaattacctaattaagactccaaatggaaatgcccttattcggtaacatatcaaattgatgcacaaaataaaggaaacgagcactttgtcttcggaactggcgggcacattggcaccaattttgaatgccgatcttgccgtaacagacgcggattccaggtcattaataaatgccaaatttggtcaattaatgtgattagcggcattgtgactgggatcattaaaaagtcatatttagtatctgatgagcgagtacaacgattggtacaacagagcggaggacacgttgactttgcgtgccgatgtgcttattggcgaaccatataaagacactaaaaattaaaaaaaaacaatttgttgggttcgtggctgtcattcttggggtttgaaaaattcggggacacagacccgaaaaatgttcttatttgttaggggattcaggctaaactaaccacaaaacttttcgagagcgggggggggggaacccgacaatggggaagaatgagagacttattaacaaatagggctcagaaaagatgacacctgcgaaaattcgttaagtgtaggcaaattttaggaaagaagaaaatgcaaaacctgcattaaaattttaaaaaatatttttaaactgaaataaatagttttttggaattaaaatattatatggtaataattatattaaaattttttattattttggaatgatttcgggcctgacttcagggcgcgaaatgtattatataatctaatgctaatttttcaatattaattgttgcataaatctttaaaatttgtgtttgatgaaaaataaaatcaacaacaacgctttggcttacacttgaaaaggtttagaaaaaaaacacataaaaaatagacaaatttaattaagcgacaattttctaaaaaccaagaattatttttaatgatttgcattatttttttcttaaatcatggttaccatttgttttttgtatttcattattatattttatcaaaattaaaaagtccatttgtttaaattaaattacaatttatgaaaataataaataaagtttatttcgt

SEQ ID NO: 11676 - DNA, 529 bp, Heterodera glycines
tttttttataaattttcactacttttttttcatcattcccataaagcttcaaaaattcaatacacaaagtgtttgagaatttttacatttttggacttaaagaaaattttcaaaaaaatttcttttttaacatttctccgacggtaaagacaatctcattcatccccagcataaaaaaatagtttgaaaaagtcaccacataaaaaaatgtattaaaaaattaattttggtaaaaaatacaaaacatttaaataaaacccattttttattgaatttgataaaaaattgaagattactttgctttaaaaaaattctaattactttgaaatcgaaatcaaaacaatttcttagccaatttggatacggtatcgaattttcacccttttgtaaaaaattttctcaaggtgttgcacattccagtttgcattttctggaataaaaaatagtttttggccaaccaaatgacagattttcaagttttatgccaaatttgaaaaaatctgagtaatttaaggaaggggtggggggg

SEQ ID NO: 11677 - DNA, 1597 bp, Heterodera glycines
  unsure (1)..(1597): unsure at all n locations
tttcatgtgaaaaaataaaatcaacancaaagcgtggcatttcattttaaaagtttataaaaattaaaattttcaaatttttgggcacagacaatttatggaatctgggcaaccttgaaaatatggcaaaaaataaaatttacatacatctgaaaccgggtttttgtcagaagtttttgtggtataatgaattgttaatcagattttttgaaaaatgtgagttggtagaaagatgaattgtgaaattttgagcgtgaattaatgggaacaaactttacaacaaaaattgaatatttacttaaatgttattttaaaaatataaaaaattaattattaattaagcgacaattttcctaagtcgagaattatttttgatgatttgcaaattttttgaaaaattatgactacattatttttggtattttttcattatattttatcaaaattagaatagtccatttgaatacattacaaatttatgaagaaaataaataaagtttaatcaaattaagttttaagattgaaatttatcaaatttattctgcaaattcttccttttgtgtttagccgcccgccatctttcaattcaaattggaatgaaaaaaagagccaaaatggctaaaaaaatatttattaaatttcaaatattatttttataatatttgcattaattagaactatcgttcgtatgtctgtctcttaataaagcccgggagtttttttttttgaataattgggatcagtcagaactaaatcgcttatccttggtcggtcccccgattcctatctgcactattttttgctcaaaaataatcattttttatgtgccattgttgtcataatgtaccaaatgcaatcgacacggtcggaatgttggcacaaatggaaacgttttctggaacattaaaagagcaattattatgaacaatttttgctaattatggcatggacatttcggttcggtcagcgttttaatctcggcttttttattgctcctccgccccaataaaatgattaattgaacaaaaaactttgggggtgaaacggccgggactcagttttaccgtcaaccgttgtttcggacatttcatccgaaatgtcggtcaccaaattcgcagagggcgtcgaaatcgtcttggaagccgtggatgtagtagtcgtagaaaccgtcgtcgtcgtcgtcgtagtggtggtgccctccggcagcggtgccaaaaccgtcgagcttacaatgcctttggtcacacgcgttgcattttttttcaaaaatgtcggaatcatgaagttcatattcgagtgtttctcgtcctttttgcctagtttgcaaaaatggcacaatttgccaacttttgagcaatagtcattggacggctgacagccccaagtgtcgatcacaccactggctgcaacaaaatgaacagcattaattaaatgaacagcaattaaataatgaatttaattttaccaaagaattcatcaataaataaaagccaaaaaaaccctataaaaattggcacaatttgtataccaaaaattataggatagataaaaaattcattncaataantgtcctaaattttatcatgcatncatctgt

SEQ ID NO: 11678 - DNA, 2892 bp, Heterodera glycines
  unsure (1)..(2892): unsure at all n locations
ctgacccaaaatccttactcaaatcctgacgcagccccttcacttcgtcctggatttgagcaagcgcatttggcgaaagctgcccctcccattcctcatcccacgcgccttgctgctgctgttgttgttgttgctggtggtggtagtgttgctgctgctgcgggtgttgttccacatgtgcaacttgggcccattgtggtgtcggctggtagggaaccagttcccacgcatccgggagctgtggcccaatttccaattgctgtgcaggcattggtgggtccagttcccacggctgctgctgctgctgctcatgctgtagaccttgtccatggtccatgcccatcagctgtccctcatgcggcgcctgttcaatcaagattaaaattcaaaaaaagcaaaaacagcataaaaaataaagaaaacttacctcgttgatcaatccatcggcctgataattgctgatcagcccttggaccacaaagtcgacctcgtcgacaagtaagtttaaccttgcacggagttgggcacgttctgcctggcgctgctgggaattcatttttggtttgcagggtaaatgaatggtgaaaaaaagagggcgactttcccatgggcccttttgtatgaggcgggatcgtggccatctgtgtagcgaaggtccgacgcttcggtgaccgatgcgaacggggtcaaattcaaataacaatgggatgtgcggcatttctgcatcggcacaaaagagaaactaatgcatcatgccgctaccggcgatgcgcttgtcacatttacgggtgtattcaaacaccaaaggggattaaagaaatttataatgattaatatttaaatttattatgaaatgatgattcaaatacatgaactattttgcaaaattgattaaagtttgtgatcaatccatccttccggcattgttgaacatttgcccactttcattagcattgttgtatgggttgctttggttattcccagcatcaaagttcgtgcaattgtttccgaaattgccaaaagttgaaccattattattagtgaagctgcttctaaagcgattgttgttgttgtaatcgttgtttttatttgcacagttcatgtcgctcagtctcatattaagtgaaacacatcccctgcacatgtgaaattgcacttttacccctcctaagggatcgaactcaaaagcataattaccgccgctgttgttttttgtcgaattgaacaatgtttgtgagcagcaatgacaaagattgaaagttagaatatatttttttcgtaaaagtttccataattgagcgttagcattgtcgctgtggttgttgctggtgttgttgttgttgttgttttgctctgctggcgcattttgttgattattaaaagtattcatttttattttacaaaaaattcttgtgattaaaatgaagttttgcatcatatttgcgcgcttttatatagcgaaaaggtacagtgctgcgtgctacgtgaaagacgaagttacagtgctcctacgcacatataaaagtgcttaaaattagcacaaaatctcacttgcgcgcaatgcatttgcttatctcattctcgcgcattttggactgttccactgacgaagtgggcgcgcgaatttgtgctagtgttgcggatcgagaaaaatagttgaaggaatttgcacacagtaagctcatcactacatactccgaccgtaatggcttcacccacacgctcttctttgctgggctcacggaagaaggcgccgactaagtgcttgcttatggtaacctgaggcgcccctacaatgtttgcgttgcggcccattattactcgcggcaccgtattatgctaaagtacccgcaattcccatgtgtaattgagaagtgttttggtcaaagggatgatggacccttgcacaaatattacccgcttgaactggtaaaagtcatcgatgactgctttccacctgtgtacgcgagtttactgtctcaaaagcgtgacgactcaacgtcatcgtcatcatcctcgtcatcattgccgcgaaatttcctatcgtcttcttccgatgatgctgattatgacgaccatggtctctggtttggctcgatgcccacacaaaacagtgttgcggaaacaccacctcctccgtcttgcgtttatgtgaagggaataatatggattgaaaaagagcaaatcaaaaatattctcagtcaagcagttaaacatgactaattgtgcatttttctacctaaaaacagcaactctgtaactcagatgatgatgaatctttttaatatttccaaaactgctacttctcttactaaattatgtatttttctacctaaaatttgcaacttcgaacgcttcattattttaaattttaatcttctatttgttaattatgcatttttaaaaagcacaattccgtataaattacggctttataaaaccaaaatcatgtacaatagcattcatccccacaacccccttagttacaatagggcgatagcgtttcgacagcttaacagaaataaccgtcccgtccttaatgttgggcctcaggaaattggggtactcaatcagaattgaacaaatgtcatcatcatcatcatcatcatcatcatcatttgaatggctcattgcgtagcgtaggacactcctcttgaatgtgtcaaagtggagaagctgacaggcatcggcgctcagtgttatgccccgtactttgagcaccgttttctcctccccgctttggcggtgccgcatccgcagggcgtactgcttgcacccaccggaaacaaattccacgagttcgtggtccggccattcatccgaaaggtcacctaggtggngtcccgtctccagagggcacccgtccgcctcacgatgngcgaaacacacact

SEQ ID NO: 11679 - DNA, 4984 bp, Heterodera glycines
cctcttcttcctcttcccattcttcatcttccatttgttcttcttccccctcttcttcctcctcccattcttcatcttccatttgttcttcctcttcctcttcccattcttcatcttcctcttgttcttccttcactattgtttgctcctcctcctcttctatttttatttttctttccatttcatcaatattttcctcttttttgatcattttttcctcttttaccattttcaatcgcttctgatcacccatcataatttgttcttctccaaatgataattgttcttctttaattattgctgcttctttttttatcggaaaattttcattatcaaaacttttctttttttcaaatttaatttccattttttgtttattttttgacccattgaatttgttttgctcacccaattggtccaaaatgttagcgttttgttcacttttggtaccagcaattctcaaaatttggcaaaaaaaggcaaatgaaaataaaaatgttgtaaaaaggtaataataatttaaatttttcatatttgtaaaaatgtaaataataataatataaaataatttttttcttttggctttgttcgtttaaatgctaattcttttatccttcataataaatcaattattgaatttcattaaaacatttttaattgcaagaaaaaaaggcgcaacattttattacaaagatttgcaagaaacatatgtaaaaaagataaacaaatgcagctttattagatatgcaaaaaaacatttccggatttttaagatatgagaggattgtttttaaattgaatgggttaatttgtaagcgtactgtgccccccccccttgtcaaataaatattaatgggtttttcattttttttttaatttttagaaatcgagatttacattaaatgactttacctgtatttaacaaattttcaaaatgtaactattgctttgttcatgtattctgtttaaaacgctaggctgcttcaactttcgatgagagaggtcgcaatttgagtatggagaccgtttgagtgtgactcattaaatacatgcatttgataaattcatttttaattagagcaactctccaatggcattggtcattttttggtcaaaattcataaaaaatttgtatggaaacattaaatcgttggcggaaagttaataaagatttgcagaataatttttcaatttgtccttctttttaatttattttaagtgagacaaaatgaatgaaattattttatttaaaaaataaatgaaaaatctaagcgaaaatttaaaaaagaaaatataattattgaaaattctgctcaaaatcttttcgcatttaaaattttaatgcgatgaatcagcaaaaaaaaatggaaaaaattggagcatttgcacaaacaaaagaaaagccaaagcgcgtcgattaagcattggtattttggtctatttgcgatgattttttgaaaattggaccattatttgcataacagcaaaaataatccgccgttatttgggcgagattaaaaatatgaaatcattcgcctaaattttgtgtcagcgcattcattgcataaaataaaagaagaaatgcgggagaatttgcatttcatttccaaaaatcattttaaaaatatcattttttgtgcatttccgttgaattaccctttaaattttttccatcggttcgatttgtttgaagtgcgcggccaaagagtggcggcgcacttaaaaatggcaattatcgatttgcggaacgaatttaatggaattaaatatttcattttaaaaacaaaataatttttggtttttaaaaaacaatttaccagaatgattgacaggtggcaaaagaatgaataatgagaggaaaaaaggtacaagaaataataaatatattttaaaattaattacatttcaaatttaaaatcagttttaattgtgtccgtcgctgtcgtctcaatggcctcgcttttgctttgtctgcttttaattctctgtttttccattttcaaaactgctgaacagcaacagcaacccgacgaaaaggaccatcgacaattgctttttgttcaggcaatttggcggcatggcgacagagtaattaaataattaattagataattcattaacaatttaaaatattaatcgactttttttggtaattctcaggcgcctggcaaattgccttaccccggggaccaatacgacgaaaaatattggccacgtggttggggtcaattgacaaatgtacaattgagcatttgtcgagtttgtgtgtttatgttttagcttggcatgacgcaaatgcgcgagttgggccaatttttaagacaacgttatgtgaccgaactgaactttctcgacccggcttatcatcgcgaggacgtaattgggggcttaagcaaagttcatagaaatttgcacttggataaaggtttttgtccaatcctccggctccgaccgggcattggtttccgcgcaggcactgctccaagggatgtacccaccggtggcggagttggagcagttcgaccccacactcaattggcagcccatccccgtgcactcgactgggccaaaccatgaagtgcacttttaaggggacggataaaacaataaattttaatgggaaattcaaaattgaaatagatacctcttgaaaattggatcaaattatgaataattttgagtttttcactttcatgacaatttaagctgctcaaaccgaccagctttggctgcccagtttatgacgaaatgaaaaaggaagtgaagcagcagttggaacaaaacttgaccaacacgtacccggaattgttcacattcatccagcagaatgtgtacaaaagcgcacaaccaatctcactgcatcaggcggctaaactgagcaacatcaaaagggaggtgggaggagcaaaatgggaaaagcaaaatgaaaaacgcttattaattattccaatttaaaaaatcagcataatttaatgggttttcaaaactacttttccaaattctgattgaaatgatgagaaaatgggggagaaacaatctcacttcatttggaaaagacgagaaattgaaaacccaactgaacatacaattttatttaaattctgaacataatgccataatttgtccatttcagtccctctcatcgtccgtcccttcccttcccttcttttccttccccctttttttgttaggtgcttcacaatttgtcccagcccgagtgggtaaatcgccgttgggaccaatacggtgggcagacaacgcttgatttggtgacggaactgcgccgcttggaacgcagcgcggagtttgcccgttccgagctggccattctgaagggcggccttttgctcggcgattgggtccaacgggcagagacggttattaactaattggtttaaataattacgtaatttgaacggggttagatttcatttgtttaattaaggtgttgcaacgacaaacgccgaaagaggcaaacaaagccgtcctttattcagctcatgacggcacccttcaggcactaaaagcatttatttgcccaattagggatgattaattacgctaatgaaggccctgctttatgcgctcggagtcggcgatggccaaatggtcccttactccgcttgtgttatgatggaattgtacaacgcaacgggcggtgtcattcatttggatgtgagaagtttatttttgcttttcaaaattaaataatattttcaaagatttattatcgacacaacggaattttggacaaattaaaattggcggattgtggcgattcgttttgtgaagcggacaaaacactcaattcgtttgagaaaaatgcaattaatgggctgcaacaactttatgatgtttaaatttaattatcaaattttaaattgttgaaataatcctttttagcaatgcaaaaaagacggattttgcgaaatacccattgaaaagggtaaagaagatgattaattaccactcattcgttaattaaatttccacattcttattgtattttgatatttaaaataataaatgttgtaaattttaaaataaatatattttggattttacgtcattttttattaataaaagaaaactaattatatgttccagccaattcactgaatcataacaaattcttggtgttagattgaatgttatttatgatatgtacggaatttacaaattattcattattgccatttgaatgaagtcgcagacgcaaccgaagtggctcataaattattataattattttttttaaaagcgatacggtattttgaaaaaaagtttcgtcatttggagtctcgttatcatgaatttcgaaaacagaccgttgctttaattttttattcaaacggggttagagtatcaggcgaaccaacaaagaattcactattttcgaagcttatgaataattttgaaaaaaatacaggaattttttttgtcaaatttgaatattgcttatagtttcgccctaatcctttcttgttttcggcgaacaatttaaataatggaaaattttcaaaatgattagtgcatatcttcacaacaattcaatttattaaatagtaaaattatcaattagaaaaatggcaacaattggattgaaagataattaaaattggttttaaaatataagaatatacgattgaaaaattttgaaaaaaaccgtgagcctaggaaaattctcggactcgagcattactgtcacaaatttctgaaaaaaaattggtgaatctctttttttttgcataaaccatgataaatttccttattaagtgagaattttaatatctaatagatgccaatttgtacaataatttagataattaattaggcattcaatcaagcgatggttttcaaatggatactgtgctttgtgagtacggcccatttctcaacgggtgattcggcggattgtcgcgcgaacaaaagtttgaatcgttttgctaaaaaaacaaatttattatcaatttaaatataatat

SEQ ID NO: 11680 - DNA, 2422 bp, Heterodera glycines
cggttttgttcgccactttcggcacgttttgctgaccctgagattctcgctccgatttcgaaaaataattttttttcttggctctcgaatctcgacgcatttctgccgatatttgcttaatttaatggcactttcatttgacgattctctgccgaacattggcatttgtaaaaagtactcccatttggttttctttatttgatggcgatttattgataaaataaattgggatatataaatttttaacattttgatggacatttacttactgaatgcattttatgatgcaatttctcaacattggtcccaattaccgagttcaaaacacacttttcttttctttctttccctcccatttaattgccttttgcccccccccccgggcgttttttccccccaaagaatgcccaaatttgttgccatatgatgggctgtgtgtccttggtccgttctgctgatgtcccctccccccttctcatatgaccctctccctccctcactttttgtccattttcgccgcgggggttgaagttttcgtagaaattgaaaaattacatttaaaaaatattatttcatttatttattattttattttaaataaaaaactatgtttattttattcttaaaaataatatgtttttctgctgattcgttctcattttccaattgaaacgtttcgttaaaaaaggcggaagttttttgcctttcgcccccaaaaaattgtcagtttttgcgtcaaattttttaaattgtaaaccattaaattttagcaaatttcgcatttcattcccccaatgttttccatcgcaattcatccaatttttctcgtcgccgttttgctcacttttttctccctctttttgtcctccaccgacggggccatcgcgcgacgccaacacaacacgcagaaaaaaggtggcacatataaatgggaaaattaataattggctgatcagaaggaaggattaggcgtaggtaaacggctaattaggaagcaattaggcgggtaatttgtcaaaatttgctgggagtcaatcagattcattgtccccaaattcggcacttaattatcacgttttcagcaactgatccaaacagcagtgacgagtacgattatcgtgtggacgatgattacagtatcggcgtttttgttgacgcggtgccaatcgccaaaaatggggacgaaagtgccaaaacaccacagacaaatgaggacggaaaggcgtacaaacggacgaataggtgaggaaaaagagaatgttggcaaagcgacggtcgaattttcgattttttaaaaaaggggggaaaattggcaaaatgacagtccaattttcaaaattttaaggtacccgacgaaaaagctgcgcagattttttgacgaatcaaaagcgcggagggaatggtacgaatcactgttcagcagaacggcggagagacggcgaagataaaagagagagagacgggggacggagcagagactgtaattagcgcaaaagcagtagccaatcaatgaccgtaaaatgcaatcaaccgatttactactggttgattacggtagccaagcgagggttcaattactcggctgaccagcagcaagagaccgatcagaggacgattcaaatggttctgattagtttaatgaatccatagttctcaaacggattgccataattctccctcaatcgattcgcccactttgatctctgtttataatttatccacctttttaatgaactctcccaaatgtacaaattaccgtagtgcttcgctaatgcccagttttgccatactgtacctttctttccttttgctcatcacttctttgtctctctttcataattctttcattacagtacacctctgacttcaattccatcatttttggcttcgattacgataaatgtttatagtttcttcacaatttcttcctttttccttcgcttttcgtttttcctctttttttaaaatttattttagcaaaatgttgccaaacaatcggtggaggaattcgcgcaatgttttattattcattcattccgtcgaatcaccgaattttgtgattaatcgtcgcgcaaaacgaaaaggcaaagaaaacgacgcccgagggaacataaagtattaaggaaaatgctaaatcaattatgaaattgggcgaataattaggaaagcaaattagttaattaactacaataggcagtgttaattactccaattagaaaaaaagaaggagattttttgattttagcggtgcgatacgattgagaagtaattaaaggcaaaatactgtaaaaaataatattttatataaatgacaactcaaaacgatcagctgagcaaaaacggaattgttgctgacttttttcaattttgatcaaaacggagagcagcaaaagcattcagcgagatgttgtagagtgaaaat

SEQ ID NO: 11681 - DNA, 6236 bp, Heterodera glycines
ttaattttttcaataaaaatgttttacttaaaattattccttctttggttcttgttggtcggaacggaaagttgttgcctttcaaaagaagaaaaagagcaatttaccagtgcccgaagaacggtagaaggcgtatttagagacataattaggttagataacgaagcaaaagaattttctttttctgcacataataccatggttgaagcccaaaatattaaaaataaaaaccctgataaacctggtgtgaatttttggcatagcaaattattagatggagttttaaaaattcatgccctatatgacaaaataaaaaaagaagaaaagaatatgaaaaatataaaaaaaggtatggaaaaatgccttgacagaaaagatgtggaaatgtgccaagaactagcagaagaggcaaaacaatcaatagaattagcaaaaaattatagaaaggaaattggacaaacttatcggaccgcttactcgcagcccgatttaggcattggagacttggccaataaattaaaagaaacaatgcgagaaaaccaaatacggtttgaaaggctaagacctcaggaagaatttagggatgaatttattgcttataaaatttaagaaaaaaaaattcgagaaaatgaaactgcatgagaattaaaggttgtgggacataaaccaaaaacaggtgaaaaaggaaacaggtgaaaataggtgaaaaggaaacaggtgaaaacaggtgaaaataggtgaaatttcacctaaaaatattataggggtgtgcatttaatggggcatattagagaatgtctcaactagtatcaataaaaagtgccaaaggaaaattttgtgatggttatcgctattacaaacataaaacgaccaagttaaaactttggtgtaaatgtgaacttaattcacatgggtgccagggctgggattttgaaaaggaagggttttttacaatgacgcgccgacacaatcatcatccagacactatattgattgaaatcgaagaggaaataaaatatcataatttttctgcgggggcaaaatgttttttgggtgacaacaagaaatagttgatgatgctaagaaaaatccgagactccaaactgaatttagagatgaatttattgtttgtaaactataaataggatcaagaaaaaaataccaattaaataaaaatgaattctgaaaaatcagaaaaagctaattccatattattggaagctgcaaaaaaagagacagaaagagcatggcgggatgtagctacgctaacggatgaagtaagcgattttgccaaatcttctcgcgaaacacttaatcgtgcaataaaatctagagaaaaggctccttacgctaatggtattcgagaattatatcttaaaatgtccgattcaatttgggaaatcttcacaatcctggacaaaatcaatttggagtcagaaaaagccgaatctacgtggcgtgatttcgagagatgcaaaacttttgaccaggcaacaaagctcgaggaacaatcgcaaaattcattaatggaagcccgaagattacatttcgagtcccggagggtgcagagccaaatgttaaattatgaaaataggctccaaacaattgtttgggagcatatgggtatataagagcaaaaaataatgatataacaaaatggaaaattgtgctataattgagacatattgtcataaagacttaaaatttggctttaaaaaacacaaaaccaagttttattttgtcaatcctttttttgttaatgctgagcaaaattttaaactaatactcgcatcaataatcgaaaaaatttataaaaatgaacaaggaaaattcaaaagcattctgaagctttcctttggttttgaatcattttattgccctcttagataccctagcgaaaacacagccgaggttttgttccaacatgtcctattaaaagaagaattatattcgcttttctatcctttggatgatgtcataacactagaagtaactataatcccagatgtcgacaatagaccaagaaattaattttataaaaaacaaaattacgagaaattggaaaatttctggaaaaatacttaaacgatcaaataatctcgaaatttttgcaaataaactttttaaacgggtgaaaattttctacatagcggcatttagtgcccctgaaatcgaaaatttatatttttcattcttagaaatgctcgataaaattcaaaaattaccaaattttattatgtatgaatatagaaaacagtctttagctatgcaaaaattagaaattggtatcaaagaacgaaatatatttaaatgtcaagatgcagagattatatccgataccaatttttcggagataaaaagttatcaaaaaaagatagggaattataaatttaatatcaaaatgttgtacaatgaaattagagtaaccgcagtaagtcatttgtttaggcctgaaaaagaaatattttttagtccatttcttacagaaagaaatagagaaattttttattcattatttcggcatatctaataaaatcgcaacttttttttgcaaaaaacaaaacattttcgttactaatagaatcgcatgatttttagtgtaatatttgagccttactgcacaaaagaccaaaaagttttgcaagtttgaaggtcatttactaatttcgtttgctgaatttgaactaaattagggttgcgtcagcattacaatgcaaaaagcgactatttaagaactctaaattttcattaccgatatataattttgccttcaaacattagtttatgctatttatttttgatttaacattttttttcccattaagaaatgtcgatgcaacaaaatcaagggtccgatgatgttttgccaatgtgggcggtaccggattttgatgaaatggaccaaatgccgcagcggcaaaaacaaaaaaaaatcccaacgttgaaggagtttcggcaccaatggaaggaacgaagacttctgtgggagagggagcaagcagaaaaaaaagacccaaaaacatggaagaagaggaccgatgagatgaagaaaatctgtgaggagagattggagcaatcaaaaggtgcaggcggcagcaacaaacgacaggagccggacacatacacttggaactgggacgaactactgcgccaagaaagagaatatttggacgggggtctatggggaaaatgatgagatacccccccccccccctccagctcccctccccctcccgcttctaaatatgttgttgtttttaaataaaaatatgaaaaatttttaaacattaatttgattttttactttggctactataccgagaacttttattttttgtacgtttttcttaacttttttttgacgatttttgattttttggctattttaaggaattttttcatagtcttcataaatcaccaataaaattttgcactttgaagtcataaatgtagtgaaaaatggatgagctaattaattgataaacaatataaacaataaatttaaaaataataaaagtcacacacataaaaacaacctaacgacataaatttgaaaatatggaagttttggtagcagttttacacaaaaatggccgttgtcgatgattttttccaaaaatccgtataaatcatcaaatttctcaaaaatcagcaaatcatcatctcaaaaaaatcattattgaccccttgaaatcatcaaacaaccccgatttaatcggttaccgttggctatattttgtaaaatttaaggtttttaatcctttttttgtcttatttatcggcttgtttgcacttttctgagttttatggttgatgtatttttatttaactagaattttttgttgttgcgtatttttgatcaatattcaaattttttcacgaatttaatgaaaaatatttaattggcaacaatgcagattttcaaaattccaacaattaatgcgacattaaaatgaatttgatcagctcatttcataaattcatcaacaaaggcatcgatgcatttggatgcctgaatttacatttgtaaaaagtgaagaaatcatagaggctcacctccgttttaatcgcccttggcacccttggcatccacagaataccatcattcgtgtgctgagtagcggagagcgcaagttttttgtgcactgaattaattaattaaagaaacataattttttgttgctaaaaactgcctaaatagttaatacgtaaaagttggtgccaaattgataaatagttgttcaacctttaatccaacaagaataattaatccaaatcaaaatgagataaattattaaaggagcaattttgaaaaattttgagtgcgattcttaggtgtgtgtttttcgtatttattgtcttaaacgccaaaataattgaaaatagtttttcaaaaattttttctaacaactcataaactagctcaacgcagaaaaacacgatttccggatgtttcagtacacgcggagctcaaaaatagttacaaaacaaaatatcatagccatcgtcggcacttcctgcctcgttttcattattacgttttttaaatttttggttgctttccataagtgcgcggtgttccgctggcactggtttgccgctcaaaacatcgagagtcgcttctgtcgcggcttgtctggtgaaatccacacataactcaagaccgtaacagtcttcgctcaatatccactgtcgctctgcataatctacaaataaacaaaaattttgaccgtggtaaaattggactcaagaaaaagacacgctaataaaactgtaaagaccaatttttctggtaaagaaaagtaatcaaataaatttctgtatctccaaataggtgaactttgtttgaaatcgggaggaaaatggtgggatgagccacgatccaacccgtcccaagggaagttctgcagtccgaagaccgtgaacttggccttgaaatcgggaggaaatggtgggatgggccatgatccaccccgtcccaagggaagatctgcagtccgaagaccgtgaacttggccttgaaatcgggaggaaatggtgggatgggccatgatccaccccgtcccaagggaagatctgcagtccgaagaccgtgaacttggccttgaaatcgggaggaaatggtgggatgggggactcatcccgcccatggaagccaaaagcattttatttttataaccaacttagccacgagacatagtaggacttgcggtgtgtggtcggatgtgtgaagcaggcgaaaatctctttcagctcaaatttctcctcttcaattccgtgtgtgccatctgtttggtccaaaaggtgcgattcttggaacccagcattttgttgctgctgctgctgctgttggtgctgatcatcatccgcttttaatgtattttgaatagatatattgcgttggaatttaaatttaaaaaaaattttttcgacggcatatagcggaaatgttgtaccctatcatccattttttgaattgaaaaaaggcaaaaaatgttcatttttggcaataagtaaccagtgaagttttatgggtctaaaataagaacattttgaaaaattaatttaaatcaaacaattaattttataagaaagtgggtggttggtttctaaaaagttcataaacataatagtaagaaaaacaaaaataaaaattcctagaagaaaatgggtttacaccatttgtgctaaaaatttaaccctgatcatgagcaaaaaaaacttacttttttgggttgttttttcctcattgatttgttcttgcgcttctgcttctgccggagggtttttttgcttggaccactctgctcctgttatttcaaattattttaaatatttatgaaacattaaaactaccggagtaatttttttgtagggcgcaataacaattttagccattttaaataaatctgaaaataaaatttcttaattttattttgttaacaactaaaattaaatggggaatgcatggtgaattcgttctcgcacatcaatcgatgcgaagaaaacaattttgatttggtgcaaaaatgggcgttgttttttcaaggtcgttttggcggggaaaactttggtcgtaaaatatttggaagagaatgaaaaggaagtgaggcgggggagggcggctggcaggtggaaggaatggagggaagatggtgataaagaagggatgggtgatgagggggaagggaaggggggttgaatgaaagaagggggttagggccacatttgggggt

SEQ ID NO: 11682 - DNA, 1931 bp, Heterodera glycines
cgcgtgtcatgtcgcgccaggtgaccgcgctgagcgctgtccggatcagcaaaacgaacgccgggcgtgaaggcggcgcattgcacgtgcacccaaccggcacagccgccaccttttttaattgaaaatgattaatgaatggcattagttggagaatggcgcgggcgctgtttttcgacttttctgttcgaaaatttattcgaaaaaaatcaaccgaagaattttttaattttttgtatcaaaatctttaaaaaagcaattataaatataacccgatgatatgtataatagacacacacaaaaaaaaaaaatttaaatacaaaaaaattttttttaagcgtctttcgactttttaccgaaaaacgcgaccgacccttaagcgcaagatttgtcagaaaaacaaattgggaatgaaatttggaaatttgaaaaatgtcaaccaaataactcgaccatggactaattgagtcaattttcccgtttattcgtaatggcaatttattcggtgccgaaaattggcccccgggattggcttttgcaaaatcagttttttgtactgtttgacacaatttttcgggcaccgcctcaccggcagcagcagcagcgcgcttgaaggcgccgtaacggctcgggcacagctcgcagtggggcacctcgcgcacgccgaacaggcacggctcgcaaaaccacggctcagtggaggcggaggaggaggcgacgctttgcgtgtccggcgcggcggcggaagtcggcgccgaagaagtcgcggcagccgtggcgatcaccggcactggcggagaagagaccaacaacgacgggccgccatcaacagcagcgacagttgtgcacgactttttgctggggtcaacggaagcggatgagcaattttgctgaagagggaaattgtgatataaacataaagcttttcctgttgaaccctgcccattctctaagtcctacctcacccgactttcccaaaaaatttcgcaaaattttgcggaaaattcaaaaaataacaaagcctcaatttttttttgaaaaaatctgttacataattcactctaattttaaaaagttttcttggcggcgtctatcggcaatttatgaaatcttttaaaagctgaaaaaatcagtcaaaaattaccgattaatttatgtctctgttttaacaatttttgagaattttactacattacaattggatagaaaaattaatttttataattttctacattttttcgcaaaaacggcttgagttgttccgaaattttggtttcccttgcaccgccctgtcctacctcctgcccatgttgttggccatcgtcgccgccgccgccttcgtccggtgccatcggtcgctggccgtcctcgcctttgtcctccggagcaaccgcaacaactgcagctgcaccagcatcagcagcaacaacgccatagcacagctcatggacaaaaattgcacaactgaaaagaaaagcgtaaaaaaataaattttttaattttttttatgcgtagcctccaggcctaaaatggggtgggagtggagttttttctggcgatgctgcataatgaaacgcgaaatttaataatgtaaatatgccaacagaatttgtcttaaacaccataaattgcaaggttttattcattttaaagaaaaaattagcacacagttttgagaccactgatgccaaatttatgaaaataaactaaaaatttgttgaaaattattcaaatttcattcaatttccattcctcgctcgttttatatgtaccggttgtccccccccccacccccgccattagtaaatcaagtgtaagacgaaggataatagataaacagtagaaaatcgggtcgacccttttcgatacgaacaaagtccagagaggggtcgtaggatggacatttgcgactcgcggattttggccgaaaa

SEQ ID NO: 11683 - DNA, 2182 bp, Heterodera glycines
  unsure (1)..(2182): unsure at all n locations
catttccgggcactcgtctaaaaaatgaagtaaatttggtaagcaaaatgcgctcaaaactattaaatgnagagtcgggggatgccttaggagcgtgtgcatcggttggaaaagcgtttttgctagaaattttcacaaatgtttgtcagttttccattatttcgggacggtttagtggcacttggccaaatattctgtttttccatctgtttgacccccaccgagttttattaagccccccggtgatatgtaagcttatttttgttttcgaaagttgtaaaagaaaaaagttcactgagatcgctgatcgcaaatccatccacccaattctacaaaattctgaaccctggacaaacagacatttaagtactgcaataactgctcgataaaccatttttgaaaaaattcgaaaataatttttcgacttcgttcggttcatccggggggagggctacgaactagtcgaatatggatgtaaaattcgtgatcaacaacctcaaaggacgcccccccccttcccactttaaaggccccctttttccatcattttacaaagtgccgctttttgccatcatttccccattttgttccgaacctgggcagcatttggcgccgctcctttttgccttttgcttttccatggcttcccctgctgctgttgctgctcctcctccccgtcgccgctgtcctcgtcatccgacgaattgccccccgtttcgtcgtcctcgccattgtcgttggtcgaggactgctcgccctcctcgtcaccctcctccttttgctgttcgttgtcggaggaactgcgcgacacattgggcgctgaacaattcattctttttgtacaaaatcgaataaaaaatgccatgatgatttaattacggccctccaatagggccatagttgaaaaactcttcgccaatacatttagaaaattttacgaacctcaccctttcttaaaactaatgttttgtttaaaaaaaaaagacaaatttcaaaaaaaaactttttgcgcttttcaaactgtacttttaaatgtgaaatttgattaaatgttcgctgttttctgaagtttcgaaataaaacccgctgagccatcgattttgatgccaattttaattattcaaattacaaatgaaaagagcaagacggatgataaatcattatgcgccagattccattaatcatggccttagttgtgccaatttttttaccaaccctcgcccaattccaattttggcaaaaagttcgcgcgattgtttgcgaaacagacacgaatcattcgtacaaaacttttgaaaaaattgcgaaaatgcgcacctatgaataccgcatatccaattaatgtgcggagattaattacctaactatcaaaattcaatgggtttagaaaatgcgttattttaaaaaatgccattttttgcctaacatggaaaaatgacgtcatcgtcctcttcgtcgtcatccgcgccgtccgccgcgatcagttgcaactggtcaaaaaatgccgcatttggcttaaactgccgcttgccgggctcacgcgcagctgaaagaaaaatgtttaatcattttattaaaaattactaaaataagtgcaattaattgataaaaaaaagtaggaatttaaaattgaattgagatattttatgtgttggaaaagcggataaaaatgagataaatatgaaatggaatgattttaattaaaatgttcttcaaattgagaaagcaaatttctgttttgaatctcaaaaatgcagatttaaaagtcgggatattttttgatttttccatgatacataataacagtaataaaaacaataatgatgaaaatccatttcagtgaggagggatggcccagtgatgccgaaaatgtctggaaaatcagggcatggaaaactccatctttttaagtaaaatgttttccagtaaatttgtacatctctattattaattaaatttcaaaaattgcacaacacctgcgccaaatagaaaattgtgtcgttctttgtccatttaaaccgtcgtattctttttttaattttaaacctgaaaagtgcaaatttacatacaataaaatgattaataaaataggtatttaaaaagaaaattaaatataaatgtgaaaaatggaaaattaaaattatatatcattttggcgctttattgaattttaaaaatcaca

SEQ ID NO: 11684 - DNA, 2700 bp, Heterodera glycines
acatcattcagccggaggggtgaccatctttcgaatcggctaagacagacggcgagaactttgtgccgtttgatgcaattggtaagctgcaggtgtatgtcagagtttgactcttttcttaagtggactttgccgatcgtgcgaaatttcgcattagggcccggaacaaggtgttcacgctgccgctgcgacacccggaggtgcacgccgccggcccaagcttggaagacggtgtaaaagaacaaaaggaaatgactcagatggcataaacacttgtccatttttctttctattgttgatattctgatggactacccaagaataaatgaaagtgaactcgcttttcccatcccttcggggattattgtcagcggtccgtcctcatcgggcaagacccagctggtccttcgcctgttacggcatgccaacgtgatgtttgacccgccgcccaaggcaataggtatgtgcaaagggggtttctgtgcagtgggctgttgctatttagtatgggcatacggtgagtactcgacgcagattcccgatctggagcggcagggagttctcccccacgcaggtgccccgtctgacgagatgctgaaaaagctgccaaagccttgtctgattgtttacgatgacttgatgggtgacattgaggccaagaaattggccgatctgtacaccaaaaagtcacaccataacaatttttccgtgattttccttacgcaaaacctgttcgataaatcaatgcgggtgccaaggtccaacgcccagtacatcttcctgatgcgggctcccaacgacatgcttagcattcgtaatttggccagccaaatgttccctcgcgagcagggattcctgatggatgcctaccgacaggcatgtgccctaccgtacggctacctgttggtgactctccacgcgaacagagacaacattatacgcctaaggacaaacattttcccagacgacgaggagagaatcatttttgcccccaaaaatggttaagcgggaacagaagatcggtgagcgggttgtgcacaactacgactatttgaagaagttgggaaagacaacgtcggagaagaagcgccgtcatttgttgaacagtgccggttgtgaggaactgttaacgcttgtcgagatttgtctcaacgttttgaacgggagtttttgtctgagcaggaaacaaaagcagagacttgcgccatttgcaaaagacatcagacagttggcacgtgtgcgaagcgagagggggtgcgcgaaaactagtgcagcagtcaggcggatcactttttgcccctttgttggcccccattctgattgaggctgcccgatacctgctttcgcgcagcaataatggccaataaacttattctgctgccgtacgagcactacaaggggctggttgcagcgagggagacaaagaatgacgacgacgacgacattgctgagcggacaaacttgggctttgtcaaacgacaggtgaccgctgcagtacagaagcggaagggaaacgtcagcgaacggaacgcaatgtacaaccagcacctgcgccggtacctgaagatgcgcaaggaacataaggagcggcccgtccgggtacagctcagcaacggcgttcaactgctaaataaaacagtggagacgggtgtgcaggtacggcctggtccggacgaaccgaaggacaagtccgtgatggttaccgacgaagatgaagaggaagaagaaattgaagtgccaaaatttttaaccccaacaagccagacgcagggaagcagccgatcacccaggaccaataagaaagcagcaaaacagcaaaaattgatcgagaagaaggaccacctgttggccatcattatgtctgatccgcagagattcggcgcaactgaccgtgggaaaatcattaacccaaagacgggccgagagttcatcgactcggacctggcctggtcaattgaacgcctggtggaccctcgcccggagaatgccccttcgccacgcggaaccaaagagttgaagaggaaactcgcacagaatccgctcgccagtagcctactcaatcgactgtttgttgggtctgggttcgtcggacaagtcaaacaaacgagaggatttgttccctcaaaatggacaagaaaataaacaaaatatacaccgacccggccaatccgggcgggtatgcgggggcgagtgctctgtacgcggcggtgaaggagaagcacccgaagttgaagcgtgccgagtttgaggactttttgcaaaggaacaccacctacacgctgttcaagccaaagagagacaagttccgacgcctacgcactgtgcctgcgggtttcatgaccggtaagttgtactggggcttattgcgcacaattcagggttcagatgttcaggcggacttggcagatttccaggcactttcgcgcaagaacagcggctaccgttacttgctgttggcggtggatgttctatcgaggcgaatgttcggcgcgcccgtaaagagtaagcgccctgtggacatgaaaagggcttttgaggagctatttgagcaaatgccaagggtgccagacacaatgtacaccgatcgagggctggagtttgtggcaaaaccgttgaaggagttttacgcggagaagggcattcaaaagtttgagaccagttcaaagaagaaggccgccgtggcggagcgtgccatccgca

SEQ ID NO: 11685 - DNA, 3528 bp, Heterodera glycines
ccttagaaacaattaaaatttttattgatctccacagtcgttagttcaagacccaattcgatcctaaataattaatagagcctggacatgatcggaatctcgcggggttatttcccggtaccgacaaaattgggatttgatttcaatcctatcattgcccggtctgatactaatcggaatcccgactttttcaaagttcctagctctaataattagcagggtgcggatttttagctacttaagttggactttttttgaaatatttattaacaaaatgcaataaaccaaaaaatttatacctactgtttgtttttgccagtttttcgaccacaattatgtacttagctacacacatatttgggattttcttaatttaaaaatcccggcaacggcaccctaatgagactaattagcaatagtaattttgtttgtttttggcacacactttcgcgggattggccgctgcacgccgccctccatccacaggaacagtcggtaccacaccgtcttcgtcaggtggtttcggccctgcaattcgttgcgcaacgcgggcaaatcggccaaagtgtggtaaatccaaaacagccgagtggccacccaataggcaatgatcacgtcgatggaatagtgaccacgggagaacagcagggacagaacgccaaccgaggcgagacaaagtgcgcccaaatggagcagacgccaacggcgcggactgtctgaaaaaatggaaatgcatggaattgggggcggaatttaaaattttaatataaaattatttttctaggaaattttttaattgaataaaaaaatgaaaaatagaaattcctagaaattgttaaaaccaagaaacttattgaaaatatgcgaaatcattttttcgggtttgcaattttctttccaaaacctttctaagttttttttgcgtaggtagaaaaaatttgtaggcattttttgtgaaaaatcttaggttttggtaattatttttttaatttctcaagatgaaacaatgtgggggggggggggaggcgcgaggagggaagggaattgtccccatgtcgagaagcagcgccgtcgggaaaatttttataacttttgcgaagggtgcgttttcccacaccccatcctctgagggtgccaacaaaacgggtaatttgcggttcaaaattttggcacccaaaaaaataaacgcacattcgcggatgaacaggcagcaggtgacgtgcacaattgtgtgcccgctgtaaatgtagtcaccgcacagcgtgtgccgtccgttgattttcaacccgaggccaacaacgacggacagtgcacgggccaaaatgttccaaaaggtgcgctgttcgggcttcaaccgtggcgagcagtaatagttggtgtccgcaacgggtacttgggtgacaaacatggtcacacaacggccaaggtaaagcagcgagccgatcaggaaaatgcgtctggggagggacacaatgaatgatgattagtgattagagagtgaagtgatcagagataaaagtgaccaagacaagggagggtgaaaaaggaaatgcgtcttagtgagtgatcagccgagaaagttgatgagtgattagaggatgtgaagtgatcaaagacaatagtgccccgatcaaaatttaaagttctagtgatcaacaaatgggaaagagatcggatagagatctacgaattaacttttaagtcaatgatcatgatcagatcgattataggaatttatcatgggtgtcgtcgacatatttacaaacggtaaaaaattgcaccttaacaccacccaacgatgtttgtgcagaactgcaatgagcatcatgataaagaacatgctgaaaacacataaaattactgctttaaatacaaagtcaaaattttaacgattttggcaaaaaaaaaaaaaaaaattaaaattcgaggttttttggcagcgattttggcgaaaaagtgcaaataccctattttattattgactaacgaaatttgtaccgtaatgccgaaaaccgtagtgccgtggaaacaacaacaaactcacgtaatcatcaggcactccgacacgaccaatgcccagggccaatatgggagataagtgaacgcaatgtccggcaaaggtgcgtttccgggaccactcgtgatgtaggacagcacaatgtcgttgagtgtgccgcaaaaaacgagcatgaggaaggcgtactgaacgggcattatccgttatcaatcatcaacaaacactattttctggcacaacactttggtattttttgcgttttgatgaattgccatttttttgttgtaaattttaccgttttttctcttacatttattttttcattttgttttgggaaaaaattgtgtttttttttattttaaccgaattttagaactaaggttgttggaagcccgaaaaaatgccataaacaaacaaaaaaatttaaaaaatgatttagatttcacgtttctgagggtttttcatgttttaacgccgaaccaactactaagctaactgaagcgaggccataagaccctgtcgaatcctccaaatttttcatggaatccctgcacttaaaattctaattttcggaatcccaagccccctaaattgtgggtagaacagcggacggaccccggcttttcgtcgctcgcgtggaatgcgtcgccgcccttttggtgaagcggcggcgtcggcagctgctgccgcatccgcgactgccgtgccgcctgcgacgccttcgtgcccggcggttctgtcatcggcggacggcgccgcccattcgtcgtcgtcgtcggccagcggcgagcggggcgatcgcctcaataacggggcacgtccctcttctgaaaagagaagggatgaatgagagagcgagagagagagaaaaattaaaatttattaaaactaaaagttttactcattccgcagccgtaaaaaatatttttagaaatctttgaaattttctttaaaaaatttcataacaatatattcatcatgaaaaaatcgctagaaaaattattcaaacatttttttcttgaaaaatctatattctttttgaagattttctgttttaaaattaaaaaaaaaaatcagggaacgatatggtggggggaactgaccccagagggcatagtacagctaatagaaagataagctgatttttagcagcagaatctcaagcttggaccggatcccacccagctgaatggatgagggatatgtgagatcccgactgaaacaactgtttcacggtcccgtcgcaaaaagcggtgtcttttattgaccaaaaatcctatgcccccgctccccatcgcgcaccccacgaatcgggcacactctcttcagactcctcggatgtgcatgatgttgctgatactgctcgcgcttggtgctggtggaggtgtttttgatgttgtgccgccgtcgtcgttgttgatgactgttgttgcggcggttcaattgtgatcgctgttgatgatggcggcaacgctgccaccggtgcggtcattgtcgtcggcggcaccctt

SEQ ID NO: 11686 - DNA, 869 bp, Heterodera glycines
agccgaggaatccgctgttaatacaacaacattttttactgctggctgccgatgaagaaccgccgggataaaggcatatgctaaatattgaaaacaaaataattcaatatttaaacaatgttttatataatggaaaattattttatccgagtgtggggatctggggattgaaccatggaaaaagcaaaatagactgcactcttagccaataggccattcaaattattaaaatcttttcgatcgattttttcggtacaaaagatggtgaaaagaccgatatcgatgaaaagatcagatcgataagtgaaaatttcttcgaacagttttttttaatataaattgaaaaaaggaccgaaagaaatcgaaaaagaacgattaaaagatcgatcatgccggactcactcatttcagagatcaaaagacaaaaaccgggcaaaattcaacaataaaaaatctccaaaaccaggcaggaacctccatgccaggctagagacacacacaaaaaacattggccagtaaccccaaaagagagcaatgtctgctttcttgtttgtatagtaaaattcgcatcctcagcagaggtcggtgaggcatctcaattttaacaattacatttaaattgcatgaaaaaaattttttggtggtagggggggcggagggaagggaaattcattgaataatctacaatacggagaaaacagccccataaatttaatgcaattaatttaaaaattttaaaatttaagacaaactgtaattaatgatattgttttaattactaattattatatattacataaaaatgtaaggcaaaaggaatgagttctttttgtgctgatttgtcagaaagataaactgataacatgaaa

SEQ ID NO: 11687 - DNA, 2825 bp, Heterodera glycines
gaaatatgatttcattcatgcagtcggttttaaccaataatattgaaaataagaatgtcaaatttttatagacatcaaatgtttttgtaagccaaacagaaatatgcaagagaaaatgggataaatgtgcttttttacgaaaactaatgaccatttaaccggatcgttaaatcctattcctatgaaagccatttatacaccaatttttgcaataaaaaagtaaatgaagttctcgagtgtgccagaatatgcaatggattattttaaaagatttttaatttgcttattttagaatttatttatttttcaatttgaataaaaataattgcatgtttaaatattttaaataaattcatgaaattattcctttcagcttacaaaaagcttgaccacataaaaaagaaacgcatgtcaagaagttgataatgattagattaattaaaaattatagaagaaaaattctgatgattaatcgcataaaagtttgatcatttttcaatcggaaaatgaaataaatagaacgcatataaaaattttaaaaaattagcttatagttagttcagcaaggtttaatatagtgataataaagttaaataaatagacaaacaaataaaataaataaaaaaagaaaaaactaataaaatgaaaaaaattaaaaaataattacatcaattaagcctaagcaactcaacaatctttttgcattgacattcttttatgaaccagtggtacattttaaagagaaataaccaataaatttttatgaatttaatcatattttaaacatttaaaaaacaaataaaaaaaatagtttaaatgcttaataatctttctcctgcccgaatgtccggaatatcttgcaatatagaatgaaaggtgaaatatattactaaacataaattaaactatcggtattattgggttaaaaaaagaaggtacaaaataatacagatcaacaacgggcaaacaggtcaacaaagcctcaatccgggtgctattgaaacacaatgagcaactacacaaagaaattcggattgacgaactatgatgctcgattatttttacgaagtatttaaataaaattggtagagattccgctttttaatctgtaaccgaaatgccatttttagattgaactaaaaaagcaataaattaaataatgaattcaaaaagtttctgaatatatattataagcaagtactaaaagtaaaaccatattgcaatagatgataaatttaaatatataaaaaataagataactttaatcatggaagaattggagaacctcagccatggcccgttggttccacttttaatataatcttcacagaaaacaaaaacaaaaatcaatttgagatttattgcataaggaaaagtttaattgtaatacaaaaaatttattttaaatttcggtcaaaacaaaaaagaataaattgtatactttaaaaatagaaacataaattgatcatagcagccattcccgaggaggaggcgctgatggagaatgagaggaatacgaaaacgaggacattgggggcgattacaggactgttattaccagtcgacaaaattaatttttttctatttggtgtcttataaatataattaataaattaaagatattgtagaaagggttccatctcgaaaagtccacttgggatcctatggaacacttgaaggagccaaagtgcttttagagaaggtaactaaaaaatagtgaaataaaataaaataatttattagaaaaaaaccaaaacaccttcaagactacaaaaataataataaaacgaaataataaaaaaccaataatgaaaaaataaataataattattaataaaaaatacatttataaataaatttacacacaaaggatcaaagattcagcaaaattaaatttaataatggcaatgggtccatcaaaattatccaaaaagtggaacaaataaaagatttaaaaaaattaattaatagattaagtgtcaaatcagcaaaaaaaaatggaacaaaaaaaaaattaagatattaaattataactaaaaaataaacaatttatatttaaaggacaaaaccgaaaagcatgcgcgtaaggaaaaagtgacgaaagaaggcatggttaaaaataaaaatataataaagttaaatttacaaatatattttaaatttgaaggccattgtgcttcgcaatctacataggattatgtgcaagattcttatggcaatgcgaaaaattgatcaatttttaacgataatttaacctaatcacgtgaccggattttcatattataaatattagaaaatgacggtaggggagggttcattgccatcgggttcattgctagcccagttttcgatctataacttttttcattgtggaccaaatctaacactctttgtatcattcgaaagctttacgtgtttagaagctattgtttcacgattagacaatttccaaaaagttataacatgaaaattgcgaacaagtccaaattctgagtttttttaaataacctttttacaagctaaaatcttaattaatgaatgggtttttgaaaagtttaaaattggaatatttctcaatgatatattattttttgtatgaattaatataaagaaaggatatggtcaatattcggccactatatttttttagagtactgtataaaaattgtaaatatgcatagtaattggctcacgctttttttgagtcgctcgaagaaatagttataattaaaacccgtacacgggaccgggaccccgccgggatccctggtcccggttttttggacaaaccaccaggaaccgggggtcccggaaaaacgggagac

SEQ ID NO: 11688 - DNA, 1826 bp, Heterodera glycines
gacattttgcgaaaatacggataaatatcagtactacgtacttgacatcgatacggattaagtatttacggactaaaaatacggaaaatccgttgtacgtaaaaatacgtatccagattcagagggcctgtatttccgtggggtccaggctcaggaggcctatacctggaccaggactcggaatttagggtccagtgtccgagattcgagaccgcaaaaacctgcaacttttcacgagtcgagactgagcctccctctctcgcgcattactttttcatacatgtaacctggacctgactggtcccaagcatctcgttgagtggacctgctggattttcctggctttttgtccaagaaaagccaggtcaaacacatggaatccaagtccagcaggcttcatttcagaatgtcaagctctaatgtgtaccagggatggcattccgagtccccaaaaattttcagaaatcggaattccgggtgtcaaaaatgttcggaaatggaagtcggaaatcggaattccgtgccatccctgatgtgtacgttttcgcgacgcaaaaaaaaatttttttttccaatttcaaaaagtgtccctttttttgcttatgttcacaacagaccactgcttctccggctcgaaaagctatgccccgcctcaattgtctggtcgacaaaatttgcgcaaagttcgaattgtttattttttcgcattaaaataaaattgttaaattattatttgttttaaatagggttggtcgggaccgagaattttgggcaaaaccgggaccgggacttttcgagttgaaaaaacccgggactttttggcgctgggaaaccgggaatttcccggtctcggtcaaaaccgggacttcggtactcagttgtccgtgttttggtccgaccaatcctagttttaaataaacaattctgaaaatgcattcatttctcggaatttctaggattttttgttggtccttaatccggcacttatttcgacaaattttaaaaaaaccggattacaattccaacaaaaagtcaaaagaaagatatataacatgtttaaatacgtaaaaattacttaaaaacatcataataaaataataatttatatttttggacataaaaaattaattaattaaatttatgtttttgctcgaatttcggatatggattgttcggaactcatcgagatttaatcccttaattccgggaaaagtaataaaaaaaatttttgcaaattttcagaaaggatgagaaaggattattggtgcataagctgaagcgacgctttgcactgtttgccaaaatggatttgcaagaaatggaatgttgggaattgcacgaacgcttggccaagctaaaagtggccaaaaagaagaagaagccgaacaagttcgagcggtttgacgccgacttcggcaaggccatgatgaccgaaggcccagtgtttgtggaggatttcatcaaagcgatcctcctctgctgatcacttgctaatgaggggctaattaattgaggggggaggggacgaggaggcgataaaacgtacataaaataaattgaaaatttcaaaaaatgaaaagtcgcggaaaatttaaaaaaaacggtctacaataaaaattaaacaaaaattttattagaaaattttaaaaattcgaaattttttaaattttaaggaaaaataatagatttttcgtttttttaattaaaattgtacgttttgcaaattccgcattctttttgtcttctctgcaaacaatttttcacatgaaaacttgttttcatcagctgtataccaaccaaccaaccaattccctcaaaaaatgact

SEQ ID NO: 11689 - DNA, 2818 bp, Heterodera glycines
  unsure (1)..(2818): unsure at all n locations
tatattttaggaaagttggctggttctattatggtttgtcgcccataaattttttgaaaaaattacaattttaaaacagtcgggaaaacattccttaggttttcgggatcgctgattacgaatttggcatccatttcgacccatttctaaccctgaacccgaattcgaataaaaagtgaaaaattaaatactcaacgaaattcacatttatgtattgcacaaaaccgattcattccatgaaatggccgttcgttggccgtgcccgactctccaatcccaaaatctgctggctttttttccgttgcccagcactttgtccaataaatgtaaatttgtttaaaattaaattttgactttttgttcgaattcgggttcagggttcgaaatggatgcaggatattttaaaatcttgatattttcgatagccctaagtgttttatattatcatgcaaaatttcatgaaaattcattaaatttaaaaaaagttatcacctgagaaactcaaaaatccaaacatttttagtcataacttacttgaaaataatgaaattttgcaggataatagaaaacacttaagtctatcgaaagatatcaagaataaaaatttttgttgcttttgagaaaagttataccaaaaaataccatcaaaaattatattaaaaaatgaaaaaataaaaaaaaaatggaaaaagtcacttttaatttttttttatttaatgaataaattttttttgttagtttttgactaacttcacagcaccaacagcgaccctgaaaaggtaaggaaaggtgttctacccgactgtttaaaaattgtaatttaaattgctgtacttatttcctagcatgtacttggaaataggcattttacccataaatgggatgggttaattgaagttttgtgtttgccaatgtggcatttaattatgatgacctgaccatgttttaatttaatttatcgtcagaccgtctcaagttggccttgctggaaacaatgaaggagcttgaggtggagacaatgaagcagttggacgactttttggatcagatcactttcatgttctgatcaatgctttttcgtatttctgtatttaattattcatatttttgctctatttattccgatcattggttcctttatggttttattgtattcttttttcatttatataaaatggaagccaactacaaaaaaccccggaatgcaaaataacatttctttactaattcaaattcaaattctttaattgtcattagtaggattataagttgtgtaacatattctaattatcacccatatttaatccgacatgataaagagccacacgaacgattggaccctttggacttcttggggattgggcccgattcctaagattaagacctttcagtcctgggacaatccgtctcctcccatcccactctggcatggatcctcacgtcttactgttgtatgattttgtatattttttctgtacatatgctatgaagaaaggggctcaaaaacagcatttctgcgttaaaattttttgatttcgtgaagattttataaatttggaaattcagtatttttgcaattgtctaaaaattgctcattagcccttttttggtattttaaaagtcaattcataatttacacaaaatttttggcatttttgagggttaaaacacatctttggcagtttttaaggcatattttagtgcatgtttgggcatttttcgagtttttaggacatatttgggagatttttagtgcatattttatgtgcatatttggcattttttagtgcatacaacttataaccctagtcatcagaaagtacaaaacttagttgtttcttacccttttccaaatttaacttttattttaacatggaaccatagataatttaattttagaaactaggtttaggcttgcttgagcctaggcctaggcgttggcctaagcaagcactgtttgctgtggatgcatttctctattatttttttacattttttctctaatttaattcattttttaattttagtccatttggaattgaaattttaataatattttaaaactcaaattaaattagcaaatgcttttatttaatattaagtgaattttaattattatttattcgaaatagaaaactctcgtctttgtaggggtctcgttctcgtgtctcgttttaggacgagacacgaaatatgggggatagggcggagttgagagaaatatttccgaaaattgtgagaaaatgaaaaattttaaaccccctgctggttgggtagtaaattttcacaaaaagtcaaaaaagaaaacaaaattagcctttttcgactctctctccccattcggatttttttaatttccaaaatgaattttaaaaaaataatttttttcttattaatgtatttttttaataaaaattactaaatttcaaacataaacttaaaaaaccattttttgctgtaaagctccgaatttcgctcgcgtatcggagtgacgtgcaaaaatctgactatgctgcgcgcgcattctcttcaatgttccgggtcagtgtttttatggatgcaaaaaaaccaacaaaattttaattaatcagataagcgtcccccaaaaaggcactaaaaagtctcaaatttatggggtgtaaaatgacaaatttattcaaaaaattagaaaaaaaaccaaatcaatgttacgctaaataattttaaaatcaaaaattcttgtcaagaaattaaataaataattntggagacgaatttttggaaaaattttttcatttcttangggaatattttctgaaattttggtcgatttttaggg

SEQ ID NO: 11690 - DNA, 1461 bp, Heterodera glycines
  unsure (1)..(1461): unsure at all n locations
ggatcagccggattcataagcagtgaaatttnaacttttgttaattggcacaatattaattccaaaaattagtcccgaattgtgattcttaatgtttcaaaaaattttagtttcttcccattttcttccctttgatgttttgccgcttccccctccccctttccttcgcctcctcccttttaattctgctactttcttcgaatttggtgcttcttgttgggggtaagtaagctgcttacaaattaacaaatgaattggcattggcattgaaccgtttcaaaatgtttgtgcttttttaggtgtttttaaactgttggatggaaatgctaaactcgtgagcaaccctttggagaatgtggtgtatctgttccaattcccgagaacgtcgaccacgccgagccaagcgccatacaatctgatggtggagacatggctgcattggaagcacatcccattccatgtaccatattatctctaattatcccccggggtgattattgttcaacttcctcagaaagggggggattattaaatacgggggagaccgggggattattgttcaacctcctcagaaaggggggggggataattggatgcgggggataatggataattagagataatacggtatatctttcattcgaatgtgaaacagtctcgctaatcccacatttgagcaaaaattttgatcataattctgccaatcactttttccgttctcccatcccttcacagcggatcaacaaccaattgttcctcggctctcattcaaagggcacagcaccgtatgcatatttcaatggccaatacattgacggatcgaaggaaatcatcaaaacagttggccaacattttaagcaatatcagccggttgaaggtgaagaggagctgatgggcacgctcctcgacatgtttaagtgggttgggttgcgtaacatttttttgttgataaggctaattatgctaattaatttggtttacacaattacagtattcttatggtcgatcgtgaggccggcttagaatggatgactaaagatgaggcccttgtggagatcattgtgccgcaaaccttcaccgatcgaccgcttactgtgcagcttggagaggacggtaacttcaatgtgagcgtgaaccaacagttttgggagcagtactttgacgcgtacaacgccaaaggacaaactgagaaagtggcatttgtgaatgcttttctgaagcctttaaatgggactgatcagaaagaggtgaccaaaaattgatcagcatttggcgaagctatcgcatttgtcggtttcaggaaaatggatcaactttgacggacggaaggctatgggtcgacttcagtgcgtggcttcgccagaatgtgatcaaacgcacaatggaaacggtactaatggtgacggtgaacggacagccgaatactgcgaatccagggaacagtcaagcgaaggtaaaagg

SEQ ID NO: 11691 - DNA, 2185 bp, Heterodera glycines
  unsure (1)..(2185): unsure at all n locations
tttatttttttancattttggccaaatcatcacaaattcttttcatcgacaaattttccaccacttttttgcatcggacaatttggcgtaaaatatgaatgaatgcataattaattttatttattatagaattaataaatattatacgtatttgtgattataaaacgaaatgataaaatttattaatgctgtgataggataaagcatagaaaaagtgggtcttcttcatttgcgcaagcgccgccgccggcgtactttcaaaaatattttggatttggtataaatagacacaaattggactgatcagacttgtgcttgtcttaaaaaatgatcaagctacaattatccgtgccattgttgtcctcgtccaacaccgccatgttctgctgggccggcacgtcccccagcaaaatgttctcgttgttttggatggagaattgaacacgctttttgatcggcttgtgatggatggaacagcttattgcaaattattattctaatcatttaaaattactcgtaaattccttctaataaagccccccccccctcaccatattaaaactgggcaaataatgcaaattttacataaacacacactgagtctcttctaaaataaggggtccatttaagaagagttagcgaccattggttactctcactaagtttttttctcttcaacttttccaaaaaatttgttgaaaatttttcaattttttctatactcttttctattagcctacaaaattttaaaaaattatttcgtttagtttcaaaaatctatgacaaaaaatgtttgaaaacctggtttcaggtgtatacttttggccataactttgttcaaacttgacgaaattttttgaaaatttgcagcctaatagagttaattgttagggctatcgaatgatttcaagaattaaaaatttagttggctttgagcaaaattaggggtagttttttgttgaaaattttcatttgatggcttttttataacggctcagcacccggcggaggctgcctttgatgccgtcgttgctcattttgttgttgcccttctggcgaccgcacaatgccattgccgtatgtgtgggaccaggaggacgaagtggacgacatgtaccacattttgaagacggtcaaagaataggacacgaaaattcggggtaattntagaatattaaattttgcatatttttttatatcccctaacaaataaaaacatatttttccggaaattttctcaaacattccaatttttttcattgctaattaaaaaagaaccctttgatcagtctgcttctcatttatactgatcaatttaaaaatgtggcattactcaaaagctttgcatgtttatttaatttttaaaattgaacagcaattaaattaaacaacacaaaaaaaagtgaatttccaaacactcccaaaaatgaaaaattattatatattttcttttgttcttttaatttgattttatttgaaatttttgtacgtaaattttttattgaacttttttgttttgaagggtttggcacggattttacaaagaacaaaataataaataattaaatgaatacaaataattggtgtatcatgaaataaatacaaatattccaattggaaatattaaacagaaagacatctccataggcattaattaaatttttaattatttttattaattttttcgacgtatataaatcaaattttgtcaaatttttctctttttttttgtctatttatgagaggatatttatgcactttttgtcaaaaattattgcccacgctggtggataatgtgttaaaatgcatatagtatttaatagaaatggattcaaaaaatgacaccccaaaaaattcaaaaataaaataaaaaatttgctgattggaaattggccaactgatcagctgcagaagacagatcatcatcactgatctgccccttttctctcatggatggccaacaaatggcacgaacacatggataagggatgaagcattgctcgccaagaatggacttggactcaatttcatcggcgcctgttcttcgacttgcaaacttttgaaccgttttggcactccagcagcttcattagtcaaacagtgaatttcgtccacccgtatgatttcgtttgtctccggcttactgtangccccaaagcttacggtacctccttcggncttctgt

SEQ ID NO: 11692 - DNA, 4082 bp, Heterodera glycines
  unsure (1)..(4082): unsure at all n locations
taagtgatgaagcattgtccaataatgtacttggattcctccctagcgacagctgttcttcgacttgcaaactcttgaaccgtttctgtgacggtggtgttactccagcagcttcaaaagtcaaacagtggacttcgtccacccgaatgatttctttggtattcggcttactgtagccccaaaagcttacagtacctccttcggccttctgtaaaattagtcaattaaaaagggtttgagaaattaggaagccccaactcacataacaattaacctcaatccgagtccaatcgtatcgataatctatttggatttgaattccattgaccttgaatttacaaattaataaatagatggcattttttttcatttatgttctcatttgtccttatttccgcttttttgatacaaaaatggtaatttttacagccaaaaaaattaaattgccaaaatattatatgaaatgtgtctgtggcggtgtcttttggcattaattaataattaattaattaattgcctttattatttggcaaagaaatgcgtcgtgtgtccatttttcttcagcgaggcatttcttatcaccgtgacaggagcagtcataaaattggtgtttgacctcgtcataacacgtgaaacctctgtggccgggattccttttctcggcaaacaaattatcggtatttacgcatttgctcgaatttatgagtttggcgttgccttaacagatttttagaacaattttccattagatatgtaaagcattataaaatacaaatttaaaatttttttttaatttaaaaaacaaataaaatttattttacaatttttccttgcctgattcaaatgtcagttcgaatacggtagatggtacggtccattttggtgaaaggtgcgcggaaatgacaatgtccatgtccggcttttccgccgcaatccaatttttgtattcattaccgttcagatcagtaagtgcacggggacagcaaagtttggcaccttaatgagcgatcgttctgctaagtaataattaattagttcattaatttttttgccttgtgcccttttgtcggtacggtatttgatctcgacgttacggtggtgtgcatgggtgtgagcagatgatcgaattgttcaagcttttgaattgaatttgcacttttttgccagacatgggctaaaatccttttcactcattttatattgttaattattaacactataattatctttttacaacaaaataaaaattgccgtaattcgccaatggcaacggcattctttgccggcagaagtgcacccgatcaccggtttcaacactttggcggtctgatcagatttcaattccctcgactcatcgcccaaaatctcgcagttctcatctaataaatgggaggaacatttttgggatattttatctgccacttaatcgatttaataaaaccatttttctaacaattcaattcttcaattttgtaaaatttaatataattttaaattttttactcactctcttcgagttctttacagtatttgccaccgtattcgtccggacaatggcattttgtgcaatcattcggattcaaatagcccccgttttggcacttgtcctcatggcctttgcatgagtctgaacaaatggaaaatctactcaaattatatttcaatttatttgcctttgcaataaatttggttaattatcgccgcgtctttgaaagatattctgccgcgttggccaatcgtttgctggtaaaaccgtggcagagtgatcagagagtactgatcgctgcaatcaaacaataattaataacaattattaaaagtagtctcattatttagcaggagccgaaaacttaagcatttttgtgttattttcgaaaatttttcattggtgaacattctgggttagagctagagttgcacgggaccgggaccgggtcgggaaatcccggtttttcaggtcccggtcccgatttttggaaaaacagaaatcccggtcccggttttgccagtcccggtcccgggtttttgtcaaaattccccggtcccgtgcaactctagttagagcaaaggacatttcgacagaaatattataaaaaatgatgccaaatcagtattgagataaatagttttttttaaatcatgaatgacctagtaataatgatntagcaatacatattagtatgttaatntaaaagaaatttagtaaaactgacaagcaatataatttattttaataagatttatttgtttttatgtttaatgtcgaaaagtccattatttttgtatgtcctgtcgaaaagtccgggagcctagaaatcccggttccggattctattcgtattttctaaaaatgattattacttttcttcgtcataatgtccaccgtaatggagcaccgagccaaaatcgtaaccaaagccaaaattttctgcgtcgtggcttatatccgattgctattaaaattttgaaaaatttaatttttgtataatttttaatttaaattatttttacgctgttttggtgcctcaaaatgacaaagcttcgcgcatcgctcctgctttgctcgtgcaaattgccaagtgcgtgcaacagttcatgacaagcaacccccgacatgtttggttgtaactgcaaattaatatcatcactaatagttgtcagacaataccgtaccaacatagcattgattgaattacagtatagttagccagtggaaatattaaattgatatttttaaacttttcttgacacttcaaattcatcaacaacaaacattaattgccatgccaataccgtacccattattattcatttacagtatcagcgtcaatggcaatttttttaaatttaatattattaaaaaaattctttttttttaattgaaaactcacatgtggacaagtgtgttccatcgcaagcttaagttcttgccaaccaccaacttttccagccttcgattctccaaagactaaatttttgattatctcaaatagggttgctccccggtccccgacccccgacaattgagctcctccccgccccgacccccgacatgtcgccccccgaggtccccggcattttaccccccgaggggtcggggagcaaccctaatctcaaaagatatttgaactaaaaaaaaactctgcaattcgcgcggattttcaaaaaaaaatcgctatttttcaagagtttaagaattttttccaaaattttcaatttttttattctgatttatttaaaaatcatttcttaaaacttacggcaagtctttaaaactttgtgagcttcggcaaactcaatttctctaattaaaatgccttcgctgtaattgtccttttcttcaacattaacaattttgaattgaacgcatgtgtgttgcctgttttgaaaattaaaaaggataaacaaattttaaattagaaattcaaaaaacggcacaaattattaagcgaaacaaaatgccctgaaaatttttacacaacaaatttgacgtcaaaaattctttgttagcgcaaaatgctccttcaatcacggcaaaaaaagcacaaatttatgacaaagattttttaaaaaattaggcgtttttataaagagacttttgaattttttttaacgaaagaattttgagagaaaattaggatttacaaaagaaaaaattttagaatcttacttattcataaaggaaaacctttaaagaaaaaattgaatattttttttcaatgattggaaaatttcaaaaaatatttttataaaatttctcttaaaatttaaactttcttaaaatttaaaaaattattcaccaaatttaatatttttccattttgatcacctacattatcatgtcggttccgacttttatcgccgctttccatgctcggtaatcttttggcactgaaaccattttgaaaacaatttattgtataaatggctttcaattttaaaggcaacttacgtttatcttccaaaaaactgatcacgatcggaaacgaatcccatttgcccaattgtggtccaaaaaacggacgaaattgccttttccgccgacggctgatcagattttcaggctcgagcccacatccttt

SEQ ID NO: 11693 - DNA, 2523 bp, Heterodera glycines
cattatcatccatcaataggaaataggggtaaaatgaaaatgaaaacaatatttataaatttattcacagttaacgacatttatttcattaaaccaatcacttgaacagctaaaaattaatgaattaattaccataattaataattagtgtagctaactgtttaccattattcctattgatgaaacgatgttaccaatgcaagcaattctttattaaacagatgacgatattcagtacttaaacaataaaattctaatgcataaaaattatttaaaaaataataaatgacctgctaaaataaagcacaattgcatttgatcctgccgctaaattcaacagaatgccaagaaagcattcattttgccaaattcgaattaaagacctataaaatatattatttgaaaatttggaatattttttattacccaaaaatagagctaattatgtctataaatcggtacagggccagcgtgatcaaataaccgccaatgttaatcaacaaaatgatgctcagagaccgtaacatcgcgtggacgtctgttgggttactgtaaaaattgttttcacttttggcattttatggcaaaaaaaacgccaaaaaatttaccgccttttttgcatcgaattatcaaaaaaatgggccaaatagcagaaaatggctacagctgagaatgaatgcgctattgaagaaaaagcgccacacattgccctgaagagtttcggccacgaagccggaggatttattaaaatatgaaaaggatttatttatttaaaatttaaataataatcgaaatgtttgaattatgagtagggttgggaatttaagtcatggaaaatacccaaaaattcaacaaaaaaagtcatagaaaatggtgccaaacactgaaagaatcggacaaaatggggcgattgtttcaattcacggggaattctcaacaattaggaaaaatttttgccgcatttaaattgcccttttcaccactggaactttattttaggcattttcattgctgaatttcaaatttgccataaaaattgaagaaaaaaagtcacgaaaaaagtaataaaagtgcaaaaatgttaaataaaaatgcatttagaagcttcgaaaaaagtgtaaaacacttttaataaaacaaattttaagtcattttaaagccatttagaatcatgaaaaaaagctcatttgacttaaattcccggccctaattatgaaatttaattaacataaaggcatttaaatgagtttccatattttggcccttttctttcttaggcctataaatcaagtaaataattttttatcttgctttaaagcttcatgggttggtaaaattttactttccataaaactgataaattaaagtttaaaatatttaatttttaattttattttccaagaattaaaagattttcacttttttgtaaaaatttaattatcatagtaaagatttttcgaaaatttgtaaaccatgtttttgtccgaatttcttattttggaacttaattatcaatttaattgtttatttttttttaatgcgccatacattccgcattttcgatagcaaattcaagcacataatcactgcataaattccataaattacagaaataaacaaataaacgaccaaatacgaatattattttaccagaacttttttaaaagctcgatgaaattttttgaaattttaaagttaaataaagaattcttaggactatagaatatataaattcattttgacttatttgttcattttaatgacttaaaaattttaaatgtttataaaatatttgcatgaccacggcacaaaaacctagcctgttcaatgccatataagtttttttcagaagcattagattaaattttattttttagaatttcaagtgctctatttaatctatttatttttaaaattacaaaaaatttcattgagttttaaaaaagtttaggacaaaaattccgacataagattttgtggaatttaataaccaaaactttttttatactatttaaaaaaatttgaaaataatattctgataggaatgataccatgaaatattaatttggttgatattaaaccaagttatgaatttatatgttttacattttttattttcctaccccttggcggtttttagaaaacgacctagcaccaaattaccatagaaaatataattttaaaaaaaattcagggggtgacaaaatggataagaacccataatagagcataaattgaaatttcagaggttggttgaattttaattgaaaatatttctacttaaaaaaatgcaaaaaaaaagcaaaacatttttaggcgattttcatttttcaaaattgatcaatcaccgtaaaatttataagtaaaataaaataattttatgtcttttggccaacaaatgtcaacaaattgcttcaatcattctcatttttcgctgatcagttccggtgctcgggcttgcacctaaataaatgaaaaattaaaatatttaaaaatatattttccaccaatacctccagcatt

SEQ ID NO: 11694 - DNA, 1336 bp, Heterodera glycines
attttgtgtgactgatgagactcaaccataattaaatgaattttaaacagaattaaaattaaaatagtaattgttgttttaattaacaactttttattgatattgaatcaaaaattgaggcaattaattattgtgatttaattatagtagtcgattttatgttctcaaaatttcaaatgggtggcaagaaaatcgagaactttgtagtttctttttttaaactaaaaagagttggcataaatcgaaattttatagtttcttttttactaaagggagacaaaaaataattggatttttgaaatttaaatttgtaatttaagtcaaatattgcaattaaattttaaaaatgattatttaaaaaaaaaaaattaataattatcattatggaacaattagacaaaaatattgacaaacaaacatataaaaatggttaaaaattggggaaaatcgttgaatttcttcgtccattttcatcaatcatcaaattccgttgttgttcattttcttgacaccagcatggcgtactgcacacatttgtcccagtggcgctcatcggacgggtcgtaaatgcgcaaaaagagtcccaacggcagcgcactggggtccaaccggccaagcacgaacatctgattgtgagatgacaaaaatggcatttaatttactgaaaatttgccggtcatttaatttactaattggggcaattagggtttgatctggtattaattatttatgttgtcctattctgtactgtgtttacgcactcagaggagttcgtaagtgtgcttattttagggttcgtgtctttttgagggccggaaaatcaaaaatttttctggaaacctttaaatgacttataattaatttttgaaagatttttaaaatgatttaattttttcaagaaatgaccaaattatgcaaaatttattttttcccgatttgtttttaggaaaaggttcctgaacaatttaatttttggcatgtggatttactaattggggcaattagggcttttgatctggtactaattatttgggttgtctattctgtactgtttttaagggcttacaaattatatgagttcgtaggtgtggttattttgaggaattgcgccttttttgagggccggaaatacaattttttttttctggaaagctttaaaaattatttcttgattcttttcgctggctgactgactgactgaccagctcgatgggcatcatgtcgaccaactgtcgccagtacggagtgcggggcgcttgggcaagttcgtgcaagaagaaaatgatgaaagtgaccggcgggcgcaacgtgcagtcgcgcacaatgcgattgaagc

SEQ ID NO: 11695 - DNA, 5743 bp, Heterodera glycines
ttttggcttgggccacaaaatacaacaaaaaattgggccgcaaatgtccgggacgcaaatgtcgggccgcaaaagtcgcgccgcaaatgtccgattttggctggggccgcaaatgtccgggccgcaaatgtggggtaaccggtattttggcctgctatgtgttaatatcacaattaatgtcgataaaccgggcacaaagtcagaattgaatccacaatttgggtgtggtccttttcttgacaatttccgtctgcttctctgtgcccggcctttgaagcaatctttcggggaatgttctatgagatcgttctgtctgtctttttctctgccgctctctctttctctcgtcagtctctgtcttctctgttccctgtgtattttttgcattttgccggtctgaccacaaatcggacgcaacggcacaatgggaagacacatttggtcaggaggaggacagcgagcagtagcagaacgagacacagcaccaattccacgagacatgtgaacagctctgcgggcgaattcagcccgtccagccattggcgcgggtccaaactgctcagaaaagactcaactgaggtggaaaatgaaacaattgcaagtcgtcgtcgtttttttaagtaacctccgcgttcgttgcaccctaaagccattcattatattttcagatttgaaatgttggcaaagtgttcggccattaccttggcactccgagcgttgcctttgccaatgatcagtcattggaggtttctcctcaaaaagaaaaattctaaacccattatatctatacttttgtttgtacctggaggggttggcgaacaaagtccagccgatggcactttcgcttttcgatgcttcccatgggataaaaacagaccaaacgcggggaccgtacggaagtggccaccgctcgttgggctttgctttgcgtggatttgctgatgtcaatgctgaagatgctctccatcaccgagagtgagtcttgactgctgaatatctgtccgatgagtgtcccccgcgcattctgtgccgaaatgtttcccattttccgacaaatgccaaaccaacaaagaaagtgaggttcagaaacaggttggactctctgtccaagacaatttgagccggagaagtcgctcagttcggacgaatggtggacaatccgaggccatgactcagtccgaagagtcagctgaaagtgcgttggtacgtcggagcgattgccggcactcactgtcagtgccactccctcggcatgttccagcacaacttccctttcgctcgtccgcactgcccccgcccacggctcctcctccaccaaattgcccaggtcgaagttgcccatctcttccgccgttccctcggcttcttcctccccatttgctccctttggagtcggcatttcttcggccggggagtgccgtcgcagcacaaattgttccgcgttgaaagtggcgcggtaccgctgcgatttgcagtcctccacgctgatgtgctgaataaggcgcgagttttttcttgccgtgcccttttcgcattgcctgcgcttgcgttatcttctcgagtcccttgcgcaccgcccatccgtggcccttttcccaccgaaaccatcccaatttttccaaattgctttcgcccggccaattcaacggaacgccgtcacgaagacgatgtttcgagtcggtatccgcttccgggtcctcaattttgtagaagtacatgcccggctccatcttccgttggggtgtgccgccgactggcaatggttggtggaacttttatccgatttggccactaattaccttacccgcactaatctccacccgatgttcgcttctgtcgtccgccgttttgtcccttgcgtttagttcgaattttgtcgaccctttgttcagcggaatggcaattcgttcgtcgaccctttgctcccattggccctcccctttcgcttcattggcactccgttcaaagattcgataacggagaatgaatacgatggacggttgtttgagttggaccgattggaaggtccattttttgtatggctggcaaaaagtcataaagaaatcaaacatccgcgcgtacctttagctccacctgagaaaaaggttatcaacaattggatgataaggcacccatttaccacaattgcttaattaattgctcacctggcagcaaatttcggcttttcccgagctgagacaccccccgttgggctgacttcctttgtgtgtacggtaacaaacgccgtcggaaactgagcaattcctgccaatgccaacacagcaaaaattaacccacagtgccattcttctacctgtactggtacttctcgacgctgcaaatcgtttctccgcctgcgcagtcacatttgcacctcggggtgatcgacggaattgcgaatttgtacgtacttttgatggcgtagtgtaactcgagaccgactgatttatgagaaatgaatgagtggataattatgaatcatcagtgattgttccgtcgttctccgataaaaatggtccgatatggtaccgtaagacactgaacaatgacagcactgaccgtattccacgatatgaagcagcgaaaagtgttgctgctgttcgtcgtgtgcttccgcttctctgccttgctcatttgccgaattgttccccttaattgcccttttgctctttccccgtcctcccctcccggctaacactgattagcatgcaatgcgtttctcccaaagtgattgtggtcaactgcacaaatgagctgatgttcactcgttttatatcttcatttgtcaataagtccatctcagttcggacttcggaattcaaaaccaaattattggtgcactgcggcaaaaaatcgaagcgcgaaaaacccgcgggggaattttcagaggaaggcatcgccgggggatgaagcggacgacggacggacaaagaaagtggggacaaagaggaaaaatgtatcgaagagagcggcaagaaaatccgaatcaaagtgaagcggaaggggcacatttgaaggatgagaggaggagagagggaggggacaaaagaggaaaagcacctgaaatttaacgaaaatggctattgaaacgacgaaggacaatggacaactgaatgaaatatgaagcaaactgaatagccaactgaacggaattgaaagggggggggaaagggagagagagagagaggagagaaagagagagagagggagagagaggagagaaagagagagagaggggagagaaagagggagagagaggagagaaagagagagagagggacacatgtgtaggagggggggggggggcaaatgtgtgaaaatggacaaggcatttgataatggacgaaaattagctgcgatcgggaaatgttttcggtgtggaccaactatgctcccataaacacatcccttcaaaagccccgccttttattagcttactcattccccctccccttcacccaatttccttttccaaacaatgttttgctgacgcatcacgcgaatccattagtcacatgaacaccattccattaattaactgaacacatccagaaagtgatggcagtgatcaaaaagcgtggaaatggtttcaaggtcgcaaaactttaagcggatgggggggggatggagtggtaagagtgggtgccaagacggaaggaaaatgagcagaaattgtcccaacggaaaggaatttaaaaatgaaactgagttaattggatattgttaaatgatggatgaatgtgcaaatcttcgggggataattgtttggggataaggacaaccttttctcatcccccgccggtcgcctaactttcctttttgcggcacggattagcaacggtaaatggggggaatttgaggggagaggggaattgtccaaggtcaaagaaaggcgcagaagaaagttctctctttttaattgtaattgggataagcggaagcatcgcaaaattgggaagggtcggataaaaaagggattaattttggggaaagggggaaaaggggggagggattggcaaaacatagcgattggaatggaaaagcaaaatgatcgagccgttagcttcgcctgtcacccctttggtgctgagtgagtgaatgaatgggttgtctcttttcacatttttggactgttgaaaagcaaaaaatgaacaaaacgaacgaatggccgtcgatttgcatttgaacgggcgaaaggcgcaacatttcgcgcagccgacggagatttgtgaaggaacgacggatcttgaaggattattattcgtcgcttcatttcttcgggaaatttgacaggcgagcgaaggatcagccactgagccctccgtccgaatttgtccttttgccaacatttgcccaaccgtcgccgtcccttctctccatttcaccccccccccccgctcaagtggcaattcttgaacgcgcattggcaatccatgggtaagcaaatgcatcatgtcgaaggacactgacaagagactccaaatgggtgagcagtggaattgttgagtttgatgaatgcttgcggaacattgcgatcggattggactcataaaattgggggacgatttggggggggggtaattatggacgcgggaaaaatccaatggtcagctaagggaatgaacaacagccaacccaccgtccatatcagttagttgtctgttgcgcgactctgttctaaatttggatcacccctgcccctttttcatctattgcccttcccctccctctctttccatgcttttccctctccctcccctccactctctcccatttcgtcccccgtccctccgctctctcatcagtcacccgtgtccacgttatccctcctcccccatttgttgactcaatgccgacaacaacagcaaaactcgttgtgtggtcggaaacgaacggtcggaagttgagattagcactttatgaaagctttgcccgattgaaaagccaatgaaccatttccatgacgaaatgttcctccaattcataaattaaccataattaacacctttcgagtcagtttatcatctaatgccttttgtgatttgctattgggttcagttttcctaccgaaacttggtatgtttccgaacaacaaaaagtgtcagaaataaaatcaacgacaacagagaatgaaaaatatgatcatatggcctaagacatggaaaaacaggacccagagccgaaaatggccacaatatatatagctctcgatctgcagtagacgaatccgaaagaattttttcgcggcaagcgtcaaccaatccatgaagagttacagacccgggaatgaaatggccaaatatagagctaatattttttggttttagcctaattttttcctgagctcccagtggcatttacccacaaaaatttcagaaattacactcctaagaaataaaaagttttctcaaaattcatctcttaaattttttggtaagacttcaattcaaggggtaaaccaaaaacacgtttaatggttctaaaatggcgtataattaataggatcatcattttttggcgtaaaaccgacgatttcttggcgaaatgcaatttttttttaatgaaaaaatgaacaaaatggggcactcctaaccttataaaacggtcaaacccagacaaatttggtatcatcgaaagctcttgatcagctaagtctaaaaaacaaggtataaattcgaatcgacaccatctaagcaccgggacaactgagtcccagtgaaatggacacttcagtaccaaaaaa

SEQ ID NO: 11696 - DNA, 1354 bp, Heterodera glycines
  unsure (1)..(1354): unsure at all n locations
ttattccgatcaattaaataaataaaaatttntgtcgaccatcaaaatcacagcaaatttttgtcatcgctcatttttctgaagcacttcaatattgtttgttgttgtgcttttcttattctgattggaggaagtgattgttgtgaacgggttggggcgcaaggagcagcagcgacggagttgggcatctgctgggcttccgattacattgcgggaaatgacaaggagtcttgaatgaaaaaaaataacatttaaatttatttaaaaataaaaatgaatttaaaaaactctatatttttaaaacaaaaattgaaaaaaatattttatatttatttaaaaataaaacttttaaaattagtgtgaaaaaacctcaaaagaaatcaatcaattatttgatagagttaggaaatgaaaaagagaattttaaggaaaccatgtaatttctgaattaattttaattaagaattttgataaaattttaaaattttttgacagccataggaattcgaattttcaagacttggagggatgtacccgttagagaaaatgtatttgtcaattttttgttttttttcttatgaaattaaatcatcctaaaattgaacgaaataacaaagcggagcaaaatgaatacaaacgaatttccagtatgttgttgatcagcgcaaacaaaggtgctaaaccccccagggcttctaattttaggaacatgaaaacatgtaatttttttaggtaaatttttgtgactgatccatcaacttatagaattattttgttcactcaacaggaaaatgtccttgaaatcgttgtgcttcttcaaacaaaaattgttggtaaaccaaattcaatgaatagtcctgtcctaaataattaagaaaaaaattgattaaattatatataaaaaaaataaaataatttaatagttttattaaaaaatttgaaaattctcgtacatcacccaccgctcatataagctgacttttgtgttcggactgatacatttgattgtttgacgccgttctttgctaattcgttcgcattttggtttctttatctcaggaattttgaaacgccatcgtcgaacccaataggaaagcattctttaaaataaaaaaaaattaaattggacgttcaatattaaaaatataatctgaaaagtttggttttacggaatgtataatagaaaatattccctaaattccattgggctggtagagaagggtaaaaaatgaattgagcaaataacaaggttgccacgggtcgagaaaattacaaaaaaaagtttagtcgagacttccaaaaaaaaattcggtaaaggaatgatgtgtcgggattcgggtcgggacgtagaaaa

SEQ ID NO: 11697 - DNA, 3393 bp, Heterodera glycines
  unsure (1)..(3393): unsure at all n locations
tgcgctcgataccaattttcatagcagaaactcgagcactggcattgagaagaggtggtcatccgcgtggttgaattggcagcactgacagccgacggcacagaaaatggaatagggagggacacagaaagtcaaagggctgaaaaggaaaatggcgacaattagcaaaaatccctaattaccctttgataattacaaaattccgcccaccgttgtctcaaaccattccaactgcattttcatttagatttaatttggttccattctcttttcccattgcatttctttccatggatttgtggcaccacttcctccaccatttgttgccggcaaaccgaaagcaccggtcgccgtacaatgtgtagccggaaaagagcaacaacagcaccaacagggcgtagaacagccatttgccaatgtgttgttgctgtgcatcatttctgaataaaaggaattaaaattagtattaaaaaaagtctgtggctcccaattccatttgaaaatttcttacaaaactggtcaattaatcgctttttcgggaataaatcaatttatcgcaataaaagccgaaaattggcaatagctaatcgtcccgcctcaaaaaatttgcattttttgcgtagtgaagggggaagaaaggaaatttcggttaattaaatgcattaaacttaaatagaaacaaagaaaaaataaaattttatttggaattgaaatcagcaaatattacgataaataaatatcaattattaattatgctttttcaaaaatacattactacttaaaatatcaacaaaaaataaataaaattttattttattttgaagcaaataaatttttaaaatcagggtcaaaaataaaatcttcgatttttttaaaatgtatgtgaaacttaaacaattttttgatcgccttcttttctttcttctccttgacggtgttgtcaaagagcttcacagccaaatagctcatccaaaaacagttcgtttggggccaaaaacgagcccaattttggctaaaaaatatttgtgtgaaaaaaaaaacttttctctctacccgactttctcctgcatcatcctgtatatgttgaattggtagtcgccattttcgcagctgacgccgttgcctgtgaaaagatccggatccttggataggtcgtcgaagaacaaatgtccatcttgtttgaacacacaaaattactgtcaaaaatttaaggccttaccgattcgaaaatgcgacaacgaaaaatcaatgatcgtcacacgcaccccttttgaggccacatcaaattgctgatttccgtacaagaaactaaaattacataagttttgaaaatttggcaatcgtaaataattgcaatccctaatttcaacttcttttttttgtgctgaaaccagttttaaggaggtttcaagggtgctgattatgaaattgaactcggatttactcaattctgtcaactgggcccgaattcgaacaagagttggaacttttttccaagtgatgtatttttctggagaaaagcttagaattcgtttaacaactatttattttggtgtaaaataatgcttcaattgtgcagaaaattgtggatcctaggaacaacaatttaaatgattttttcttcaggtttctccctcccaaaatttgtttagctaggagcctattttcagcttaccgaatgttctcattgtcccgacagtgctccacaagtacgtttccggtatggagatctcgatgttcaaaatcatattttttttcagcaaccgccagggcaaaggcgatttgaaggaaaatggagtaccgttgttcatttttggtcttctaaaaatgaaaaattttatatataccatttttgctgtattttgaatttgatcattttttgatcagtttaggggcaagacaaaaaataaaaaaattacaatagcaaatcgactatgctctacacaatatggtctaaatcacctttcatgttgagaataggtgaaacttttattgtgtagagcatagccgatttgtgattgggtttttttttttgcattttggtcctgactcccaaaactgataaaaaaaagtgatcagttttgaaaaaaaaatatttaaaaattatcaacgaaaatttatttgatcactaagcgggacaaaaaacctcaccccctttgaaggaccgaaaattttctgcttatttataaaaaatggccttttgtgccagaaaagtccaagcatggtcaatttttacctcctttttgaggtaagactcgagggtgtcgccactggcaaccattcccatgagcgcaaattttgcggcgtcgttgtcaagtggcgggagattttgcgcgctctcgtttaaatacttgaacttgttgaattgctccaacagtgggccagggaactttcctaatgaaaaattccaatttaaaagtggctacaaatttggcgtcctgtttctttatctctgttaagagaaaaattgaattcactttctttctttaaattttgcatatcgatagagaaaaatataatgcattcaataatccagccattttttgggagttaaaagaaaaatgtttgtttgaacgctcatatctagggtgtaaaattaaatggactaaaaatcgcgaaatatggacataaaattgcaaaaaatatggacataaattttacgatatgaggggtataatttctcaaagtttcttcaaattcgctaaattacataaattaaccaattttagcaaaagaattaaatttaatcattattttcgacaaaattttgcttaaaaatgttttttgaaaattttttcggtctttagtggtcaaaaaaagcaaaattagttgatggggaccgttctaataagggttttttggaaaaaggccaaaataaggaaataaaatatgggaatttaataaatacctaccacagacgactttcgccatgactagcttgatgaacgtaggaatgctttttcctagttccgaagtgatgaacagctcgttgaagacctgtttcgccgacacgaccatgggctcgtcaggctcttccggtgtggcagcgagtcggatcaccttgcaaaaaattatttgaattcggtaaataagcaattaaaaacagggattgaaccgggggaagagacgtgacncgggttttgggggacctaaagaatattcaaatttcggcattttttgctctacccccaaatttatcagcaaaagtgacgaacatgtcaaaaaaaatgggaaatccatcggngaattnggtgtcccgatagaaaagagatagaaattttctttgagctttttcaggggtaaaaaaggcactgatacgactccaagctcggatttgcaaaatcgttgattttgtctatgatttttctcatcaagtactttgatttttttttt

SEQ ID NO: 11698 - DNA, 3257 bp, Heterodera glycines
  unsure (1)..(3257): unsure at all n locations
caagcaggtgaagagtgcgacgtagattttcaccacgtcattgctttgtttgaccttgagtggacgaaagtagtccactccccgtttttgtcgatggtcgtgcttcgctgactcttcncccttggcaaatccgatgcctcaggatatgtgtacggcttgactcgttctcgacgacattcaagacatccgtgttgcggggagttgagcagttgctgaactgttttgcgtccgcgtggtatccagactttctctcttaatgttgacaggagtattctcggaccgcaatgtttgagctgtttgtcataatgccggatgatgagcttggttatccatgcgtgtggcggcagaaagattgggtgtttactgtcgtatggcagatccggtgcttcctcgagtcgtccaccgcatctccaaattccttcttgtcggaagagttgcaattctcggatttggtcgttggatggtggatgaagccgctgtgcttctctcaagatccaattttcggcctgttgcagttgtgccatggtcagtggtttgttgttttgatgcggttcactaattgtgccgttttcgattgtgcgaagctttttgatgaagcgcatagcgtgtgctgcggtggctttcagcctgttccaattcgaaaatcgttcgaagtggattgatggtttgaactgttcttcgacatgaacaggtgttgttgtcagttcgatgattggtggctcttctacttctttgaattcatctccgggccggtagatgacgtttgattttggccatttgtctgctttcgaaagccaaacggggccaaagcgccaaagcagtgatgatcgaaggcattgaggatccgctcctcttgatgccatgtccgctggatttgagtcggttctgacgtgtcggacttggaagttcgcttctcggattttttgtaatcgatttgccacaaatcgatcttggcgcttgttttctcgaagtcgttcgactgagcattgactgtctgtccacatgatgacttgatgatcggcaaatttgatttgcgcttggatgaatttgactgccttgactccgagagtcagtgcttgaagttccagctttggaattgtgccgtcgtgtgcggctactttgattggtttgacaaggctttttgcgtagatgaggttgcattcatccttcataatcgtcgtttttgccttttggtacacggcaattcccatgccgtatttgctggcgtcgcagaagcagtggaattccactgagtcgatggcttggatgtgccgtggaaattcaattgtgattgcttcgcctctgtcgagccactgtgccatcaatttgagccagtctttgctgatgttcgctggcaattcgtcgtcccattttggattcatgttttgcacttcttgaagaatgagcttggctggcagtaggaccggtgacatgagtccgagcgggtcgtagactttggcaatttgcgataggattgtccgctttgtgattttgccttcgaagatcggcaacttgaagatgagccgattttgctttggtttccatcgaatgccgagcaccttgttgtcttcgaggtcctttgccaagtcgtctggttgcagcttttttagctcttcgatgttgcttccgtagaattctcggagtttcatgcccgctgcttcgaagatagtcttggcttgcgtcaccaaatcttgaagcttttccgttggcttggcgtcgaacatgatgttgtcgacgtacagattctcttcgatccgccttgctaggtcggagtcgaatagcgcaaggtgctcccgtagtgtggcattgagtagaaatggagacaccgtcaggccgaaactgacacggcagaatcggtagatgcgcagttcggagtggtcgattggattgagctcagctgtctcggggttgttgagccaaatgaatctgcaggcatctctgtccacgtatcggatgccaagttgcagaaatgccttttcgatgtctgccaggattacatgttccatgcgtcggaagcgcaggaggatgccggtgagatccttcagcagttgtggtccggtgtgcaagcagtcgttcaaggatggtgctgatgggcaattctttggttttgctgacgcatccatgacgattcggatcttggttgttgctttatccgctctgatgactgctctgtgtggcaaaaaatgcagtggccatgcacttgatggtgactcaggtgggccgatgtattcgatgaccgactgtcgaacttgctcgtccaaaattgtctgatattcgtcaatcaggttgaggctgcgcagctttttgatcaatgaaacgagtctggccttggcttgatgtatgttgcttggaagagcatcgactctgtcgttccaaggcaaggcgacttggtatcggttgttgacgaatgtgaggttctttttgaagtagaccatcacttgatcttgatcagttggtgttgatgtgtcatccatgccgatcaggtttaatccgaagaagttgttgagctgctcgtcctttttgacatcatcttcggatgtgaagacttccttatcttctttggttgattcgaacgtgacggattgattggcttcttcttgttcagtgccgtggactgacaggacaaatgtgacgtttgatgcttggtgcatttcgatgcgtcctgatccactgaggattttgccgattttggaacggcacagtgtgaagccgcttggcagcttttcgattggttgaacctgcagttcgtgccagacatcaattccgagcatgatgtctggttgacgttgctcatgtggaggattgagcttttgttgtctcaattctgtcttgtccaactctgacagttgaatcattggcatgtcgttgaccaagaatttcatggcgttgaggttgaagatgagcttttccccgcttgtgcagagaaatccgagcttgaccagatcgctgatgtatctcttcggttcgcgttctccgaagctggtcaaatggcattcttcggtgtggaccaccgggaggtccagtagctgtgctgcctttgccgaaatgaatgatctgtggctgcctggatcgatgaaaattgccgcagtcatgctgagatgcggctgtgctggattgaagaccgttgacgttgcggtcatcagcagtgcgcgagtgtcgcttccgtttacggcattgcacatttgtgatgttgatgctgcgggttcgttgctttccgcttggcttgtacttggcacgttttgttgtggttgaccaaa

SEQ ID NO: 11699 - DNA, 3054 bp, Heterodera glycines
  unsure (1)..(3054): unsure at all n locations
tgaggagacagcgatgaacaccgaagacggacgaattgcccattgtgcgtcttctgatcgcatcggacatccatgccgggttcgcggagaacaaagagcatatcagcaacgattcattcgaaacattccgcgaagtgctcaagattggggtcgactcgaaggtggactttgtccttttgggtatgttttgctcacatgatcaccattttctgttgagcagaaaattgttaggcggaaatggacgatcataaaaagaaattggaaaatcattggttttggaattggtcggtgtttgagtgaataatctccggttcttgaccggtattaattagccattaaatgtgtcagaattcagggggtgaccttttccatgagaatcacccgagccgtgaaacgcaactgaaggtggtccgtctgctacgaaaacactgtttccgcgagggtcgacttggcttggaattcgtttccgatccgaccgtcaatttccaacacagcaatttcccggtcgccaattatttggacgtgaatcttcacgtgaacatgcccattttcacaatccacggaaaccatgacgatttgtccggaaaagtgagtgaactcactgattatgcaaattttcatgttccaacttttcttttcagggtctttctgcgcttgacgtgctccacgaggccgggctcatcaacttgttcggcaagttttgtgatgtcgaccaaattgaagtcactccgattctgttgacgcggggcaacacaaaaattgctttgtacggcatcggaagtcagcgagacgaccgattggcacgatcatttgcaagtgggacaacgatggaacttgaacaacaattaacgattaattgtgttgggttttgcagagggtcgagtgaagttcaatcgccccgacggggatgacccggactcgtggttctccattttggtactccaccaaaatcgaccgccgcgaagcaaattgaggagcaccaaatcccatctctccttcaagcacatccctctcttttttgacttgggttagtcattgcaaatccctgccatttttatggttccaatttttcagtgatttggggccatgagcacgaatgtttgataggtatggaaaacagtttgtaattttgacttgtttcagtgattttcagagcccgatttcaaatacatggaccccaacgattcaaccaaaggcttttacataattcagcccgggagtacggtggcaaccgcactgagtgttgaggaggccaaaaagaagcagattgggattttgtgaggaatttaatcaaatttatctgatcgattgtctgccattctcaaggtccatcaaagggaaggaattcaaactcaaaaaggtccctctccaaacgacgcgtcaaattttcgtcgacgaattgacactcgaaggagcgcaaccgaccgcaccgaaaatcgcaaagtcatcggttcgcctgaagaaaatgccggtaactaaaaacttcttcgaacttccttcacatcttttccatcgcttaggatgagccgttgatcaccgaacgaatcaacgaaattctagaaagtgccgaagcaacgcgaggaccccaacagccgtggccgccgcgggtgcgtttgaaagtgatttactcgggacgatggctggacattccggtaattggggtgggtggtggactgaattcacgtaaatttgacatccatttaagccaattaacggaagaaaatgggggccaaatcattttgccggcaaagtggcgaacgcagcggaaatgggtattaaatcactgtataaattcctcatttgtgattgaaaacaacagatcgttgtccgtgctgttcacccggagaagaaggcgaagaatgtgaacgacgaacagctccaaaactntttggggaagtcgtacggacgacatttgcagcgtggacgaaatggtcggtcaaattgtgaatgttggcgagtgaatgttttgtgaaagcgttgttacaggtgggcaagtactacacccaatgtgacttcanagcccgtctggngtgttctgtcgaaataacgatgggaaaacagctgcaggtgatttattgctacattttgcatgtgaatggaaaattctcgagtttcttgtcgaaatttgtccatttaaaggaatattccaacaccgaggcgaccactcaattcaaattcacggcagcggacaaagcactgagcgacagcatccgaacacaaatcgacgcgatgacagccaaagtgaagggaatgttgcagaacagaatggcgatgaacgcggaggtatggcgaagagagagggggcggggaacactgactgaccttagaacatgtaatccggcatttttacagatcgacgacattccgcttgatcagcaaattgcggaaggaatggcgttggcgaagaagaacccgcgtggtgtaagcggccgaagaagttgacctgaacgtgtccatcgccgcgtcgttcttcgaacacgggttcgaacccatgcgcctcgtcacttccacgccacggcccagccaacagcgggaggagacaccgcaggaaggtgaatcaattcaatgagaatacattttgtgatttgacatggtggaattggtcttttcagcaagaagcatcgaagacgtgacggaagcagactttgacagtccgtgaatgtgttttgtgccgaaaatgaacatttttatttgattagtaaagcgtttttcttagattcgttatctttggtgttatttttatgaatctttgacttttgttcaaattcgggtccaggttttaaattggttaaaatggacatcatattcgtgatcagcgacccgaaaccccataataaaaaagttatggcctatgaaactgaggatggtcattaatgggacgcataaaccggctagtaaccttttttccgaaaaagggggagacaaataacagattaccagggattaatgaaatgtgtgcctcagaaaacaagaaatttatttaggctcaaattcatttgcaatgcgcattttcgcatgggaaatagaggagattttatgaagcttaatgttaac

SEQ ID NO: 11700 - DNA, 695 bp, Heterodera glycines
aggatacgcaggaaaattgaaggactatgaaaatacggaagattcgatgaatgccccttagaatttgtttgatttatgttttttcaattatgttatgttatttgctcaattaataaagtattttattaattcattaactagggatcggatttttaggctctaaaaaatgccaaaataagcactaaccttttaaaaaagaatttaatttggggacgaaacgactcattttggcttaggggacgaaacgacgcaggacgaaacgacgcaggacgaaacgacgcgggacgaaacgacgcgggacgaaacgacgcgggacgaaacgacgcgggacgaaacgacgcgggacgaaatgacgggcagcggtaacctacacaccgtttcaaaaacgagaaatgaaccaataaatagagagtgcagagaaaaaaacatctctcattttggcgtactattttttttatctctgttaatagagaaaaactgaattcacttcgaacaccgaaaatttttttcgactggcgagattttctttaaattttgcgtaccgatagagaaaaattttctgcattaatttctatgattgttattcgaaaaacgaagttttcgaacgcttgatatctaatttccgtgtaaatttcttaaggctgccgaccggaacgggacgaatcgaaggagagtcggagcgcgttttgtctgcg

SEQ ID NO: 11701 - DNA, 4614 bp, Heterodera glycines
cataaatattttacttataaaaactcaaaatatgtttttttcatatttatgaatattgacattaaggggttttttcaaacaaaaaattaatttttataataattttgtttttttttattttaaattaaaatttgtactcaaaactgaccactttcttcatttttttttgttgtaatccataaaaatttcgtccataaattgagcaaatttgagcacattttttgatggattggacaaatcccattggcagtttggtgaaggaatggaaaatacgagcaaatttagaaaaatatttaaaagaaataaaattttcaatagcatatttcttaaaaaaaaaattcgttaatgtttgttttaaaaaaagagtctataaaaataattgcacagaaaaatgaataaaattgatgtaaatcatttaaaaaattgtatttttttgggctaaattattaagaaatcggcatttccattttccccggcgcggcacttttcggcacgccgaatacagatgaatagtgcttataaaaatttataaattttttgatttttactttgaaaacaggttaaaaggttcccgcgtttttgaaaaattaaaatttgtcgcttttttatcacttttttaggcgagttagacgccgccgggaaaattttgtaaatttatttctgatttgttaacatatttttgttcaaaaaataaccaaattcggtgatttttagtcaatttatttacagagtttataccaaaaatgttcaatttttaaggaaataaaagattaaattcgttaaaatttcttatgggatattgtaaaaaaatatgatttttttaaacttatgtgttaaaagagtaaaattatttttattaaaaaaattttgagcattttttaacttaatgataaaataaaagttttcaacaaaaatctttaaaaaatgtttaaagagattgctatgagacagcattgaaccagtgaaagaaagaagcgaatccaaaagattaaccactacgccacaggtgcacttgatagtcccgtttttaaataaatattaatcgcattttttaaaatttttttttaccaaatttgcttaacaatttgacccagacccattcttaccagtgtacttttggacccggacctaccgggtcgggtaccgggtattggattttcaaaaaaccgggtccgggtcttgaaaaaaccgggtatccggatctgaaacccggtcgggtcccggacccggccaaccctatttgaaatcacgccaacttttgattaaaaatacgaagaataccccctaaaatgaactatttcagaaaaaaacaacctttaaagtcagggttccagaataccgaggtttttttaatttcttttaaattaagattagacaaagtcacaaaaattcgaagaaaatttgtcttattaaatcatttaacaaaatttgattaccttcctattcaactaataatttggaattcatgtgaattttataatctatgttgggtttgaataatattttttgtcaaatcacacactgccttataaatggacaaattttggctgatgtttttggtttgtgggcgtttaagatgcatgagagcaaatatgtagggggtgctttgtttttatgaaatcattaaatcaattagcttgctttttatttaatcgatgcttaaccggaacatacatgacaatgtgtaataatatccatttttattataggagctgtaatattacaaaataatattcatttttgtttgtttgttcattatcggactctaatttgtttactttcattcaggcccgtagccagaggtgggggaatggggagggaattcccccgcccccgaaacgaaaaatgaaaattttaataaattaaaaattgaaaattttttaaatgtttaaatataatatcaattgaggcaaatttaataataattgaggcaaatggcaataaaagtaatggcattttatagaggtgcgccgtgcctgaaaaaacccgtgaaccgtgaccgttatccaaaaaactcgtgaaattcacggttttcgtgaccgtgaccgtgaattttttgaattaatttttctctgtcggcgaattttatttgagttcatttatgcacagattttgtacgtaaaatgagccaatttcgcaacattaatcaatttaaaaaggcaaaaaacgatgaaaaaatttgcaaattagtatatcgattccgacctttttaaaatggttttgtgagacatatgtaattacccaatttttaaagaaaaataggcgttttagtggaaaatttttgaaaatgtgatttgttaactgattctgcctaaaataattttattttgagcgaatttttaaaaaaaatttaatgagttttttatttaaatggggtcatccttgaaactgtgctatttgtttttgcacaatattggtagttggctttgctcaaaaaagtttcaggaatagggaagggggccggcggtgcagataggcgccgctggggaaatttttgaaaattttgctctgtttcttagcaaactttgcccaaaaactgaccaaatttctctagaaaaataatatgtaattcgtaaattttcaattttatccagtttaaatttttcacggaattaaccgtattggtaccgtgaatcgtgaccgtgacgttgcgcttttcgtactttattttctcatcaaacgaccgtaaaaaaatatttgattgtcctgaatcaattatgaaataaatttgaaattccacagaattaaattgtttatttggtcgctttttttatcaagcaattacttctttttattccatgttttaccatttttgaattacattttttgttcgattcaaaccacaaatatgtttatatattcaagaaaaaaagtcaaaaaattgttttgtcaaaaatttattttccaccccctaagtgtcaaaataaatatttgattaactatggtaattagttgtttcattcccgtccgtgaacttgaacgggtcatcctctgctgatcagcagaagaattaaggggggtggcaccgccaacaactggtgttactgtaattacgcttttgtagatgtgtgtctctcatttatgaattgatctttttttatcgtgttcttgttgatttaacggtttaattctgctattcatcaatcattctctgcggttgttgacaatggtaaagtggtctcacagtctgcccattcagcttcttcgcactgatttttgtagtgcatgaaaatttgctgatcagcagcggtcacagtgttggcacgactgcgctgctgatcagcacaagtgatcgacgcctgcccaacgccgttaggctttccggatcgatgcgctgtattttggcagttgttttgagcaaaacacagctgatcatcgtggtaatagaaagcatcggattgcgaccgattcagaccagtaaatttaaggttttgttgatcattcatcgcatcaagttgaccaaggctgaggtccaaaatatccggcgttgtattctggtcctcaatctcgccattttggcactgatcaaaatccttttgctgatcaatgtcatgttgttgccgatccgctgataatggcttcccttgttgttgtcgagcatgttccgtcgccgttaatgttggctagaaatatttcaaaaagatgccttaatcagcagagggggaaaaaaatcctcaaccgtagaaacccgaaataaaaccaaaaatttccgaaatatgcaatccacaattaaaaactctagagcgaaatttatgccaaatttgtcggttcaaacggaggttaaatttttttgtttatttttgctttactaatcaatggtgacaacaaaattttaacatttgtgatcacaacaaattgttcgggttttgtcacaaataaatgaatttttgaaaaaaacaaaattgcgtagtaaatattagagtgccacgggaccgggacctggtagcggacaactgagtaccaaggtcccggttttgaccgggaccgggactagtcccggctttttcccggttttcccagccaaaaattcccgatttttcaacccgaaaaggtcccggtcccgggtttgcccaaaattcccggtcccgtggcactctagtttaaactgacaagagttggatttgtgtacagcaattgaaacacaaaattaaaaatgaatggcattttgattcggtaaaacgtgtccttgagttttcggaatttctgatcacgatctgagaccataatcgtgatcaacgacttcaaaacccccggagggaacacttgccgaatagaaataactcaaccaaaaaggtacttttacgtggtgtgcgaatcgtttaattatgtacattctgttgaacaacctaaaaaaatgtttcaattatttatctacactattctgattaccataaccaaaaactttatgctggatatttgtatattctttgtttaattttatattttccattaagtctcacatactttcaatcaatttgctggttttcaccagagtgaaggccaattaccatcaactcgctttcgaatttcttcgatttcatatgacttacatattgatatgatcaaaaacctttgactggcaataaccttgtattttagcacctacattaacac

SEQ ID NO: 11702 - DNA, 2494 bp, Heterodera glycines
tcgtcccctcgctgtgactcatttttgtcacggaatttgggatttgcacaataattaattcgtatctaattaattaaatgatttgtaaataataattaattttcaaaaaatatttgctgagtttggtataaaagtaataaaccatttcaaaagtgtgatccaattgttggccatttgagtgcaattttatgacatttgacagaacagacgaaatagcgcaacattttgtttttttagtataaataattgtccattttcaacacaaaacataaaacatcagagggcttggatctgctcacggagcgcttctttggtcatccgttcaaagccgtcctttgtgcacacgaccaactcaacattgtcctcagtcatggcaacgctacaaataatgggaattcgtagtaaaccgaatttgaaagcaaaagttcctggaatttttcgcataattctgaaaaagaaaagccaggtggaatgatgaaggtaacaggattttggcttaccgttttgaggaggcggcataaaaatggaccgagtttttaatcgtttttttgtgataattataagagattttagacagtttggaaaagatgggcccccaaaaaatggcgaattagagactccaacaaaaatggtgtaattccgtgactcccaaatggtggtttccgagtccataaaaatggcgaaattccgtaccaaatggtacactaaacaagctatggttctgtactttttgagtcaggggtacaagaaatcaggaatttttggtcatccgggccaagatctgcggcgcatttacttataccgtcaagttacactcactcgtaagtctcgcgcattgcaagcagagccatgtgtatcgcgtccaccttctcaatgtcttcattgtaccgcttctccaacaatttcttggccaattggtcgtttttgccgatcgccgtgcttttccacccaaaataggaaccctgtggaatgaaggggaaaatattgcaaaattttaaattttcatgaaaaatgggaaagaaaataaatgcctaggaatttcggggtaatttttttttcattttgggcatttatttattatagaaaagacacttaacatgtaattttttaacgggggatacaaacagaaagtttcttttgaaaaattaccgccggatcggcttgaaaaagaagcgcccccttttcactgtcccatccgccaatgagcaatgaaacgccaaacggacgaacaccactaaaaaaatttaaattcctttttttaagttttttacaaatagaaatattttcaaattgtaggttagtttttctgaaaaatttctgttttatttttttttaaattcggggaaaaatgatacgagggggtggggtaaacgagcagcccccataaaaacagaactttaccccgactgtgtgtattcctgcatgaccgcagccacccgggaaacgagttgaggcacgggaatttcatagccgtacagcacttggtaatccatcgcaattttccgcgctttcttcacgagaagtctgtcgaggtgcaagaaatggattaattataacaattaatgattctttttttatgctcttgtgtagaattgttttaaattcaaacacccaaaaaaatttctatactttttatttattttttgaaaatcgaacccctgacgaaaaaatgacagacccattaacaaaaaactgtcatcaaccaggccatggaaatttttccttttttttttggtttcaatttctgaaaaaattgatgtaaattataggctagcggtgccaaaatatgcgcccttgagaacattttttgcttttcttggcaattatcaaattttaaaaaaccccagataattcctcccgtttaccccctctaaataattgagaagaaaataaacaggctggacggattaatgataaatccggatccaaattggcttttagaattaaaaaaaaaccaaaacgcactgtgcatccgggcccatcccactgtacacgcatgcaatatggtcggacaacttggagattttgctgacgggctgtgtgaggacggagtgtttgttttcggtggcgaacacaacgcaatcttttgctgcaaaaatgaaagaatttgttgggttaaaaatatgctgttttcaggagtatcgaagtcattgaacaggaaaatggcatcacttttcggcaaaactcttgaacccgaactcaatttggaaccaaaagttgtgttgaaaactcaacccgcgacataaaaaggaggtaaaattgaaaaaaatcatcatttgttttccggatgtcagataaacaattgtatattccaccagttgcggtttatgtttatttttgaaaaaagggatttgaaacttcaaaattggccgatttaaataaagcgccatatttttagagcgttagatttattttatgttatattcaagccgaaataggacaaaacagacgccatattcgtggtcagagacctcaaaatgtcctgaatttcttt

SEQ ID NO: 11703 - DNA, 1726 bp, Heterodera glycines
taaaaccgactagaaaccttttttgaccaaaatagtgatggtggtacaaattttgaataaccaattgaaacataatttcattttaggtaagaaattttgtgtaattatagtaatgaaaaaaaacctcgggtgccaacagatggcgcactgcccttgacggcattcaacgcatactcaatttgcatcaacttccccgagggactgtgggagagagggaaaaaattaatatgctgtttgaaaaaagcagctaatttagccatagtccaaaaccgtccgaaaatcggttttttctatttcggaaattatttacattaagagttctacattttcagttataaaggaacaatctgaccaatagaattgattatgcattaaacaaaacctgaaggtggtgagagagaaggaatagcgttccgtgctcatttcggcaacaaaaaaaaatgtattttgtgaataaattggcttaaaattgatacattaaactgcaaaataataagcaaaaaacaaatgaatgttatgtgaaacggttcggcgaaaattgaatccaattaatgaaagtacagataaatacaaagtttggtcccccgtaagacagtcatacttccaaaatccatcatttttcagaaaataacatgctctataatgtcaaagattaaaaaaccccaagcgatcctggaaatggcctgtgtttgtgaaaacccatcaatgcccaaagcgaaaagcaaaaaaaaaacaaaagaaaaattgaatcatcaaaatttaaatttagccctgaaagacaaaatgccaaaaatattcagctgctttttttcaaaccaaagaaaatctaaagcccagaattttggaaaactcgggatcgcgattcgagattggaatcacagttttgctggcattcgaatcctgaactcaatatccaaatccgattttgtattctgttttgtatttgatgaaaaattttgcgaaaattttctgctatttgaagataaacagaatttccacactgaaattgttccgaaaaaggatgcacaaacgaaaaattggtacgacgagggccgaaattgaaattgaagattgcaatgtgcccattcccgaacttgttcaaagtcatctgaaacttattcgacaaatacgcgagaatgtggtcgcccccgtggacacaattggctgccatgcgttggccgacaaatgcgcagacccaaaaacgtatcgtttccagattttggtggcacttatgctctccagtcaaaccaaagaccaagtgacggcagaggcgatggaggcaagtaaagtgccagctaataaatcgtataaaaatgaaaataaagacatttttgacaaaaaatttacacatttttcagttttttcctggaaaaattcggtgccaaaaaggatttttggtttcaaatccaaaggagatatgttgccaacaattcttgacattttcatgaattcctttagaattaggtctaggacgggctcgaatttaacccgaattgaagttatttttgtgtgacccctcgcctcgaaattcaggaaacgctcgaaaaaatgtcaaaaattgtagaaacaactagaactgaatttctaatcagctgagccaggctagttttcggaagcaactggtttccgggcccctgtctctccaaaactgggtttttccaaaaaatcgcccaggcctgacccggtacaaaacgggcattcgttatttgaaatgtatgcatttgaa

SEQ ID NO: 11704 - DNA, 4235 bp, Heterodera glycines
ataacacgtaaaattaattaattaaatccataaaaaattttaaaaaatatttttaaatttacaaaatttttattagaagctcctccacctccgccacgaactcaagtgttccatactccacatcaagatcacggtcagtacggattaattaccaactctgttaattaggcaaattaatgagcgaacttactgtaatttataatgtaagggtaaaatatactgtaggaaaatagaatgtaatgaaataaaagttttgttcatttcagaaccgacaagctacaatttatgtggaccaaattggaacaaatttggccaccattgctatttggtttgaatttatttttttattattacaattttaaacttaaataattattatttttttatagaatttagaaataaaagaatttttaattattacatttttaaacttaaatagaataattatttttattattattataatttgaaaggaaaatattttttttaattatttacaagcttaaaatttcatttatcattttttaaattaaaattttcaaacataattaaacaacataatgtgctaaaatttaaaaaaacttggcaaattttttttgagaaaactaaaaatttacagggccaacaaaaataaatagttttttagcttattttctcgtaaaggtttccagctttaaaaattttagaattttccaaatgttaacccctcgccccttttattgtcacactctttaagttaagaattttatttaaattttaagaaattttccaattttcttccgcgtttcctgtaaattattccatttcagaaaagtgaaaattcaaaaacctaaaaatatgtattaaaattcttccgacaatttggaaattttaatttatttaaaatttggaattttctatttttcacttcaccccttccctccgtctacttttaattaatcccatggcaaatactaaaaagttaaaaattcactaaaatttttacacaagccgaaatttagtttatttaaaatttaagaaattttccaatttaagcccccctccacccattttaaggttagtacaaatccatcaggcaaaccaatcagttttgaggaggcaaacaaagagtgccaacaacataatccaaatgccaaacttgcatcaattcacagtccgatggaagaagattttgtggccggtgagtggtcaatttttgctgattttttcccattttatgtgccccaattagcagaaattgtttacaaatagcgccaatttcggattaaattttttgaaatgccaaaaattaataaaatttaaaatccggaaaattcataaaaaatttttaaaagcaataaatgaagaagtcaaataaaagccgaaaaatcaaaacaaaattaaagcaaaaaaaaaaaattataaaaatttatctgtgtttttttatgtttttattttaaacttactgtacaataataattcataaaaattttttttgacttgttgaacacttacaaaatcgtaagtgatacagtacattttttgaaaacgagatacggtagtaaggccatctgaattattgcaattttttttgaatatttttaatttattttaaataaaattcacagtttttatgtaatgatatactcatagaaagagtgaattagggaggttttttgtaatttattttaataatttaaaattaattagcataattaaaaattaattgctttttagcttttaccaaaaatcgtcctttccgtagccaaaaacaaggacaatcattgtattggctggcacaaatcaaaagtgccgtggaacacgtaagcaaaacaatactgtagtcattcattatcatacaataattacaataattaatataataaaaatgaaaaagaaataattttaatattttcaaatttaaaatattaattataccaaaattaaatcttctttttttatttgtgaaaatttttttgtcaaaaaaccccacaaccgaacgaaacaatacagtcattcattatcatacaataattacaatttaatataataatgaaaaggaaaattgaacaaaaaatgatttaaaagaggtcaattaatgattttaacatttaaatatattaaaactctttaatttgcacattttcgatatttaaaattatatcactcaaattttaaagatttttttgtaacagttttgtcaaaaaaatgccataattaatttttttaatattttttatttctgaaataagggcaaaacttcaaaaatgaaatgctataatgtttgtaagttcttttctagaatttgcatttcttcttaaaaatatgaatttaaaaaaaaattgctacagttatgaatacagtatgttttacattacagccaaacaacgatatggatgggaactacgataatgagggtggcagcaacagcaacggaccttttgtatggtctgacggtactaatgtcggctacggtaatcccactgacaagaagtcgggcaaaaactttccatggtacacaaaaccaagcacaaaatatttggaaaaacatccgggtgtggtgatgtacggtaaaaaaaaggatggggaaaacaatccatggatggacgagaaacataccggcacgtggtcggccatctcaacacagagcgccacgcatggcgaatcggtgccagatgtgcatggctatgtgtgcaaaatgccgaccatgaaagcgacgaatacggtagggaatgcgaaaaaaaacgaaaatggacggtaattgtttacgatagttgttgcaattagtcatcatctgttttgtagctaagtattgtggtaaattttgtaagaattaaaaaaaattagggaaatttttgggtttgtatttaaaattatgaaaattttccaacaaatttaataaaaattttctcccattgaactcattggcgcttatctttgctattgtgccattaattcatttttacattgtttattgttcaaattttgccaaaaccattcaaatttggttatttttagtccaaatctgtaacaaaaaggcaaatttctttggagacacaaaaaatactttttattataaaataagaaaaaatttctgtatgaaaaataaaattagcaacaaaaaacttaatttaagaatattagcggagttcgatttgttcatttcttcatcaagaatgttaaaattgataagaagaggcaaaaacataatattgatatatttttgattgcataaattataaaataacaccagtaaaacgtctgtattttgacccaaaaaaactgattttttttttggcatttattttccggtttttgaaaaatttttttgataaaaaccctggattaggcgggagaaaatgtcacaaaaaacaacatttagaaagaaatcatttttgtattcgaagaaaatattcacaaaaacattaatattatgttgtttttgtttaaattttaatttaaacaaaaattctaattttagcaccatttgaacccccgggcgccacccaatgccgacgaacagcaacaattctcaacaaaaatggcacaaaatttcaattcgcccaaccccacggaaaacattgatgaaaaggatgaagagccacacttcagcagaaacaacggaaaccaatatggtcttgggtcggatgatgagcacagaagaagatggccataattgactgatggcaaatgatggaatggcacaaaaaaatggatattatttttttgcgatggatttttatggtttttttcgggcattttctatgggattttcacattttctgttttcttttattttcatttggggacgctattttgagagttttggttttttaaaatttttatttgtttagaaatggttagtataaagtattttcacacaattcattcatcgtttgctcaattaataaatgaaaaacaataataagcaaatcggaccgaaatcaaagatcaaaaaaaaataataaaaaaaagaaaaatttaaaaaaaaagattcacttcatcaataagaaaaaaatttaacaaaatattatcatgctggtttgttttgtaaaatatgccaccttcggcgtttcttaaattccgccattttatgaagaaaatatttagagacggcaaatggccgggcatcataaagaatagaaaaaaattagaaaaaaaatccctttctcggccacttcccgaacccggacccaagcaagcctggtatcggtgatagttagtttcgttaaatacgccattttaacgatttttcg

SEQ ID NO: 11705 - DNA, 2290 bp, Heterodera glycines
  unsure (1)..(2290): unsure at all n locations
attacgtaaaaaaacaggctaaatccgtaacccttaatccgtcattcgggaattcagaaaataaaaattccgtaatcagtcatcactagggctgggaatttaagtcacggaaaatttccaaaaagtcacgaaaaatgcaaaaaaattataaaaaaaaatagccaaaaagtcacaaaaaagtcaaaaaaagaccaatgaaatggaaaaaagtcctcaaaaattaggcaaaagtgacaaaaattttatttttaataatttgtgaataatttatttaaatagagattggatttttaaccggattataattcgaaaatttctacattaaaattcaaattttgccataaaaagtgtaaaaagttatgaaaaaaagtcacaaaaatacaaaaaagtcataaaaattacaaaaaaatagaaaaaagtaaaaaaaaaagtcacaaaaaatgcatgtaaataagtgaaattaaaagcatatttaacgccgaaaagctaattgaaaatgactaataaccagccgaatgatgcaaatgagtaaattgtataatttttgttttttcccttttaaatatttcctcaattttagtctcgattttgtaattttaaaaagtgcgcaaacttacgttttgctaaaatgtcccacattaaaacagacaaaacgacgaaatgatacaatgctaaaattctctaaaataaacatgccgaaatgatagttgaaaatttcattggtatgtgccagaaatagtttttctggtgaaatgtaaaggattgtcgttcattttagcacgagtaattatataattcgtcagaatgatgtgttcgcttgggataaactttctgatcaaaatattaattgacgaaaatttgatataatgaatatgcaattttaattgcttttatattttaagtaaaaaaagtttttaaagacttattttgaaaaaaacttttgtattatatttgggttcaaaaaacccaaaagaaacttataaatttgatgggaatacaataaatgctgtggatacaattagggacttaggaataaatattgataataaattacaattttccgatcatgttaaccaaataacaaggaatgcctatttacgtatgcgttccttgtttagaataattaaatctaaatcttctaaaatctggattacattatataaaacttatattaggcctttattggaatatgctccggaggtttggaatccgtctcttaaaaaaaatattaaaaaaatagagaaatgtcaaaaatatttcactaaaatagtgcttttcaagtgtaaccttccaccaattccatacctgaagcgattagaatacctacaactaccaacacttgagaataggcgaaagctatttgatctgttcatggcgcataaaattgtttatggccgaacagatagatctagatttatttaaaattttcaaaccttctaaacgctttaatgtccccttttataggtttaacacaaaatataaattaggcaaaaaatttattccctttgcggggagggctacaaaattgtggaatcaacttgataaagaaatcattaaaataaattctttaaatcaatttaaaactaaaattaaactccttaacgaataaatgacctgaaaagtgaattgtctcttttgattaattaattaaagctatttataattttatatgtgatttggttttattgatcgattgacctcattcttttatttaattttgttgtgattccttaattttgtttaattgttgatccatattactcgaggacgacttaatctatgacatgtccgcagagtaagtggattactcccttttgtggaattttttctcttttgcataaataaataaactccaaaaaaacaataaaacctataattttctctcctttaactaaacccaataatatttaatatacatagaggaaaaatgattcatttttctttaaatcccccattaatttttgactcttacccccattcatgctagaaactttttttaattccgatcagttttttttttagaaattggttttgattgatttcatatttttaattatgcatttgtcatttatggctttctaatgtgaaaacgtttttttccttcaacggacttcctgtttacaaaatttaaaatttccacgtatttccggcaaaaatatttaatggaaaagttgcatataaaaacggcaaaaattttcataaaactcatcatcaaaaattcattcaaccatagaatttattcatttcctaatataagtttttttgtacaaaatgagcaactnnttatatt

SEQ ID NO: 11706 - DNA, 5132 bp, Heterodera glycines
  unsure (1)..(5132): unsure at all n locations
ttttgaagcatatttaccatggnaaattggtgtcggtgacgttttcttatttgctctaataatttcaacatttgcctacaaaatattaaatttccgcaatttttcttctttttcatcgcagttgttgctgcatggattttgtaaatattaaattgcatttaatatatttaatataatatttatttttaatataaaaaaaatttcacagttttcaatatcaccaaaaaaagcattggcaccgtttggacgtgccagggccaaatgtgaacattttctttggcaacacaataaagcaaattcgcaatggcagcattgatgtgcgaagcattaataagaaaatggaaatattattatttatttaaaatttttttttttaatttgcaggttgaccgagaaaatttctcaaaatatggaaattcatttgggtaaaattttgttattaattaatataaaatatttgtttaagttcttttttgtttgatcgtcgcgaattttgcaccaaagacccggatatgatccgacaaattttcatcaaagaatttgcgcacttccaaaatcgctttgtgagttttttcggggattgacttaattaatggatatgtgagtaattgttgtttcgagactcaaactcgatagccaaaaggcgagaaatcagtaataatttgggagagaattttgatttgaattttattttgatagaccataccttttctgaaaaacaattaaatatttaattaattaattaattatccaaaaggatttcatccccgggcgaaaagaggacgcgcccaaatcattgacgcgtaacatgatcaacatgttgcgcgacgatgattggaagcgggtgcgcaaccgcgtaacgcccgcattcaccacgggaaaactgaagaaagtgagtcatccagagcgcaacggcgagtgacacataaatagggaaaacaaatattttgatttttttttaaattaattttcaaaaaaaccataaaaaggtggaaggaatacacaaaacaaagacgaatcattaaagggattttagccagtggctaattagttaattaattattttgccattcgaatttagctcattccaattttatgcgaatgcactgaaagactttgcaaggtatttgaagatgaatatgcgtcgaaaaagaaggaaattctcttaaaagagtgagttaattattttttttattgagtaattaaagtcagcattaacggcgcaaaaaataattaaaaaattaaatgccaaaataaaattaataaatcaaaaagaaaagcataaagaaatgtatttattttttaattgcccagtctttacggccgatttctgttggatgtgatcggtcgctgtggattttcgttggatttgaacacttatgaggaggaaaatgtttttttagaacaatcaagattagtgttcaattttggccgtaaagcgcaacgcatcagaacgatactttgcggtaaatgtcgtgaaaaatggcacaatattaaaaaaaactgctcaaagggattgattatataaaaatcaaaaaatatttttcttctttaattacgaattacaaaaatatattagtaagtcactttatatggtttaatcaaaattttaatttgccccctaatggatttataattaaaattatatttttttaaaacttacagtaaaaaaaattaattaaagcagaacaaattttaaaaacagtacatctgttgaacctataattttgcatcaaatcgcaaataaaagcacaattttttcgtttattttttccactcactatgtttaaagaaaagagaaaatcatttaataaattttaatttccaatttcgcaatgtttaagtgttttttccacttactgctaagctaattgagaattttacgggcaaatcgctcgcttttgccgtggatgaacaatttttcaaggaaatgatgggggaattgtacgagaaacgccgcgccgacccggcggcaaaagaagtgcgattaattaattttaattgcttataaataatgagaaaaagggaacacgtcacaaattagtcaattgtaaaatttaaaccaaattattattgaaatttgtttgccagaagtactcggacatctttcaacttttgatgaatgccgttgaagaagacgacgaagaaattgtggctgaaaacagtgccatctcagcggaggatgcccaaataattcacagcgaaatgcgaagcgacgaaaagcagcaaaagcagggaaagcatttgaccaaaattgaactgttcgcgcagggattcatcattttggtggccgggtaattcttggcaaaattatttttaagagggatttcaggatttttgtgttttgtttaaatggatttgggataagatggaaagtagaagcaaagccaaaattaaaaaagaaaaaattaccgaatcttcaaaaagtgtacgatatgatttatttttgtaataatctgttcaaattattagctgattattgccatcaattttttgttgttatatagccaacgtaaagcaatttgtaactaacctttaaaattcacattttaacacaaaatgccttaaaattcaaatttatatcctagtcaaaaatatgatgacaaatataattttggctttcaaaatttgtaaattatcgtccctattttttaataaatataaaaacaattacaattgttcaattttgattttgattttgattttatggaaaaataattcacttaaattttcttaaatattcccgatttgacaccaccggcacgacattgaccttcgccacttatatgctggcaattgagtcagaagttcaagaaaaattacgaaaagaagtaaatgaagtgttaggggagaaagtaagtgaaaatggacaaatttaataaattaaagtttaattggcaaattaaaattttattttattattattattattaatttttaaatcatttactttaattatttaaggaagtgattacttacgaacatttgaaacaaatgcattatctttgtgctgttgttcaagaaacactgcgaatgttcccagtggcaccaaagtgaataatttgaaattattaagaaaatgaatcagtttaaaaaattggatttactttttggataaaggataaggatgctgcttaaatcatttcataaaatgcaaaaattgtccaatggctgcattttttcatattttatatgggatttgccattatttttgaaatggcaaaaataatttttgtacatttgcctcccgatttaccggtcggtttccagatctttgtttttttgtgcatgcgttttcctgtattttgttcagaaaaagtctaacagatcaattcgaaaaaacatagctgtaaggttccaatcactaactatattttgagctcccagtcactcactggttttatgcaatttttaaaatatggcaaatcccataatgataaaatggcattttgtttatttattattaatttttataattaagaaaattaaatgagctaattaaaaagcaaaataaaactcattatattaaattaaggaccaaccgcgaatgtaacactgactgcgttattaacggagttccgttccaaaagggcgacttggtcactctaccaatttatgtcattcagcatgatgaagcatattattcaaatccggacgcatttgacccggaaaggcattttaaaaccaaattattacatttcgcttcttttttaaagatttatgccagagcaaaaggcggcacttgacccattggcatttttgacttttggcattggtccccgaaattgcattggaatgcgttttgccgaatttcagatgtatgtgacattggcactgcttgtgcgacgcttccgcttctgtgccagctcaaacactccggtaaaacccaaaataaattcaaattagaaaaataagtttacgaatccgggcatcataggaaggaaattcgcaaaattgtgcttcattgagattgggctggaattttatatttcgaaatttttaaattttgcttacttaaaaattttagcctattaaattcataatttttaacattaaaaatttcggacttagaaaaactattggcacaaatttttatgggtttcatcaaataattttccaccaatttttaattattaccgcaaatttttaaagacgaatgattttttttattataacttttaattcatttaattaaaattggattgaaatatacgcacattaagtcagcacattttgaaatttccaaaaaattctacttttatatatttcctggcaaaattttgtcaaaaaaaatcttggccttgcaacaaattctgtgtcttttgatttttcagaaattcccgcccaaattgctctcttccgaatttcttcgcactgccgaaccaattgttgtgatagcagaaaaaatatgaaattgaagaattgaaagaagcgcaaagttcacatattttgaaaaaaaaaatcattttttctaatttaaaaacattaatttattatatattttcaataatattttcttgtattgccgacgacctttcagttccggcgccgtctatttctataacctactcattttgcatggatatgtgtaaagaattcttagcaaaaacatttttattttcttctaaaaacaataaaatttcggaataccgtcggatgttgtcagaaaaaagtctagtatttaaatcatcaaagtttggatggataaattaatacataacttttattggcttttattggaatgtgcgctccaccggaggtttagaagcagtctcttaagcaaaaaataatcaaaaattgagaagtgccaaaaataattttacttaaagaataaattatttgccatgtttaaatttcgcattaagtctataaaagggaaatgttcagatggtttattctttttcatgagaactttttttttgaaattgaatttttcgtctaaaattgaaagaaaattttttttttcgttttagtgtttttgctctcaaaaaaatcgttaataaaaataatttatttaccaattttgatacctattatttgctgcgtaattagcttatattttattttaattttaanntcatgaaattnaactctcacgaacgatttttttgaataaaaatttattttttgca

SEQ ID NO: 11707 - DNA, 1321 bp, Heterodera glycines
atcttcaaagcataaccgatcattgttttatttttgatcatttttctattggttatccgatgattcagtgatcaatgaaaatgatcactcatcactgaatttccaattcattcgattctttatttgttcaggtggtggtcgagcggatgtccgactgtggtcgcgactccgtggtgatggtctccgaggagttctacgacaaacgcgtgctgatccgatccgggtcaccggttcggcactcaactataatggaagagatggaaagcagtgacgaaggtgcgaagaaaacggaaaactggcgggtgacgaagaatgataatttgctaactccaatttgaatatccacgaacggcttaatgagagaggaagagagagagagagagagagactaattgccaaaatcaaaaagctttaattgctgtgattattttttaaaaagttatattttttataagcaaaaaaaaaacagaaaaattcgcccatttattattggatttcgcagatccttccaacgtttcccctgctcctttatttgtattgccgttgtgcttctttctcattttgtgttgtgcatttttaattttgtgtataaatattaatttttttaagccgcacaattcgcacttttagcactgctttaaaataataatttaaaatcagaacggaatttaattgataaaagcattatattaaaataagtattgatgcattaatggccgctatgcttcctagattaagcgatattaaaaccaaatcgtgcttaaggacggccatcggattcttccccggggacaatggtcgacgcacacacaaaaatggcggtttcaatcagtgcgcggagtgaccgcgactcggtgcacgtttttctggaagagatcccatgcggacagattggggcccaagtgaaggtggcggcagataattgaacacattaataggataaagatatgtgttaaggccccctccgcttctccgtgcccttcgatggcttcgactcatttccatgccaatggcgcggaaatggcgggacgcaaaagtgcccaaagcgttgggatggcaaactcagcggaatggagggactgcgtgttcagagaagcacggagaacaagcagatttagatgaaaatggcaaaacaatgaatgcttaagatcagagtcagtggtggcgccgatttggtggaaagttcgtcgcggtcactccgttcctcgcggcgaccctcgcaaaagtcacttttggtggtcagtgagggggcggacgaaacggaggacatcccggcatatgtcatcaaggcaaaacaaaaataatagaagcttaatttatg

SEQ ID NO: 11708 - DNA, 1552 bp, Heterodera glycines
tttccggtcacaaaacaaaaattcagaggttatgacgagagggaagtgcagtgtcgtcgcggagactgacgacgaggaactcggcgattatttgtgccttttggtccaccgcaacgattgcatgcgaagtgagcaatttgatcactaatttggcataattaacacttcatttcaacatttagcttgaaaatgtcagttttggctataaattgcattggcaacgcaaccacagagtaattaaatattccatttaacttaatttaaataattttcaatttttttcattttgaggatttggactatgaaatttcatcaggcgatggtaaattcgaacatgtggtgaacagggcaaaacactatctgatcattcacaacgcacagccggaagactcaggtcattcctttgaaatgaattgaaatattattttattatttcttttttaataaaaatctaaggaaattaggggtccgcggagaatttaaatgcaaaaataattaattaataaaaataatgttcatttattaaatttcaaaagtagaagaaaaatgcattgaaaaattattaattcttggggattaaactatttgtgatgcaagaaaagtcaaagtgcttttccatcaggctcgtaacaagaaaacaatcgaatggggttaatcggtttttgccaaattctgaaaaaatctaaggcaattagggacaagtggaggaaatttatatgaaaaataattaatttgaaaaaaaatatttaattaaattgtaaaacataaagaattaaaaatagaattaaatattacatgtgataaaaatttgcaggcgtttattcggtgcgaattggagacacaatgttcaaagtggcacagatcagcatcggcactgagttgggccagcagaatttgtccggaagccgaattcgacgcatttcgagccaatcgctgaaccaatcgaatgaaagagacgcacgacagaatgccaaacgaaaggaaaaaacactgccaaaatgaaaaacaaagcgaaattaacaacaacagaaaatgtgatggaatgaagcaaaacaaatgaaaattgaatttattatatttacaaatgaaaatgaagttttttcattggttaattattttttaagaaaattattaattattttatcataaatttttgcactgaatattttaaatatatatttaatgtcaaatattttaatctttgtacaaaatcggaaatgccattcgcttcctgccaaattgaaaaacattttgccgaatgttttccaacattaaatattttgaggaaagcctttaaaagcaccaccaaatttgagaggcaaagcttatttttatccatttttgggcaatgattttaccctctccaattttctttttgccaatttttttgctatgttttgccgttccttcggataaagtcaaaaattccgagcaaaaatcggaagaaaattcggtggatcgcataaataattttgttgaatcatttgagcaatttgatcaaaaaaacgacgaatttaatgcaaatgatggacaaattttagaaaaagaaaaa

SEQ ID NO: 11709 - DNA, 2609 bp, Heterodera glycines
attattgggacgaagtgcgcgaaaaaattattttaataaactttcattaatattccaattttaaataagtaaatctttttttaattttaggatcaattgaattcacaaaataaagagaagacaaaaattggaattgcaaaagaaaaagaaagcacaaataatctcgacgaaaaaagttacaaatttaaaaataaattataaaaatttaaaggcatgacgaaaccgccaataaaattgaaaataattgaaatattaaagctaattaattaattagttaatcaattgttgtgggtataattaattaattgctttttcagtaaaaatggtgaaggaacaatggcaaaacgatgcggacgcattaattgatttcgaactttttttcagaaaatacggcgtgacaaaaagcgaagaaaaatgtaataattaaattggttaattttaaataatttttgggaattatgaaaattcagtgagtttgctgcaagaagtttcacagcgcgcaattggggcgaaaagtcattgtgatgagcaaatttatttgagggattatggcaccgttgaaaagattgggcactcatttttcagtgttgaccgaagcataattatagaagaaaaaaacataaaggtgtgaataaataaatacaaattaaataaaaaataaataattaattaatggaaaaacaaataaaatatttgttaatatgaaatacaaggttcccggtgatttcgtcagtggaaattaattcataaaaaatcgtacacttagccaaattttacaaaaaattcatggagtcgtaagaataggcttgtaaatattctaacgagtcacgatttgcaaaatcctctgcaagtattctcaaattgttgccctgcagaacccattatgatttgtgcttttcatgtgccccttcttcggtcagcggggctgcgcgaaaattagttacttgtacacactcgaaaaggtgaacgccacttccaacgtgatcggctgacgcctacgattcgatttgcagacagaaaacgaactaagagcatcaacatactcaaagtgcagacattcaaaattattagtaaaaaacaggggtggaacgctgacagaaagatcccgcggttgcggatcacgcattcaaattgccgggttgcggatcgcggtcacgctccacccctggtaagaaatttaaaagctaaattccgacattaaagcagaatgaatggctaccaaccatctagaaatgaacacaccggagatgaaagtagtaaaaaaacgaggcacaatacaaattattttagatatgtaagtgaccggccaaatttaggttgacaatcgagcaaataattttattttgaatttaaatatcgaacgaattaaatttaagaaacattaaaacgttttttcgtaaaaaatgattattatcactgacgaaatcacatattaccaaatacaaaatgacaaattaaggcatttgttaaagtttcactttttaaatgacagatttataacggaaactccgaacagtttggcttatgtgtcgcaattacggagtttaatacagaaaatatgccaaattacataacggaaaaactgaaaaacgaattcaaaatttacagaaaattgtcaaaagacagcaagcacatgcttaaagtgtttgaaaggtcattgaaaccaaaaagattcttttttaacttcataatttaaataaaaatttgaaaattttgattttttttttgtcaaaattaacgaaatgaatttttagcgagaaaaatggaaaaatatttaaattggtaagcgaagtcgtaaagtacgacttttgggaactttttcaatatggcgcaaaaaatatcaacgaaactcgcaacattttatacaacgaaatgttgaaggcattggaagaatttcataaaagtaaaaaaaataataattaaattaattaatgaattaattaattaggaaatattctatttaccaattaattaaggtggaatgcatttgagcataaatttaaccaaattttatttggtggagaaaaacaatggaaatgcaaaaagttatgataaaaatgatgatgacaatgacaacaatgagatggaaattgaaggcgaaaaatggaaaatgaacacaaaattggccgattttggggcggcaattttattcaatgaaaagccaccaaaaataaatgtaaatggatgagcatttaaaacagggcttctatcgaaaagttttcaaatcagcacacaaagggattaaaaaagtggttcaaatcagttatttatacaatttattcgtaccaaaaaatatcaaaattatttttttttacctcccattaaggatttgaacaattttgaggagtaaattatattgtccaaattttgtgtattaagccaattttgaagaatataaaggattttaatggtcaggtggtgccgataggcgccgtcaaaaatttttttttttgaaatttgactattttttaacagctttttgtctaaaaatgaccaaattttgcgcaaactttaaaatttctaaataaaatatttgcattatgccataaaaagctgaaaattatgagtaagtttaagaaatcagaaagaaatgggtcacaaccagggct

SEQ ID NO: 11710 - DNA, 3063 bp, Heterodera glycines
aagaggtacaaaagtgatttgaagaggtacaaaagtgattagaagaggtacaacagtgaaaaagtgatacaaaagtgattagaagaggtacaactgtgattaaaagaggtacaacagtgatcagaagaggtacaacagagattagaagaggtacaaatttgatgaagtggtacaaaagtgataaaagaacaaaagtgataaaagaggtacaaaagtgattagaagaggtacaaaagtgatcagaagaagtacaacagagattagaagaggtacaacagtgattagatgaggtgcaacatggtttaaaattaaatattggggtgttcggaaagttctttcatagcggtcgttttatgtaaattagaatttttttcgcacccaaccgcaacctttggccaaattctttctgttctatgggaaggagcagattttgctgcatatgttacgagccatttcattttcctttctttgtaaattgattttttaaaattatcccaatggagcaccctaaatcccaaatccgatcacttttattgtacgggtcaaaactttgctttgatcagttggaaatttattaaaagcagtttttgtggccaaatcaagtccggagaatccaaatctggcctcagatttgatctctgaattttctctggcattgtactgctccatgtcgttgacaagaagttgaagcagtacagggtcatagaacagcaactgactaaatctgaggcgatattcggattctccgggtttggtttgcccatgaaaacatcaatttcattttattaggtcctttcagaacaatgttgtacaaagagggtgctgaatcttggcacttttgagcacccattttcagacaggacaatttaaagaaataactcgtcggtcttggtgactctttttcagttgtcagatagtcccaactttgctctacaaaaccataatttgttttgtgcctttagccttttcttggccaagaaatcagtggttgaatttggcgacttttttaagtagaccgatctgtttatttgagtttaactatcttgaatttaatcgacagatcatttttaaattctcaaaaatgggagaagattgtggagaataattgggcattttttgattaaaattggttcattagttaatttgttacgatttttttaatgaaatttttggtcgctatgaaagaactttccgaacaccccaataaataaggaaaagtttttataaaaatcgaatgcattttaatttaaaaatttttttataataaaatactctttttattcattaaatataattttgaaaattaataattgaatatttattttgaaatgaaattcattttttataaattcataaaaataaataatgaaattaaataaattaattaaataattttataacaaatcttaaaattaattaaaatcattaaaaataacgtaaaaatgcacagaaaaataatgttacaccgtccggattcgaacctgccgcccccccccccagaagatgactcagaatccccaatcacacagggattctgagggcttaacgatgtaataattgaaatctgatcacgtattcgtgatcagcggcccaaataaccactaaagaatttgattaaaagtggtacaacagtgattagtaaattcattaaattaaaatgaaaatattttttaacaaatttaattaaaaaaatacatgaaattctatcaattaaaaaaataattaatttaaacttataaaatttatttatcaaaaaaaaattaaattaaatataattttttatttattaactcaacaaaatattttaaattaattaaaatcattgaaaataactcaaaaataaatagaaaaataatgttaaaaacatttaaataaccataaatataacgaaaataatttacaccgtccggatccgaacctgccccctcccccctcaaaatgatgcctcagaatccccaatcacacagggattctgaggtctaaacgatgtcaaaagtaaaatctgatcatgtattcgtgatcagcagcctcaaatagccctaatgacatgtttttgaaagatttttgtgagaaaaatttttccactcaaaaatcctggtcacccccctttggtcccgaatcccaaaatcacttttatttttatatctttttttaaaaatgtgataaaaatgtaaaataaaatttatattatagaggaaaaaattgcggatttttgtagtattttacttttacagtatgacctttcagaaccgagttatgaatttttttctgaaaaatcgaaaatttccagaaattctggaataactttttttcttttgtacattatacaaccaaataaatctcataaaattctcccgattttttgctatttttaaagctttaattcacttaaattgagcagtctttcattgagttatgaattttcatattttaacccaaatttccaaggaccaaaaaaattaaaaatattttcgaatttttaaaaaattccaaaaattctgaaacgtaaaacaaacatcatattcgtgctcaggacctcaaaataccctagaaaaaaaattttcacccccattttcaaccaaaaaaaaatttccgaaaatttctagggggcctagctcgaaaaattttgaaattttccaaacatgtattacaccattcgatagagtttcgaaagctctacaattttgctctaaggcattttttgcctaaaaccgacccctgacgagttatgggcccgggactcaaatgtcccgctcaggccaaaaattttttctatttccgggaaaaaatcgaaatttttccgaaaaaaataccagtcgatagagctcgaaaaactatgttttggaagtggtctccgtttctctgggaaaaatcgttaaaaaatcctaaaattcaaaaacccgaaaaccgttttttaggcctaactcgaaaaattttgaaaattttcgaaattttaaaacttgttttgatagcctttcaaatactacacatttttgctcagaaacaatttttcggtcaaagcaacacgtggcgagttattcgcctggtactgaagtgtacttt

SEQ ID NO: 11711 - DNA, 1563 bp, Heterodera glycines
gtcgatgtagctggggctgagaaatatttttttatagcttagtcaaaagaggccatttcaattcgtttgcgccagaccaataagaaattggatcttcattgatatttatttttttggctcggagatattcattgacttcaacctgtataaaaaatagtttattatttaatttctggtttatttagttcgcctctgattttgtcgggcgtttgtcattaatgactaaaaaaacttttggctcgcaacgcttctgcaatgctttgtctaggacgtttttccgagaaaatggtctgaacttcgtcgtcttcaaaagtagtgtcactattttctttcgctgctgaacatgaaggaacggaagccgaaaacattcctcaatgtttagaaattcttataaataattagggcttagatttatatgtaagaaaaatcgcaaaatatgtacataaatatgtattaaaaaatgccaaaatatgtaagaaatatgtacaaaaatcttcaaatatgtaccaaaatatgttaaaaaaaaatgccaaaataacatcaaacaagtacaaaaataagcataaaaaatttttatcaacgattttagggcagtaaaaatggtcatttctttttatgcgtgttacaaatcagaaatttttcgagattttccggagtaaagctcatccgattgtctgccagaatatttttgtatgctgaaaaggaacgctccacttcacacgactgaatgggcgcttatttgaacattgcaataacgtccggcggcaaatgcgtttgaacgtgttcgccgcgcaaaaccataccaatttcctagaaaaaatatgagtttaaaactttttctaaatccaaccaaaattctgtcaaatcccggattgtttcgcaaaaccgtgttaaacttttcttgaaccaatttgcccacattgcccggtaccaattgcaattcatttccaacatcgctcactaagtccaaacctagaaaatttgcatagaaaaatatcgagttttcacaaactttcaatgagtgtgagattgcgtgattctaatttttcaattgctccaggtaaaatgtcaaaatgtgattttataaaggccaaatctccacgaatgcctgaacagtcaaaggcaatttgtgattggcgaatagcatcagaatcggatgggttgaagtcccgaataatcgcaccaatttggttaagattttgacagtaataatccgctgcattgagccaagtcccccaacgtgtgatgattgggcgcggtgggagagggagatcacaacgttcgcggaatttggccaagcgggatggcgcttttgaaaaagttttcagttacttttatgataaatttttgaaaaaacctggaaatatgtacgaaaaagtgcgaaatatgtaagaaaatatgtacatatgtaatatgtagaaaaaccccgaaatatgtaaaaatatgtattttaaaccaggctctagaagcttcaaatcaagctaaaaacatgtttttcatgcgtttcaggcctcccacagtccaggaaaaaaatatgtatttacatataaatctaagccctag

SEQ ID NO: 11712 - DNA, 2317 bp, Heterodera glycines
tataataattttttgctttttgtagtttctcccaccaattaaaacaaataaatttcaaaaataaatattctactagcgtctgtcggcacagtcagtcgcctcattcacattagtttacaataaaaaaaatggaaaatattgaagcttcaatattatttttgcccattttatcattatcgaaagccaagcttttctttctcgagtagggaccaatattctcgaaaagcggtataagttattctctgatttattttatttttcaaattttagatgattaatttcaaattaaatttaaaatagcaaaatttttttaaattaaataatagatggtcattggccggggctcccctttttgggcttggattttccccccttcctttgtgtcagctcctcccatcactttttgtccctcaattgaccaactgcccctcccctttctgccaccctcaattcccttggcttttccgttctttcattctgttaattatccaactttgttcgcttggcttggtttttactcaacaaataaagaggacatcgaacagcgaatttggggatttggtgttttgggccaatttggccagcccggggctgcgacgaggggccccattttgggtgtccccgagtcccaacagaccccagagtatagggcattgtcatggcgctcctgtgtggatgcgaacatttcgcttccctaatttttctcccaatttgttccccttaaaatcccattttcttcgcccattatttcattatttttttatgatttgtaataattagcgttttaatttttcacattttgcgctgccattatttctccgttcgtttattaattttgcgcaaatgatttcccatttatttttgcctaattttctcccttaaaatttaaattctttccctaaattcccttcaattcttggccaccttggctttgggtgatcgtgaggatgaagtgaaggaagaaaatgcaaaacggattcagcaattccgatcggaaatcgcgcgcgactttttcagagcgaatatcagaagacaaaataggattttagaaataataaggaaaaatttttaaaccctttgcccagatttttaaaattataaatgttattaaataattttcaattatttatttattgagttaatctatgtatttgatttaatttaaattatttttatttaattataagggaatgggagtaggccaggcttggctcggctgaagtgtcaaatgaagcactaaatgaaatgaacactgcattcagttcgtccacacgaccactgatcgttccgcctcttttcgtgcttttgcctcttttcgctcctccctctcattagtcttcctgtcatcctaccaaaatctcatctcgttggcttttggcccttcttttcgcttcgttccgttccgttcatcaatctctgctttttcccttctttttgtgctttatttttggtgtatttgtttgttacacaattgtttgttacaccatttggtgccgttgttccctgcttttggtccccaaaatgtttttggcctttaattaattattcgaatccaatccctgtccagtctgggcccgctgggggaaggactggggaagcaggacaactgattaattgtgtgcatcgccggcgatgcgatttgcattgagaattgggaaaatgttacagcaaaattgggagtgaactgagggcgatgggctgatggatgtaaggagagagagagagagagagggaaccaatgagcgattggaaagcggggtgttaggacttaggactacggtagccagcacggcagtgaaatggatgatcagagattgggggaatggtattagggattttggcttacacagcacacttaaacacacacacacacacacacttaagatttaatgcgttttgaaccggtggaatgcgggacgctgaactgctcggcgatgtgttttgcgcccgagggatgggaggagcccaaaatttgtgcttccgtcgcacccgtttgtggcgtgccaaaaacacccaaaatcgacttgtctttgctcaccgacattgtttcggttctcatgctgctcatcaacattttcttcagtgtttggctgctctgccgcgtcaagcgcttgccgaaggaagcacctccaaaggacccggcttattgtgatcagtgccatcgtctcctgcttccgcgggtccttcctcatcgtcgcgtcagcgtttttgaggacatctcgctgatttccgccgtttaaaagcacaatcaaaatcacttcaaacacacgtgcatatgatttttgttaattaattttatttgaataaataagcactt

SEQ ID NO: 11713 - DNA, 3639 bp, Heterodera glycines
  unsure (1)..(3639): unsure at all n locations
gccaagatgaatactggatatacccgtcgaatctcaccccaacgatgtttcttttttcgcttcaaaaaaatccgaatcatgttttgcttctaaaatttaaaaaatatattttaaaatgaaaaaagtgctgagaaagacctatgttcatttttgttgggaaaaaatttctatgaggagttgataaacgccttctatcatataacgcatccataaagcgtagataaaaacggcagattggtgtttgagtaatttcaaaatttatatttgaaagggatttggaacgtggccgcatcattaaaataagagcaaattaaattttaagggtgaagtaaggaaatttagaatatatttattaattcttttatgcatttatttgaggaaaaagacatccttaaataccattttaaatgctcttttataaatgatcaaagaccaatttgatctaactaaaattaaatttagaaatttacttttttttaattgggttcaaagattaaaaattttgaaatttaaagaaaatccaaatttaggctttctaaatatatttttaattcgacgaatcaaacatcagatttgtgcccttctattatcaggctaaattgggccggcttaaatttttatgatcgttcgttgatctgtcttttgcgcacaaaatttcgtccaaaaattttttatggccttggaaggatccccgggcccgccagtttaccaaaaaaaaagcatttttatgagttaaagtccgcgcggcaaagagcgcggcagagggcagactaatttgtgtatttaaagtagcgcgaagcacagcaaaaatttcattcacgaaattgatacttaaaaaatgtttccttttcgccaaatccctccaccctttgatccgcgcatattcgttccacagattcttttaaacattgtaattaaatgaatatattataaaacttataaaaattttaagcgccctcatgttgaacagcttgtcaactatcgtgtaaatgtgcatttagcgcaaaatttagtaattgggtccaaaaaaaattaaatgtaaaaataattaaaggctccaattgttgatcaatttgttgatgccagaattgggcatcacatacgcgaggcgatggaaaaattgcaaccacttttgcaaacaatgcttcagggtgggcttttgatattcgacggagtttcgcttccatcgaatttcggcaatcccccccccctccgtttttggcacggaattccgatttccttcgctttttcaatcgaattttccccttttttttgctggagtgccagcagctgatcatggagcagctgaagtgccaccgacggacgccggtaggcgctcgggaggggacccggaattcacgatttgctaccattttcccctcagtttttggcacggaattccgatttcctacgctttttcaatcgaattttccccttttttgctggagtgccaacagctgggcatggagcagctgaagtgccaccgacggacgccggtaggcgctcgggaggggacccggaattcacgatttgcgaccattttcccctcagtttttggcacggaattccgatttcctacgctttttcaatcgaattttccccccttttttgctggagtgccaacagctgggcatggagcggtcgaagtgccagcagctgatcatggagcagctgaagtgccgccgacgggcgccggtaggcgctcgggaggggatccggaattcccgatttgcgaccattttcccctccgtttttggcacggaattccgatttcctacgctttttcaatcgaattttccccccttttttgctgaagtgccaacagctgggcatggagcggtcgaagtgccagcagctgatcatggagcagctgaagtgcagccgacgggtgccggtaggcgctcgggaggggatccggaattcccgatttgcgaccattttcccctcagtttttggcacggaattccgatttcctccgctttttcaatcgaatttttccccttttttttgctgaagtgccagcagctgtgcctgggaatgaacgagcagcagctgatcatggagcagctgaagtgccgccgacgggcgccggtaggcgctcgggaggggatccggaattcccgatctgcgaccattctcccctctgtttttggcacggattccgatttcctccgctttttcaatcgaatttttcccctttttttgctaaagtgccagcagctgagcctggggatgaacgagcagcagctgagcctgggacagtcgaagtgccaccgacgggcgcgggtatgcgttcgggaagggtacaaatccccgatttaaagaattattgtgttttaatttaaaaggttgtcccgtgtgtggcagacattttgccagccgacacaacatgctcaagcaccaaattgtccacaccggtaaaaacaatttcataactttaatatgggtataatttacaggagttaaaaaatacgaatgtcgtttatgtaaaagacgttttggctgggccgggaaccttacagtaattttcaaaattttgggtccatgacaaaaagtttttttcgcagaaacatttcaaaacgaaatatcgtgccaaagggttcaccttcctctgtccacactgtcaccgtggattagaccttattgtaatatctgcttattatttaattctttcctaattttgaatttgaatttagagtgaagtgcgcaaacacaattttgtcgtacaccaccaatgaataatgaccagcaactgggcacaatgaatttaatttcctattttcatcaatattcacaattcataattcttcgaaatagctatttaaaaaaaagtattataaccaagtgaacatttaaccgcgtaaaaaatctcaaatgtcattaaaatcctgctttttttgtgcattaaaaaccacaagacaatctttaaattactttgaataattgattatttagcataatgcttttaattttctttagctggattgatatgtgattaatttttcctttgtttatttaaagctaaatttattttaaacttttacaaatttattgaatctattaataacccagcaattcattgaccgtcattcgccttcaaaactcgcaaaaaaaaataaaaattaaaaagcggagcaagtcaagttttattaaactccgcattttggttttagtttcggttgataggcaattctgttttcctttcgtctatttaggtataattttattaaatttaaagttttaatttatcgaatttatgaatacgccatccttcggccgtcgttagtcattacaattaaaacattttcaagcctttccatcattcgttttttatgaacaccactgatccaatagtcgatgctgctgttcattcgctcttgtttgtttcagtagacagagagttgattctcggttttatccaatgctgttaacaaatgcattacaatttcccctagtcacnttttatgagtccaatcgacttttatgagtccaaccaattgacaatacctgatttttatacaatatctttgttcatgtatgatcaacccagggttcggagatgaaaattttaaaaagcctcatttggcaggcaaaaaaagcctcattttgcgtcaaaagcctcatttttacaaaatttat

SEQ ID NO: 11714 - DNA, 1983 bp, Heterodera glycines
ggggggaaaattaagaattttgaccatatttttagcatattttcattaaaaaaattctttaaattgccaaacattatgccaatttatcaaaatttaaaagattctgagcattttccccaaaagcctcaaaaagccacaaaatttctcaaaaaagcctcaaagcctcattttgaaaatttagcctcattgacctatcaaaaaaccacaaaatgaggctaaagcctcagatctgcgaaccctggatcaacccctatttttggtatcattcgaaagcacagtctcaagaagctaaaaaaataaaatctcagcgtttaggcaatttccaaaaaaagatttcattaattaaataatgattgataatttttgtttgtaacttctttaaatgtttagattttcttgttttctcgtattattacattattcagactatattcttttgaatgatgccaaaaagataagatttgttcgaatatgaacaaagttattgtacagaaagcaggtattgtcaattggttggactcataaaagtcgattggactcataaagtgcctagagccattcggcttttctgggagaatgaaataattttaaattgactatatttcaaattgcaattctcggaaactgaattatttttagctcaaaattttgaatcgcatttgtaggcaccagcaccataaaatcatcaatttactcaatgagcgagttcccatttgtattcatatttctattttgttaaagcttttttgcatatcattttattcgcaggtatcttggcctatagcagtgaaactactccaaacttggagaatttaatagttttggcgaatgtctgtaattcaaactgccagcccctaaaaattgacacaaagcgcaaaactttgtcatttttggtaaaatctgttaacaaatcacactcaattttcaaattttccatggcgatgcctatcggatccgctgtgccctcggcgccgtcataccgtccttttcccccaaaaattatgccgtaaaaaaaagtgtcttgaaaagcaaaaaaaaaggccgagttacatggccgcccaggcaaaattttggatttgggcccaggccgaccgataaataagctttttttgtcgtgccgcccgtgcccatccattatcaaagccggactgcgggccggtgttttcaaaattccagtcccaagttgattatttaaatttagtaatatgtttatcaaaattacctaattttagatttcgccgtggccctctatatttaaatctgtttcatcaattattgtactgctctttaaactttcagcgattattaattattttcttttaccattttatttaaatgcttaattttattcttaaaatataatttctacagtacatcaatattataactgatctttgaacttttcaacgattaattattttttaccattttatttaaatgcctaatctttttcttaaaatttcgctgattatttttgcttttcttttaattacttttttattgttacacagtattttgagtacaagggtctctcccttgaaatttgacatttataggttttaaaaaattaattatgtaccacccaagtttagatataacttttattaaaaatttttcatcgaaaaatgagcggcctctcccgatttcaactctccactgctactgctggccagcaaaagcgtaaaagcgatggcgccccagcaaaaacgaaaactctgaaggaagtgttggacttcaaaagcgccggagtttttcacgtcacggcaaaagtcgtgaatttgcaatataaaatttataaggttgagttttgtgtttttagcgcttttttttattttgaattttcaaggcctgccccctaaaaaataggggcttcttctgccgaaaaaagttggatgacgaaatgagatgcacttcctgcgatcacattgtgaaatcgcccatgaaaagcgtgttcctgcgcgtcgaaatcgccgatcggttcag

SEQ ID NO: 11715 - DNA, 1028 bp, Heterodera glycines
gatcatgatcaaggttatgcaaaaaaaaaacattcttttagctttcaaaatccaaaaaaaaagctaaaattcccggtttatgtgacaaaatcacaaacctggttgggtttttaatgaaaaatgtaattgtggcccagcatgaaccatttttaattcccgacgacaaatttagttacagtgagatatggctgattagtgaaaaaatctggaaaatattaacccctctttatcagatagttgtttcatttaaaagtgaactcgattttatcgatccaaataacaaatttgatcattcccaatcgatcggatgatgctttttttggtgcttgttctggaatggaatgtgtgcggagacaaaatgatgcgcattaattgctttatttaagcgaggtgacagtgtgcgctgctgtgcaatgcttgaacatcgcgcgcattacgtaccagcagccatagaaagcatgtgctgttgctgtacacatacattctcaactgctgatgaatgcgcggcgttgtgtttatttatggtgctacttgggttttggtcctcgataatttacctaattagtcgaattttgttcgttttttgatcggatcagttcatctaattattcggcttctgttgtgttttgggtctgtttgactgaccgtattaatcgatctgtgattgggtcggttcacttgttcacttaattattttctttctttgatcggaccggatcacctacctaattattgttagaattttggattgatctgattgacagaattattcggcttttatggtcctcttagtctgatcgatttaccgaattatttggttttggttgattaacaactcatcgatttgagattgtatgagaaattactcttctgatatctgtcactatttggaaaaggcgagaagaattacaaaaaaaaaccgtcaaaggagaaaaatcgagtttttttgtgcatgaaacaggctggcggcgcccttcagcatcagcaaagaagtgggttgtcttctctgttacacacagtttttggga

SEQ ID NO: 11716 - DNA, 3929 bp, Heterodera glycines
  unsure (1)..(3929): unsure at all n locations
taattcgattggatatggaaaactttaaaaaaaaagcaacaatataaattaatctgtgtattttcggataaaaataattaacgaattgaccctcgtgtatcaaataataaaaaataaataaataatgaaaaagtgaatttataaatttacttgtcgtactctaattcggccaataaaagtattgtcaaccgttacatgatttaaattgtgagagaaatagcagcacaatttaattccgtctttgccgttgactgggcaaaatgccatgtttgttagattgggcaaatatggaaaaagttatgaagttttctcccatgactgagatggtccaatggtccatcaaacttttggacagacaaatctctctctattccttttatgttagtttccatttactcagctaaatgtgtagaacagacaggtcactataattgaatcaacacaattcaactacaactaccaccagccaccagctccaccgataatcaattatcatcatcattaagggccggccatgacggattagtcccggcctctcctcaatgtgcacatattgtcttcccgatcaccactcactattcaccaataggtaggatcgggtagaccaagtaattaataaacgattaaagttgaagttggacagagtaagaaaaatgtgataagtgagttgcatcacacacgacacgtagcacacacacaattactctccgtttttacgcaaattcattaaaaaaataaatgaacaaataaaatctgatattaggaatcaaaagaataaatgtgccataaaaattttgaaaaaaaatgaaagagaaacaaacattcattcctctgtaagtgtatttggcctaaaaagattaatgattttctcagttttgcccacccccccccctcttaatttttgggtgatcatagctttaatgtccctataagaggtaaggtattagcaactcgaagctatttaaacctgaaaaacattctcgccaaactatgttatgactggaacactccaaaaaacgaaaatcgggaaatttttcaaaaaaaaatacatttaatcatttttttcattgaaaaacttgttttgatctatttgtttaaataattaacacggcaaacacagcataattctctgttttggaaaaaatttttccccaattttccgggaataaaatgcattttatagcgcagcatagcaatcagtcagaagagagtgctcattgtaattcaagagcaataacaaacaaataattctacccaattatatataaatttttttgtaatgatcaccaaatatgtttatatgtttagtgaatgatgagtgaatttcttaaaaaaactttcaaatacactgttttttaattagaataaaaaaattcaaatttttaaattcttcctaaaagttgcaaaaaataaataaacaatttgtttttaaaatttttacagtagcaaaattaaaaaagtatttacttttcgtttcctccaaatgtttgtgagcttttgtttatcagaatttataaatttgaaaaaatgaaaaaactgcaagaatttatttttgcttttatctttatcaattccaatgcatttaatttattccacatttttcgagttatccagatcacttaaattctcagtttgtgccatcattgtgtctcgggtttttctgcaaacgaaccatcattgaagcgagatttgtgggagatctctgaatgttttgatttttttttaaattactatattgccatatatggtactcactttaaaagtgataaacagaggttccgccagctgagtacgtgatcgatgcaaagaatggaagccgggccgaaaatttccacggccactaacctataagacatttgaatctatttttttaataaaaacagattcatggtataccgtatatgctctttttatcccccatggggaattatttttcaacctcctcagaaaggggggggggnggtaattggagactgggggattaagataaagggattattttcaaactcctcattagattgggtgataattggagattgggggataattaaagaatgtacggtattacgattcattcaaaacacattgatttactgttggcgatatgatgaaaaatatagcataaaatttaccaatgatccgccgcccgatggcaaattaatccatttggcatttcgtctaaagaattgctgagtgccgcgcatggccaacccaaccacatcttcgttggccacaactgtggctggacttatcaacagaacaagggcagcaaacaaaagcatggagtacatcaaaattgacagcatgtttaaagacggtgaagcaaattgcaaaagattgtctctgctgctaattgtattcataatggctattataagtgataaatattaaaaaaaaaaaacttggttcggctagctgaccgggttaatgacttacataattccgccaaataatcagaaaatggaaaaataattcattattttaattaaaaggtcaactgccgaattttatttattttatatttttattcatttagcgctatttataatatgagtgtagaaatttacaatacaaacgcgccaacacgaagttgacttgtcaaaaaatctattgtcaaacatggcgcctaatgattaaaagcggattagcaaagacggacagagctttcttctgatggcataaccggcacagataaagcctgcccgttagttatggcatttgagaagttcagttaagtgtcatttttcgaataaacaaaaaaagaaattctccaatgcttcaccagcgtggtcaatgtcactttgtgcgcaatgatgacgaattttttttcaaaattaagttttttgtcccaatcaattcaaaattttgtacacatcattagtaagaaaagcttgtcggactttttaagtatattatattatatattaattataattatgattttaattttagttataaaaatacaaaatttgacgggatggcttacgattttgaaacgctgttaattgaatgctgaaattgaaataatttatataatcattttatctgctattttttcggaaatattgaaagccattttagtaaatgtgctcaaaacttttttttcacaccaaccactgaacccaaattcaatcatcataaaatttgtggaattgaatccctagacaaaattacgttttttattgatggaaaattaattaaaaacaaaattggcatagtggaaaaaaaaattttttttttatgggttaaaacatttattcaggatttttttgcaagaccttagtttataaaatcgaaaaggatatttttattgttcagaaaattggtaaaataaaaaaaataataattttttttatttcttaatggattgaatttgtttaaattgatgataatgaatatgcgtgaaagcattcaaaaaagcaagatgaaactttctcacaatcagcggcagcaaaggaacaagaagaagccttgtttaaaagctattttaaaaattaaattaaatattatgataataataattaaattaaaacaaatgcatataacatttctgttttttttttgtaagtaatttttttcaagaaacattcaatttactatatattaaagcagaattcagaaaatgcctatttattttgaaataaaaattattttttattattaaattttaaatttccacatttcaatttgagcattttttaaaagaaaaatcctttcaatatgtaatccattcctttctttgcagaatttttccatgcttctcaatagcgcctcagaatgattatgtcgaggaaatagtaacataatccttttagtagatccgtgctaaaaagcttagggttccgaatctcgtcgaagatgggagcggtggagggataataaacctcagcgtggtcgacgngatgtcccgtccaaaaaggcaaccgcca

SEQ ID NO: 11717 - DNA, 1774 bp, Heterodera glycines
aagtctcaatttatttgtagaaaatggatgggttttggtggatatgcgccgcatggcttcttgttgctgtagtttcactttatgtgttcttctacaggcgttctgctggaccaaaagtgccgacaataaaaattgatgacgaaaatggattttcgttggaaacacaacaaaagttcaagaaaaatataatattgcaacaaattaattttaatttttaaagttttgcaaatgatttgctgaattggctactttggggaaattctggcacaaatttgggaacggaacaacaattagtattgtctccactacttgcaaaatttgtgctcaattcgctaaatgaagctgcccaacgagttgggaaaaaggttggcaaaattaaagaaaaaatttaattcaaaaaataattgtgccatttatagacagcgacaattgatttgaaatttgacaatttatcagcacaaactggggactctcaaagcattcaaatttgttccaaacaatcattgtttcacaacattcgtgtacatccaaatgaggcatcaggaaattatttggcaagttaaatgaagcatcggacaatccatcaatggacaatccgtcagttaaaaacaccaaatttatatataaagttagaattgtattttaaaaattaaattaaatatgaaagaataagaattttactgatccattttatgttgacggagtgtccacttacaaattgtccggacaccccatcaacacaatctatttcagtcaatccataccaaattgtcatacactaaaaaaagtacggacgatggcataaggctggacatttccgtgtcaactgatgaacaaaatcaaccaagaactgcacgtcaaaatggaattcaaatgcgaaaaattcctgtcgtaatgggtccgtcattagagcactacacagtgataattgaccaaatcaatggcgatgtaatggcagcaattaacaaagcaattagggacaaaaaaaatttcaatgcacaagttcaggtggaaactcggttggtcttcattgccggggaactgttcgtgatttcatgttttcgagatcgaccaactatccagctcagaatggttggcaccaattctaaagcagacgaaattctctcttacagtatgcctaattgtcaaaaaaagggaaattttgaaattttctctcccaacctacacagtaaaacggtgtatcatttcggctgtgctcaactttagcatcggcgagttactgtatccagacaatgaatctatagaacgcgcttccaaggcacggctgagtgccgagtatcgtaatctaagctttgtcaacgaaatgtatccgacgtcacaaacgcccattctacagaaaacaccaccaagatcgatggtaaaagctggaattcgatcagagtcgggctcagtacatggttttacatggcctggcaattcagcactgtgatttttgaaaaaaggggtttgacaggattgggactgccggacccggaaggcagtttcaaaaacgtcaagccctgcatatttcagaatctcgttctctagtaaaagcattgcattgagcctcaatcggttcgaatcctaattacaacagactccattgcagtataattggttttattatattctagccgtctaactcccaatattttttttcttagttgagaaaaacaatatttttttcgtattctcttagtatagtagccaacaatatgtaaaaaaatcaagtcagaacatcataatcaaattatggggcatttcagttaataaa

SEQ ID NO: 11718 - DNA, 2077 bp, Heterodera glycines
tatattgtttcacttctgctctcacctggccacgttggccaagaaagcgctttttcttcccattttgatgctaaatgagcattctgcagcaatcaataaatctcgtctttgttgccgattctcatccgtgccgccgtcgtcgtcttcgtcaacatccgttccaattggcgcctgaacgcacacaaccgacccgattgaagggctctaaagaaaggaagattttacaaaaaaattcgcgtaaatttttaaatttttctctggtggtggtgtgtttcagtcttttgacaacgccaagtaaaagttttgaatgtgaaaaaattaccattggaagaccccggggaatttccacctcccatccatagccggtcaaatttgaaaaaaaccgataaaaaatttccctttcccggaaaatctcccattttccgatcactaattatttgtaaaacatttataaccaataaattaacatgcaaaacacacttctccactgtccgcaaacatcaacagttggtgcacattgctgctgctcctgttcacttcgtccattgcttttgttgggttggcatttgatttcattgtgcactgatgccacaaatggtccgccaaagcagtcaactccactcggaacacgtcccgttgaccaaccaccaaatatgcgcaatggtcgcaaaattctgtaaaaaaaagaaaatgtttttttaaacgaatattgcaattaaaattaatgggttacaccaccaaaagttcgccgccgaaattttctttatagaaacttagaaaatttccaagaaaaaaaaattcaaaaattaacagcgatttttttgtgttaatggcaactcgtagtacacaagcaactcttacaataaaaaatttcaaaaagcctaaatttaagcctaaggctaagcaagttttcaaaaaattttttttcatcgaaatttaaaaattgtgcccatttttttgcagtcggctcgatggccttcagcatcgattgttgttgatttttgaatcacgcggcgtattgacgacaaattgtttttgccaatggtccacacaatcaatcgcaaaaagttcaaatggcaggcgacaaaatatttggcatttacagcacttcgtccatccaatggacaaagtgtcgaaggatgacagctgaacaaaattttaatgatgttggaaaatcttacaatttgaatttcctttttaaattaataattcatataaaatcttgaaaaaatcgctaaaaaatgggtgccgaaaccgaaaaatgccaacttctaaccatgggaagtatgaaatgggtcaacagtccgtcctccgatgccatagcccacaacgaaaagtgttgaacaccgaacggatgacgaatgtgcagcaaatcgagcgcagaacagagcaaacggtgctgagacgaagccggaaatccaaacaaagacagtgggccctttggaggtgcacagggccttaaatttaaaaattttttaatttaaaaaaataaatttccaacccaatcccatcaaaggggaaaagtgtggcgtaaagttggccattcgaatccaacgcgagaagagagccgagcactgtccgattgccatccaccgattgagggggtccaaagtcaaaagaaactgaaaaatgaattaattaatttgaggtaaaaatttactaaaaatcacaaaaaaaattttcatgaaattttttttgaaaattaaaaaaaaatttcagggggctctaattgagagaaatctgggaatatggcaaattatttgatcagaaatgtacccagttgagtgatgaaaccaagcgtggaatgggcacgtcctcgtccaaattcgtctccactcgcctcactgtcgtcaggcgttcggtctggcaacaacgcattgaaatcaaattgaatcaacggactgtcgaccgccgatgacacgtcgtaaagcctttaagacggaggatcgtttaataaaagatttaaaaatgcaaaaaatgtaataaaacaggcccatatccaggggaaagcgaaggaggcacgtgcccccccccctagattttttttttgtaaaaatttgtcattttttggtgcaag

SEQ ID NO: 11719 - DNA, 1279 bp, Heterodera glycines
aatttgcggacaaaaaggcccacatggagcaaatcgcatctgaatgacagagttggaaatgtatgagaaaaataaacaaaaataaactttgcataatattcgggtctcaaatggtccacacagtccggaccatcaaatgggggacgatgccaaaagtcggtgtccaattcgaccacaaaaatcatttaagtgccaaccaatgtggcaccactgccgctggcattgaccaacaaattggtgaactgcgcattttcgggcaattttggtgacaagacaagtctaaaaagaatgaaaaaaacaaattttttatctgaaacatcccaaacatcaaaaagtgtcaaatgtttctcgggatttttaagagtgtttttttttaatttcacttttcctttctgtatcccctccaagatttcattcatccaaattttccaaaaaatttcgctaaatttttccaaaaaaccacaaattagcagttttagtgaaaatcggatccgatatcccctaaatgtataacaaaaactcaaaatatttactgttattcgtttgaagagtacacaagttttcacgggttgcgatgaattcgatgatttttccaatgtttttgctgttgatggtggaccagcagatgcgctaatgaccaagtgcaatttgttcggttcaccatttgaataacacagaagacccaaatttctgtaagcgctgaagagcaacgattgtgatggcgcaatttgtgactgttcatttgttgccgacaaagttgaagatgacgaagatggaaaaaggcgcaagaaatccataattaatttaatttcaaactctggaagagaaaaaagtattcgaaattattcaatgcaaaaaaaacgtgttcggtctttgaaccgacaaattaaaatgtacgaaatcggaataaatattgaggagcacaaacatgcaatggacaaacaaatcaataatgtcttattacaaaactaatttgtaagagacacaacaattagagagtgtggaaaaagaagaggaaaagaaaatacaaatgcaaagtttgtatattcattggtttcctatctacaaaatatgatccacatacctttagagttttaaaaatctaagctttacgagaaaaacgaaaattttttatttatatatttttcggtactgtaccgtccgaggggggggtgtgatggggaagcgagtgagaaattgagaaacggcgagagaatgtggaaaaataagagaaacgtccagttagagaccaacgagggatcgcctcacggttcggacc

SEQ ID NO: 11720 - DNA, 1906 bp, Heterodera glycines
tgcaaaggggcgtcaagtattattcaaatggttggcgattttttacgtaacctttatgtttaaatgattaatcgttaaatatatttgacaagaatttttctttacttagggagtaaatgcatcacattttggtggaatcgccatgattgatgctatttgccaaaaaattgacactaaaacggcaccgatcagtcgggaggaatgtgcaaaatttgacaacaatctgttttcttccgctattcatatggttcttcaattgacaggagaggaagtcatgtgcaaactgattgctggaccttggttaattttcttttattcgattcggcttgattattgatatgaatttttttactagaactattcccatattaataatagttttttttctcaattgattccaaccttaaaacgtggaaaatttggttgtctcatcaaatagtatcttataaatttttattgaaggcaccaattaacaaacttatagaatcgaagggaaacaaagtttattcatatccattgtatattgattaatactttaaatatcttgtttagcaattcaacgaattcctcagcatcagccgggccagtgaaatgcgacttttgtctgctgttacacaaaaagtcggaaaacgtaaacccgatttatttttataaaaatcaaaaatagcaaattttaattaatttttcataaatattaaaacttttatcagataatcaacaatttcatcacactttttgaaagcttcaatatgatgtgcgaccgtttaagttctggagttgatgtgtgcaaaaaatatgttaaagccatgatgaatggcatatcgaacattgttggtattcacctcgaacagacccacgctcaatttttctgtaagaatattttcaaatgcacgtaatatcttcttgtacaattgaccatattttaataaatatatgtacaaatataatcaaaatattccgtttatattttcatccatgcggtttttcattttgtttgcataaacttttaacctttgagtttgtataaaaagccgaatatgtaaaaagatgtaaataaaagtcccgatttttgttcaccaacacagaaaagaagtgtttttcctactatttagagcatggtgaatccaggaaaatttttgtatttacataaaattgacatccctaataatcatgtgcaaattaatgtaaatcactaaaaaagtgaattaaagaatacctaaatgaacatgaacatatatttgcgaggtatgtggtgatagaataaattgtatcttgatgaattatgatcgatcatttaactattcattgatttcttgtaatgatcatgtgatctcgtgttgtggttttgtgcgtcactcattgtcagaatgatgggttctttggtgggatgtctttgtcgacgctttttcttcttgtgttggtggtggcggagacagtggggaattaagcgcaattgaattattttactattgtaggtttttattctcatacagtgcgagtaatgctgtcagtataaagacaaagttcatcaatgtttaaatggtgcagtttttctctattcgactgtattgaattgttaggggtatccccaattggtcgtcgaataggttaattatatcttgttcgttagttttgtgcaatgtcagcgtttcgtaggtttgttcgattaccaattcaaatggctcaattaatgtggatgtttgatctagggacagtatttcgtagctggaggagagtgatggctaggggggagacgaagcattggtaataaatgatctataattcagtctctagtaaagagagcagcagttctctggataagaaattgggtaattcaatcggtattaagataagatcgaatatactgtttcgggtcagtccataatttgattaaattcgcagatat

SEQ ID NO: 11721 - DNA, 1505 bp, Heterodera glycines
aaaattatgaaacgaaaaacaaaggtcatattcgtaatcagcatttcaaaataccacagaaaaaaatttttcacccccattttcaacccaaaaaaaattttcaaaaatttctagggggcctagctcgaaaatttttgaaaattttcgaacatgtagtacaccattcgatagcattttaaaagctctacaattttgctctaaggcaatttttggctagaaccaacccccgacgagttatgggcccgggactcaaatgtcccgcttaggccaaaaaatttttctatttcctggaaaaaatcgaaaattttctaaaaacatcactaatcgatagagctcgaaaaacgatgttttggaagtggtcttcgttttccctggaaaaatcgttaaaaaatcataaaattcaaaaaccgaaaaaccgaattttaggcctaactcgaaaaattttgaaaattttcgaaattttaaaatttggaaaaatcaagctcattgagctctacaataagtctgctggcaccccctcgctcagttcaaacccttacgagctattcgcctggtactgaagtgtccaaaaaaagtgattcttacgttgcctaacctacaggtcaggcctttgatctgatcaaaaattttttgctggcaaagttgtaggccatagttggggcatttcgcttttggggtccgctaagctctgaaagcaaaagcaaaaaatttcgtaacactgagactggcggcaaagtcagtttccgagccgctgggactcagttggccaccggaccaaaaaatccgtatttttcccggatgcgccgtctcgagttacccctgtgtgcaaaatttcagccccccagctattcccgttcttctcaaattagtttttgaaacgaaactccttatcattctaacgtatatataactagcgtgtggcacagtaattgctcggtgtagacagtatacttttggtatatatgggcgggcgctgacatgagcgcttcgcgcaaaggacttcgttgctagtgcatgctcggcttcaaaattttaataggttatgtttttttcaaaattttaaaggcgacatttacagcttcgcggcctcaggacgggagcttcgcgcccgttctttaattttgttgagaacattcggccgcttcgcggcctcaggacgggcgcttcgcgcccgttttttaattgtgtgggaaacattcggccgcttcgcggcctcaggacgggcgcttcgcgcccgttttttaattttgtggggaacattcggcagcttttaattttttaagggacattcgaccgcttcgcggcctcaggacgggcgcttcgcgcccgttttcaaactttgtagggaagttaggacgcttcgcggcctcaggacgggcgcttcgcgcccgttttttaattttttggggggacattcggccgcttcgcggcctcaggacggacgcttcgcgcccgttttttaattttttgcaggacatttggccgcttcgcggcctcaggacggg

SEQ ID NO: 11722 - DNA, 2340 bp, Heterodera glycines
cgaattttttgtcgaggatagggatccgaatttcaaataccatggcaggaagggcacctgaatgacaaattagcaaaggtaaagcggaacaagcgaagcaccgatcacagcgaagaacgtcgtattggtggagcagtcggagacgacggacgatctcacgctggagaaggggcgcggacggcgcccgctgcatgtaagcgtaagagccgaacagttcgtccgccccttcgcctggaaaagcgatgaagcgaactttgggagagttaagcgtacctgagagaagcactttcacttcactgctggcggcgatgtgcttacagagcagaaaatgggcaactccacagcgcacgacgaccgcatggaatgtctctaaggaaaatttgttattttattctgaagcattgggataaatcgcaccgtcagaacggccgcgtcgcgctagtcttttaactttctgggggccattcgccccctccgcgtcctcaggacgggcgcgtcgcgcacgttttttaattttttgggggacattcggccgcttcgcggcctcaggacgggcgcgtcgcgcacgttttttaattttttgggggacattcggccgcttcgcggcctcaggacgggcgcttcgcgcccgtttttttaaattttgtggggaacattcggccgctcgcggccgaagaacgggcgcttcgcgcccgtttttagactttgtggggccagacgggcgcttcgcgcccgtttctaaattttgttgggcttagacgggcgcttcacacccgttttttaatttgttgggaattttcggcagcttcgtggccttgggacgggcgcttcgcgcccgttttttaattttgtggggaacattcggccgcttcgcggccgaagaacgggcgcttcgcgcccgtttttagactttttggggccagacgggcgcttcgcgcccgtttctaaattttgttgggcttagacgggcgcttcgcacccatttaaattttgttggggccaaacgggcgcttcgcgcccgttttttaaaatctattcatcaaaaaataatttatataaatacacgaaattctttatttaaaaaatagtaattaatttttaaattaaacttttattcatcaaaaaataatttataatttacaaaaggtttttcatttaattaaaaacatttaaaataagccaaaaataaatataaaaataatgtgttaccgtccgggttcgaacttgccctatttaaaaaattctgaattttggcccaaaaacaacagcgatttgaagaggtacaacaaatggtagaagaggtacaaaaatgctttaataattttttaaaattgtaaaataaatgcctatttttattattaaaaaaaactttgaagcttataataatttaaatttatttagattgaaattaaattaatttctgaaaaactcaaataaaaaaatatatatgaaattatttaattaaaaaaataattaattttaataaaatttttcataaaaaaataatttaatttaaattaaaaaatttattttttattataaaacaaacactcttttaaatgaaataaaaacattaaaaataaccataaatataacgaaaataatttacaccgtccggatccgaacctgccccctcccccctcaaaatgatgctcagaatccccaatcacacagggattctgaggtcttatcgatgttaaaagtaaaatctgattacgtaatcatgatcagcggcccaaataacacctaaatacatatttttggaagatttttgtgagaaaaatttttccactcaaaaatcctgtccaccccctttggtcccgaatcacaaaatcacttttatttttataaaaattcttaaaaaagtgataaaaatgccaaataaaatttatataatagagcaaaaaactgcggatttttgtagtattttatttttccagaatatcttttcagaaccgagttatgaatttttttctgaaaattcgaatttttccagaaattctggaataagttttttcattttacagatagaaattccaaataaagtccataaaattctcctgatttttctctatttttaaggctttattcctgtaaaattgatcaacccttcgatttgttatgaattttcaaatattaggccaaaatcccgagggccaaaaaattgccaaaaaataaagaatttttaaaatattccaaaaaatctgaaacttaaaataaacatcatatttgtgctcaggaccctaatttaccccagaaaaatatttttcaccctctttttcaccccaaaaaaatttttgaaatttctagggggcctagctcgaaaatttttgaaaattt

SEQ ID NO: 11723 - DNA, 2944 bp, Heterodera glycines
aaattagggttgggctcccgacgtcggggttggaaaattcggggttcggcgttgtcggggttggaagcgtcggggttcggggtcggggttgccaaatcgttcggggtcggggttcggggtttttcaatttttaccttatgcctaatagtcaaaaattttttaatattttttcggaaataatatttattaatttccataataatatttgtattgcttttatatttttttatttcttttttatgagaaattttgtatagaaataatttttttttcttgaaattttaaaatttttattactttttttgttttccaaaccatcttttttcacggcgctcttttctaaagacttttagggagaaagggtacggcgtcctgcggtgccgataggcgccgccgggaaaattttgaaaatttggttagatctgttaacagattttgtccaaaatatgctaaatttttgcgattttgagccaattttttaataaggtttatgaatttttgggccggtgataccgataggcagcgccaggcaaattttggaattaagctctattttctaggatttttcaccaaaaaaatttatgaatttcggtaaattttgtttttttcgatatgtatttgtcaaaatatgccaagattggtcgatttctatgagtatttaaaaaaatcattttgtcacaaagaaaataattaaagaaaaaaacgtcaaacggtattgaactcacgacagaaagtaatgtcagtgtgatgcactaacctctacaccacattccaaatgtccgaaattgagcaaatcttctttatttaataaaaatttggcaaaatggttaaaacattcaaatttcgtctaagttttttgcattttctcccacgaaaatgccattcttaggggtgtatatttaaccccgaccccgatcggggttaagggtcggggttcggggttgtcggggtatgaagagtcgggttttccccgaaaatgaccaaaaatgtcggggttcgggggcgggctcaggggcccaaccctaataaaaatgaagaaaacacagatttttttggtcgttttcgagagtgagaaatagggcgtcggaaattgtttgttttcgtttttgtttttgttttcgttttgtttttttttcttcactatcggcagtaattatatagctgtaagtttttcgtaagttcggcattcgacaaaaaaacgaagggtcaaaatcgattcatttctaattgattcccagtgtacactggaaatggcgcaaatgacgcgtttggcgacggaatggacattgggcactgcccaaactactcgtggctttgtaatgtgtgcagtaagtgaatttttctgttttgcattcaatttcgttcaaacatttcttttaagtctgtgcctaatttatttaatttactatcaaaaaccacaaaacggtcaaatttttctctattttttctgttatcaatttaatcaatgtttttgggctgatattccactaattaattcaatttactaccaaacaacaaaataatggtcaaaattttttttcttctcctctattttttcgtcaaaaaaacattgccgccaaaagttcaattctctatcgaaactaatacagtacaacaatgtgcggtgcggaaaacattgcactaatgggaaaagcgtcgctattaacaatctccattttcactaaaaagcatttcccactcattcatcaattcattcttcatccaaagcacatagtgctctcatctcaatcgtcaaacgctccgcaattcagagccttaagcttaagcaagcaaccgcgcgaaccctatcgcctattccctcatttgtttccaaatttaattgttacatctaattattctaattttatttccccgtttcattttgcttattatttgcctcatatttgaattttttaactcgcgctctcatttcaatcaatagaatagtcgtaagactaagagcaaaccaaaatttttttcttttcaaattgtccaccccaattttaaattgaactatcctttggatagtaagtcctgtcgaagttttactcaatatttttttccatcgaatgataggtcagaaataaataataatcagattttcggcattttatgtcttgtttgaattcgttaagttgagatcgactttatataataagttcatttgatttaatcaattgattttttctaaaattgaattcatttttaaaatatttatcttccatttccttatgttttattagtttatgaaaatattttaaaaaacgctttttaattatgtatacctttaaaaataattatttcgccattataatattattttcagagcatttaaattcactggaggaaaaagttttgtttctaggttattagttataacaattaaatttttagagaatttttttttgaattcgcagtgcttcgccctttttcaaccatccttataggtccatttaactttctatttttccgcattccttctttttttgcacaccattgttgactatatccactttttttatcgttttcctgttctgcataatgccacgaatttcagttggcaatgcaccatcactggcattcgctgtgttgggtccttgcgaggatatttctaaattatatagttttatatctttttaattgataacttatcaaccatcatttgtgttaccctatatcaattcactttgccagtttaaattaatcgaattttaaacattaaaaaaaattttggctttttaatgcccttctcttatttaaatatttattatattttcactcatattcttccagttaaataaatatttatcagaatcagttccaaacttgacttaaacattattgaatgaagagtttttttacttttgaattatattaatttcatgtatataattcaaaattatttattgtcatgaagaattttgattaaactttttttaaattg

SEQ ID NO: 11724 - DNA, 2489 bp, Heterodera glycines
  unsure (1)..(2489): unsure at all n locations
agtaatcgttcataaatatatattaagatgttgttttgaaaatcgntacagattaatatgtacattatttcattaaattttcttgttaatttcgttttattatttgtttaataaatttcttcaagttaaatttatttttaaatacacagataaataattatttaaaaaaaataattataaacttttgcttttcatttcaaaaaaagacaacaaaaatttgaatcaattaaaaatttgctaatttcttctccaatttttaaaaataaatatgcattttttgtagctaattggccaaatattttattgaactctgaatcgaatctgtattcggagaagaaccgcttaagagaatttttaatatttaaattttcaataattaccgaggaaggaggggggagggcgcgaatttttgttgctttttaaattcatttttattttttattaaaaaaatttatgcgaaaatcatttttgaaaatgccgattttcttaacagaatcgcagtgggacatttgcggactgacatttgcagacaattttggaaaaaaaaattttttgaaaaaattaaaaaaattctgaaaaaatgaatggaaacattagagcaagaactataatgattagtagtaattccatgtcctttttcgcattttttataaaagaatcgtttcgttttaaatttatatattatgatttttttaatcaaataatttattgtttgcctgtgctggcacatttttggttgagtggattcaaaacgaaaattttttttgttttcatattacaattatatattactcttactgtaataattttttttgttaccattataaaacattccagtttttattaaagattaaaaattttacattccatctagtttcatagtattgttttttctttaaagcatcttcttgtcgaaaagtgcactgtgttcttcccccagtcctaaagcaatcagcacaaagtgccttatgatttattttctttttgcaataagaataaatttttcattttcatataatcgtttatttattttttatttttttgaattattcaaagtatgtattataattataattttcattatctttctcatttttttctaacactaatattatttttccttttttattagcccgattttcttatgtataactttttttttagttaatgtgtctgattttattctgttcctattttttcaaattgtaaattgtctagcacgacctatttgtccccataaaatacattatatgctggttatcgaaaaatttttaatcattaaatttgttattaatatttttccttgcgctccaaccggtatgaatttaataaggtaacacttcgcgattttacttttggttttatttatttatttatgattttttttcatttatacaaagttaggataaaagtatgtttcttttccaaaagtttgtgtttttataatttttaaggcaactaaatgagggaggggtggagcgcgaccgcgattcgtggcatttccgcgacctcggcttttattgaaaaattttgaaataatttactgaagttttattttttaaatgaatttcagtaattgtttttctcaacaaattctttaaagttcatattttaccgtcggctcttacttacgtcgaccgaccctaaaataccaccaaaattttcaaaattcttaaaaaatgactcaaaatcacaaaattttattagtcagatagtcagactctacttaagatttgcctctcttaataaattatttttaaactatttaataaagcagttttccatcacatccactttatttaatttattaggtcaaagaaactcaagttatagctgttaattaaaacataatattaattttttgactataattttttgattttttcacttatgtgtataagtatttggtaatttgtggtaatccatatgtacatccatcaaaaataatcataaattttcttatatgtattacattcataattttattgtttatattgtatatatttcatttgtttgtcatttttgttgttttttgatacattcacaagcatagaacgaacgatttatcgttacctagctttggtgtgatgcctttagaaaatccttatgacatttttaaaatacatattttcatggtttgacttgcaatcaaagaaattaatattaattatatgtaatgtaatgtaattatttaatttttcagccctatttttatgcctgatgatgaaatttattttaaatttaaagttcattttaaaaatatttaagattatccttaatatattttgggataaattggagttctcaaataaatgggaccaagtgcaatgtctcgcagttagaatccaatgttcttgaacttttttcttttatatctgctaatttgtaaatgaatttgttttttattatgttttctttggatttttgattgtcatttggtacattttcgttgtccttttttagctcggtatatgctcttattagaaaaa

SEQ ID NO: 11725 - DNA, 2593 bp, Heterodera glycines
ctttgaaaaggtaacaaattttttgaactttgaatctttcctataatttaataaaaaagatgaataaatttagaaataactctttttagtttttaaattttcggaagggggggggggggttagttgttgaaaaattaatgaaacttgttaaggaattagtgtaaaattttgaaaatttcctaatttctcacaattttatggggatgaggcgcaggtggggttccatttatagtgatgctctctgcgcgggatcggtgtctcaacataatcaatactgatctgataaactgataaaaaatgattgcagaacgaatgtaaaaagcggcatttggcggtgtctggctcaaagcagcagctgatggaccggttgaagccgtacgaggacgaaattgtggatggacgaacttgtgccgaaatcattgcgggccgtgaaaacgcgaacggcaccagtcaaagcaggacaaacgccgccggggacggatggtcagttgtgatcaaccaatactgatcagaaattgatcaggatgatgatactttagggatgttcaaaaattactgggtgtgtgggaataggaattagtttgatgataaagaatgaagaaaggatcaatgatcattgatcaggccttatgatataaattttgatcgggcgcgcgaaaaacccaaatgttgacagagggatcaatcaatcaattttaagtgcttcctcttccactccgatcacgtccggctcttcatccgtcattgatgcggtgatcgacgcagtgatcgatgcatcgtcgtcaaattcagcaaatgcccaaggaacgacagtcacgaagctaagcacagcgaagcgtggaagccgtgccaagctgaccattgtgggcaaagaaactggtgctgatcagccgaagaagccgccggcatcgacaacaaagcgatcggagccaaaagaggaggtgggaaatggaaaagaaaagagagaaagattggcatcgagaattggaatctgatatccggggaaaagccaaatgatccgagggactgaagttggggaaaaagctcaaaaatgttgaataatgggaatttcggccgggaaagtggcacaatattttgtggattagtgattttcttgacgcacaactttatcttgggcccaaaactgtcggaggattggagggggttggaatatgtttttacatcagagagtcaaggtcggaaaatccctaaaaaccggaaaatcccctaaagatcggatattgggatttcttgggaatggatggctagagtgaaaatgctgacaatttactgtgggaaccctaggtgaaattcttgttttgtcagattgtgtcggacaacaacagttcgttgagccgacgactagtcagcaacagaattggcaataatgccaattttggctacaatttttttgccggtaaggatttgttgttggcaccgccgggcacggcagcagcagcagcagtgccggcaccattggcattgtcatgctgcacatgctcagcaggcaacaaaaagcagcaaccacagttgaggtggaaaataggggataattccggatcatccagtcagcttaatcctgttctaatcccaataattatctgactgatcggatggaaaatggtttttcggaataattcaagattatatacatatcggagtggacaaaaaatgttttggaaagccattcccggcaaattttaaacaaattactcaggccggaggggaaaatcttttggaattccaaattccctacaacttaaaccaattgatcagctgatcaggggagacaaaaatgtgccaaattccgttaattcttgtcttattgttaatccagcaaaatctaagtccattcgatgattgggattaatcggacatttcatacgcttaagagaaaatattcgtaaaacaaaaaacaagggtccttaaaatccgagaaactcttaaaatgatatggaaatggaaaattagcaaggcctaggccttgcccagaaaaattgcgtaaatttttccacaaatttccaccaccaggcaaatgcgctcgccgtcagcagaaaggggccgtcaacccaatgaagaaaaatttccgtcgccaccggcggggggcccaaaaaattttgcacctctaaatgccattgcttcatgttctgcttccacttccacctctgctgctgctgatcagctgctcacttccgcaatgacattcagcttctcgcaaatgggctccgggggaaaggtaaaaaaaagaaaaagcgaattgcaaaaaaagggggagagaaatgcgcaaaaattaatgggctaattaggcaattttatattcggtaattaatctcccaattaattgattagtggaaagtaggtaagtgtaataggtcaaaattgataattatattttaattcgtgcagttgctcaaatggtcaaaattaggaaattatctcagtaattctctattaaatgatttcaatttactcaattttaatggttaaaattgaccattaccgcttaattggcagacaattattttttaaatgaatttgggcaatttataaatggcgaactttgggattttctcacttgattgatgattgagaa

SEQ ID NO: 11726 - DNA, 1475 bp, Heterodera glycines
  unsure (1)..(1475): unsure at all n locations
tttataaatgcgactnntgggatnntctcactgatgtnnntatgagaaagaacagggtttaattaattcctgtgttttgataaaataaatcggaatgacaaaaaaaatcccaatggtaaatttaaatatttatacaatattatatttaactggggtgattgaacattacgaatgacaccaataaaaccaattaagattagttatcaactataattaagggaagtaaaatagaccattaattatttgaattggctgctggacttttcattaattaatcagcagaaggaaaaactgaaataattaggacggaatgtagtgagtgatcagtagggcgtcaaattatatggatataaaatcacgaaatatggccataaaatatggacaacaaatcgcaaaatatggacataaaattgaaaaatatggacataaatttttccaaatttagggtataatttctaaaaatttcttcaaatttattggttgaaattgcatataagatacatttccaaattttgagctgaaaaactcattcagtcggcaaatttaaatttattcaatatttttcgtgaaaattttgctaaaaaattattttttggaaaattttccggtttttgaggtcaaaaggccaatttgcctgttgggggccgttctattagaggttttttgaaaaaatgccaaatatggacataaatgccaaaatatggacaaatatggaaatatggatataaatcgcaaaatatggaaaaatatggaaaatatgggtatagaaatacgtcctagaagcttcaaaacaagctaaaaatatgtttttcgtacgtttcaggcctcccacagtccaggaaaaaaatatggatttccatataatttgacgccctagtgatcagtataaaagaccaatcaatacacttacttggtcagcttaattaattgaccagtggcaaatcatagacagaataattagtgcactattatgcaattagtgaaatgaattctggcaaatcccaatgaaatcgtataaaaaaagtaaatatgttcgtaattaaaatgggaaatcccaaacacgacaaaatccactcttgtcgaattcattttatttttatctgctttttatatacaaataataaaaaaaacaaaaagaaattaattattttctaagccaataaagttttagatttttgttgaatatacatattatttttataggtaaatccaaaatatacataaattctgaatgaatattttgaaattcttggtttatttattaaattaagaattatgggtagtaaatgggtaaatttacacaacccacagctgtaattttggtgaaacggaaagaaaatttgttttttgcttctcattgtaatagaagagagttcttcttagaaaataaatatgtaactcacatccatggcctggtggcgcaatggataacgcgtcagcctacggagctgaagattgaaggttcgatccctgcc

SEQ ID NO: 11727 - DNA, 1841 bp, Heterodera glycines
attcttatttgtgcgacatttctaatcattctgaagccgatgctgttttttttttggagttctcgagagtctcaaagtacgagaacatggttcagtctcgagattccgcgaaaaaatttgtcggggaggaaatttaccgaggaacaaacaccccgatttaaaacagttcgtctcattttctaaaatatgagtctcggtcacatttccgatctcgactaccgaaaattctccaactctcgagacattccttctatcagaaattccaccttttatttggttgcgcaacagttgctctctgctgctgctgctggacgttgtttggtggtggtcagcaccagcgggtgccatgcgtaacagttgcgcaacaacacggacaagcgcagctgctgccatgcaatgccgagttgtgcgcaactcgttcagtagaaggcacaaagtgtgggaccaatcgatggcatcctttcaaattggcgccattttattggcaattattggcataatgtttgatgtggttggtgcccagtgcccagggatggtattcattccgaggccccaaaaatctgaattatgtggcccaaaaatcggaattcctaacgaaattccgactccaaaaatattgtaaatcggaatttccgtgccatccctgttgccttccacaactcacctgccaacacaaaagttgctcaacaacagcaaattgtccactgtcaaacgcttttaatagcaaattgctgaccatttgcatcaaatttgggcctacaaattgattttatttttattttttttggcaaaatgatattttgccaatttaaaattagtaaaaaaaaactgaccgaaaacaaatggttgctgctgctggtggtgatggtggttgtggtcatcgtcaatgattacgtccaaggaaggtgaattttccatgggtgacgaagaagcggtggaatccgcgcattgggcaaccatttgtgccaaatttggaggcttaccaaagtgagtgatcggaattttccgacaaatttcttaaggtgatcagagaaagtgatcaattggaaattgttctaagtattaaaaatgattgttggaataatttaggtgaaataatggggaaaaatgtcattcaacaatttgagctttcagtttttgtgttcgtttttcgggttttggaattatgaaaatgaatgccatattcatgcgatctgattggcatttaataaccctggaataataatatttaaatgaatttttaaaattaaatttccgaaggatagtggtggaaattaattaattttatttattgcatatatttttatttggaagctgttccttactaattcgtcagattaattcttctaaattgaactagaacactgatcaattaattaattattcataacataagcgaagcattcaaaaattaattcccccccccccccccgcccaagggaggggacattagcaattgtgggggaatggcgtgagtttctctcacccccgagcaggcgaaatggaaaatgaagaatcacttttccattctcctccatctttaatctccaataagaatttttatttttaaaaaattattttttaggcgtttttaggtctttggcgagaaacaaaaatttcaaaaaatttagtgcaaaacgaaaatatttcttaaatcgcgaatttttaggctgggcacggaaaattcctacggaaattccataaaagaattttcccattttttttaatggaagaataaattaaattcccccaagggtttgtcaagcgccggaagtttacatatgggaatagcagcagttccagctgacaaatgagcaaaaaaattcagctggctaaactct

SEQ ID NO: 11728 - DNA, 895 bp, Heterodera glycines
gcggcggcggggggcataaaatttgaaaaatattccgacggaaatccgatcaaaaattgggttcgtttgtggtttattaaaaagttcaaccaacgcaagcaaattcactcttctctccattttctctcgttcctgtgtttttaaaaggtgtccgtccggaggatgatggaaatccccgccccaatcgttcatcattttttattggtccgccatttcccacaacacagtgaacaccgagccgccgatgacaccctttcccccccccctccctacgccgtcccatcgttacgccataaaaacgggtgaaatgcaaaattcaaattgatgaagatcggatcgggggacggacggcggcggatgatggcaggggcattagtgggtggtggttgttcatcatcttcattcctccctccaccgtttttccccttcttcccatccccatcaatcatcatcaataaatgatgatgattgattgggttgtcacctcaacaacaacaaacagcaggtcggagttggaaaatgtgtgtcggtgatttgtttcggggttatgatatgtacagttgtcagtcggggggtctaatttttggtggagtttattaattgcacgactaattggcacacttggacggaatgtggggattcaaatttaaaaaaaataaattgcggcacattaaatggtcaattgaccgggtccactgcgtttcggcgctggcgtttcggcgccagcatgtttttggctataacttttttctatctaatccaaatccaacattgttgatataattcgaaagcttaacatgtttagaagctttttctaagcgattgcttcgcgattagacaattaccaaaaaagttatacatgaaaatttccaaaagtcgaaatttttgaagtttt

SEQ ID NO: 11729 - DNA, 1315 bp, Heterodera glycines
  unsure (1)..(1315): unsure at all n locations
tagtcagcttgatgccgaggctcgggattagggagggggggggggattgtacggtttaaacccagaagttggaagccaagccgaggctttcctcgtacatacgccaccagcagctgggaattattgcatcaaccaaataatatcccaagagccgagaccaacaaaacataaaagacgccgagccgagagtctcgagacgagaccggtggcagtgcgattttgagaaagcaacgaatgaatgaggggaggggcccccggggggcgggaggggtccatcgaaattggcggtgggtcactccctcactcactcattcattctcaaaggcgcggcgggtggcagccgagcgtcgccagcagaaagcagcgataaaatcgtcaaatcatcgtcatcaccacccacttttgcttttgggggttggctggcatcattttactggaatttttgccgctttggtcccctccctttcccctctatgccacacaaattcattcaattcgcccctccgtcactaagcggaggcggggaaaggcgcagttaaagatgcttatcatcataattcatccgcttcatctgctgcgctcgttttaggcggcagcgggtgccctccccgccgccactctctcgggacgcggaggagcgaaatttgccacccgacgcctcaacaagttcagcacttatatattcattttgtttatcatgtgtgtataattgtgtgatgttattagctattatgtatacatcattatgtttaaaaatgcattatgggcgtccacaaatgtgcgatggatgatgattagcgatcggctcgggcaggacagtgaaaaaaatgttgaaatatatctatttattgaaatagaacctctgaggcatctatttttcaatccccctagaaggggggggggttctatttgagtaaacacgatattctgaaaatctgtctcagtccaggagcgtgatctctaatcatcattactcattgagcatttctgatcaatcgatcgatcatttcgcaaattgtcctcccggggctgaggagtttgattgattatgatcgttcacattcattgtttgttcccctgctgttgctgttgttgttgcagcatttgttgcatgtccttctccgactcgttcagccagttcattatggctacaattgaggcgagcacggccggcgtgccgaacccgtgggtcacctgcgcaaagattcatttagctaggtgaataattaataaaaatttggatagcgttggcattttttcaagaaaatatgtggtctaatttggcgcttccanataaaattgattaaattttcaa

SEQ ID NO: 11730 - DNA, 1769 bp, Heterodera glycines
  unsure (1)..(1769): unsure at all n locations
ttcaaagtgcttactattgtacaattaaaaagtacaaaattttattgaaatccggtcgaactcataaatttgaattgtaaaaaaaatatttaaaattttattttcagatttctgaaaaattttccgggaataaaaggacacactaacacattgattttcgaggtttccaccaaaaaatccactgactattggcacaattttttttaaaaggcaaacgatttggagagcagtttgtttcactttcaaagaaatttaaaaaaaaactgaaattttttagttttctaaatttcctgggaatttttgatgtaaaaacataaaaaatttttatgttttgaaaaatttgattagactttttaaatttacctatttcaatcaacaaaatacacgtagacaaaaaaaaacccacaaaaattagcagtaaatatacaataatttcaaccatattcattcattccaactcgtttaaaaaaactcacttcatccctttgtttccaaatgttttttccgcatttgaagtgtccgcgaagaaaaatgtcatcgcttccctggggcattggagcaccgtcggatcgccgacaaaagtgcctaaaaattaatttaatttttaaatgccgttggganaatttaataaatttgctgtgccaattattataaaaaccttttgccgttttgcactccaaactgagcgtccaaaacagggacaaatcggccagcgaaaatttgggcaattccaagttggcactgtccaatgcgaggtgcaaatattccggatgaaggcatcgcttccgataatcggcagtgccatcggcaggggatgagacggaggaagatgggttggcaattggaattctgaaaaattaatctattagcatgaaaaattccggaaatttttttattgaatttacaaaaaaaaaaaattgtaatttaaaatgttcaaaaatattgccatattctgaaaactgaatgaaattttctggcatttttcatgctaacaatgatcaaatagctattgtatgatacgaaaattattaaattaggttccatttaataagtttttgaacagtttttctcgtaaaattggcagttttcaaaccgcccatgttggcagtttttacaaaataacccagacaccctttttcattgaaattgataatttttgggtcaaaattttgaaaatttaagggtactgatggtgccgatcgcaggaaaataaatttcaataaattcagaattacgctaaaacttctaataattattatacattttccccacacaacccaaacacattggctctccccaaatcacacctcaagttcagcaacaatttgttgaagtagcacttggcatggaatgtttttggcattggctgctcaccgccctgaccgcagcaaccgcctccacccatttcaaagtcgtccttcagtccgccgacaaacaccgactcggaggaggacagaaacagcgccggcgggggcgacaatttgttttggacggcatttttggtggtgaaaaagggctgtacacagagcaaagggctgagccggtccatcaagctgaaatccacgtccattctgcactgctccatgccgatggttagcttgtaatcctgaaattattccggtggaaaaatatacgaaaaaaaaacttttagaaaaatgagaattgggaaaacaaacaagatattggaaagcattcctaaaagaatttgaaaactcaaaaatgaaagaaaaaaaaattgtgaaattttgcttattgttaggcttgtaaaa

SEQ ID NO: 11731 - DNA, 2372 bp, Heterodera glycines
aacagcaattttaaaaatgtgggtggttcttaggttagtaaatgttttcttatttttgtggatatttaaaaaaaatttttgttccttaacacaaacattttgtttctcgaatgaattgttgatttggaaggtcaaaatgtcatttttgagcaccgtccgtcgttcgtcgggcgcagcaatgttcaaaatgtcaatgcattggggtggcatctgaaaaaattgcataaaaataatataaatcttggtaaattataaaccaatttcaattaggtaatacaaatttatttttgggtgttttattttgggagcaggacaaaactcagccgagacataatgcagccgtgaataaattttttaaaaattttcaaacctataaatttttcaagaaaaaaatcttagaaaattttttcttagaaaattctatgagaaaaaaaattttaaagaattttccgcgatttttttgaaaattttttgaaatttcttagaattagtcattaaattttgaaaaatcgcctgaatttttttttcgtagaattttctaagaattttttcttgaaaaatttctaggtttgaaaattttttaaaaatttattcacggctgaattatgtctcggctgagtttcggcggctgagttatgtcctgctccggttttattttaccccgttttgtgccgactgtaagcactcgatgaagtcacactctttcaggtgactcttcgactcgaacaacacacgctgcaaatcggtcgtaaaagtgaaggatgtgaagaaatcgttggccacgaaactgaaaaatgctgacttaaattagaaaagcaaagataaaccaagaaaaatggaggaaattctggagaagtccgtcccatggcaatttgtatgaaaattgtgttccaattgttgattattttacccacaccgagaccatagggcatatgcccgtatccagaaaaaaatttcggggagggcatttttttttgctcttcggaccaaaaatttttttttgtactagtgttattttcaaaatcttcagcgcggattttgcgccgaaaaatcataattttccattttgggctcaaattttcaaaaaataatggtctacttggggcccggcgatgccgataggcgccgccgggaaaaatttttggaaaattaaatgcaatatgataagaaaatgtgcaaaattttcagaaaatttgcccatttttgcttgaaaattttttgatttttcattttgttaaaatttgctaaattttccacacggaacaaataaatgcatttaaattgtccaaaaattttgacataataatgctcaaaagaaagtatgtaaagaaaatgctgggcacgaaatagaaaataacaatttgtattaaaattttacaaaattttccccaatggggcctatcgggaaagttccattagttttttcgaaaattaacaaaaaaatgttcataattggtcattttttgttggaaaaacagccgaaaatactattttttggcctgtttttgtctattgccgtttggaaattttttctgccacatttttcatggcaacaataaaaaagcaaatggacggacggaccgcaaacagtcgccgtcgcacagctcgccaaactgttctcgctgctcctccagccgtcgctgtttgccaattttaatgcatttggcggcggcaaagaatttctgcgcccgctcattcatttgttggacaacggaagcgacgagcaatggggacggatgaggaggatgaggcgacaacaccgacgacgaggaggacgaaaaggacagtctctcctcgtcaccgttgatttgttgttgttgaaggatggcatcggcactcaacgggtcgtcatgagtgatgacggcgaccaacgcgggcgcacggacggagacggcgaaaatgtcgggacgacgttcgacaagcgttgcaattgaagtgcctgtgcatttagttgaataattgggtttatgatgatgattgaataacgaaaaatttaattgaaaatgagtgggcaaatggaaaaatattttaaaaaattttaacccaaccccctcgtaaatttgtatgaaaaaattttaaaattttcatattttacaattaagagaaaaaaaatttgttgaaatttatgtgagaaatggaaaaacatgccaagagttgacccccccccctcgaaaatttgtataaaaattacccctttttgttttatattgcgttttgcccataggtggacaaggggggggggggggtcaattgaaaaggcactggtaaagatgggaaaattttacgaaattgaatttcgtttttctctttcgtaaatttttttttatgaaatatacttttttggtgaaaatctgttaataaatcatgaaaat

SEQ ID NO: 11732 - DNA, 1797 bp, Heterodera glycines
cagtgtcctttacgctgttgctgatggttatgatgatgcccatgaccaccgccgccgccaccaagttcgccaagttcagacaggtcgtagaagcgttgctcagtgccaccactccatgagccagggccgccaagcccaaatgtcggtggtgccgtcatcgtcgtcgacgatgccgtcggttgatgatggtgatgaatgtagtgatgattgacggatgatggtggttgatggtgttgttgtagccgttcaccaccaccgtacaccgcacccttttgcatttgttcaatcagtttggcgtactgttgaggtcccatcggcacaccaccgccgcctgtggcattttgttgactgtaagcgccaccgccactgctcccagcagtagtagtagtataaaattcagtggcacaaccaccattttcgctcgtcgtcgtcgtgccgaaagtgtccggcggcactttttcatccgcccgaggggccaacagcgtgaaaagcttttgcaacaacaccaattggctgggcgtgagcagcaaatagagcggtgcccggaagaacaggtccacatcaatgcgcttgttgtaaaaggaattctccgcgtaggacagcgcggaattgttccggacacggatgcgcagcgtgtgcttgtcatcaaacagttgggcaatgagtgtcgggtttggcggaatgctaaacacaggggggggggcattgaataaaggaaaaataaaaaggggtatgcatgcattttacaaggccacacaaattgggaaatttgggtgcccgaggcggcattccgattgtaggacagggaatgattggatcaaaaatggttggctcggttggtgaaatttgcgtttttgggattttgtaaaataaacaggaacaggacaaaatttcgccgcccaaatttcaaaattttttttttttaaattttcaataaaatttttgaaaaattagtaattcatcataaaattccaaaaacgcttgaattattctattttttcccttaacttactttttaaaaatatttaaatgattttttcttaaaaaatttccaagttttaaattttttttttaaattttggcagcgtaattttggggtgcacccaaataaacaggcgaaggttttacgaagaaaaattttcccagtttcttatttcaaaaaatccttaaaaacattgggaaagtgtcgtgatggacaaaaaaattttaaaaaaacgcacatatcctgtgacttttgctgcgaaaaattgtttgaatttgatcgcgagctgaagtgggagtagcaggactgaaagttcatcgacgaggcggccatgtccgcgccaccgccgccgcctccgtccgattcagtcgcgtcgcttgtcctcgaggcgcacattcgctggaggatgagagaacaaaaattaacatgctattttggaacccaaaaaaaattgtagaatttcaaggaaaaatttaaaaaaatttttgatttttttttctggcacaaatttttcattttgaaaaaacagggattatattgtaagaaatcgaccaaaaagtttccaaattgattagcattgcggcactttcttttgactgtttaattatttgtacatattaaatttgtgttacattgtcacggattggtgaccaaatgtctgtgtacagtcgaacattttggacatgcaacagcttgttgaggtcggtcacctgaaatatatggcactgtgaataaggggggggggggggggaatcccaaaatttatttattttttattttttttgctttttgtgacaaaaattattacccatttt

SEQ ID NO: 11733 - DNA, 1231 bp, Heterodera glycines
agtgaaatttatttgtttgtatttttatgtgtaaactaatgctatcataaagtgtttttttttgttgggtcagttttacattgcctatacagtctggctttctctttgatggaggccaataaatgcgttggatatttaggggtcaaatcttttttggtaatttttttccttggaatacactcgtttaaggtttctagcaatgtattattaaaggcgttgtatttttcgttcacactaaaatgctcgttagataaagcgctaattctagaagaaaccataatattaaaaagagaaacattcgacggaaaaaaccgtcgattgtaaaagaagtttgttttttgtagtgtttttgtaatagtcaatgtgaaaatttgcgctaagtgatccgatgaaaaaacaccaccttcaatagtacattgctttacaatttgatcattcgccggcaaaactaagtctaaccacgaatttcccctggtgggtccactcgtggcattgaaaaaagaaagcttactaaaaaagtggcaaaaaatttcaccaaatttactcatagaaatgggctgcccttccttccataccaggtctttattcgggaaattaaaatcacccaacacaacacaattatggctatagaatgtttctaaaaattttaaaagttccttggtttgtctatatgttgtcttggttggtcggtaaacaagcacaaatctaattgattttagtttttgtaattgaaaaaccaagatttcgcaattatattttgtttcagaaaatttaacaaaaaactcaatttctttcttaattaaaacaccgcaaccacccccacgtgttaatttttgagattttctatgacaaaaaataaagttataattttcgattatccatggactaaagaggattgggttttcctcctttgtccatgtttcagttaacagaaaaatgtctatgtttttatttaccaaatttaaagctatttcatcaattttgttgtaaagtgatctaatattaactaagcatgctttaacttcccctattttggttttggggttattgggcttaacatacttaagaccggaaaagtgcgaatttataaaatgttttatgagtgtgattttggtaaaacagcaagtcaattggtgttatttttaaatgccgcaatggttgacctcagcatcaacttttgtcccccgtacaccacccaatcgccgccatctttcctttctttttcctgcta

SEQ ID NO: 11734 - DNA, 4003 bp, Heterodera glycines
  unsure (1)..(4003): unsure at all n locations
ttggttaatatgatcggaaaattgtaatttgttatcaatgtttactcctaaatccctaattgtatccacagcattnattgtatttccatcaaatttatatgtttcttttggggtttttgaacccaaatataatacaaaagttttttgcattgaaacttttatttgccatttatttgcccattcgaataaattatgcaatgctttatgcataatctctgtgtcggttcttgctttataacaaatatataatttatcatcatcagcatataattttattttcactcctgatggcaaagcatcaggaagatcgttaatataaatcaaaaataataaagggcccaggacagagccctgggggacgccagaggtaacttttttacttgaggataaagaatccccaattttaactcgaaaagtcctattactcaaaaagccctttatccacattaaaagtttgccctttataccaattttttccaatttgtataaaagtaaattatggggcactgagtcaaatgctttttgaaaatcaatataaatacagtctcaacatcagaattgttaaacgaatttgcaaataagttggtaaataattcacatttttcatcaccattatgatagcatttgttttcaaagactaaatttggtatttcaaaaggattaacatcgtatttttgtaggtatttaaaaatggaatttcttccctttgaaatagcctttttctcaatttgcgagtgaaatttatttgtttgtatttttatgtgtaaactaatgctatcataaagtgctttttttgttgggtcagttttacattgcctatacagtctggctttctctttgatggaggtcaataaatgcgttggatatttaggggtcaaattttttttggtaatttttttcattggaatacactcgtttaaggtttctagcaatgtattattaaaggcgttgtatttttcgttcacactaaaatgctcgttagataaagcgctaattctagaagaaaccataatattaaaaagagaaacattcgacggaaaaaaccgtcgattgtaaaagaagtttgttttttgtagtgtttttggaatagtcaatgtgaaaatttgcgctaaatgatccgatgaaaaaacaccaccttcaatagtacattgctttacaatttgatcatttgccggcaaaactaagtctaaccacgaatttcccctggtgggtccactcgtggcattgaaaaaagaaagcttactaaaaaagtggcaaaaaatttcaccaaatttactcatagaaatgggctgcccttccttccataccaggtctttattcggaaaattaaaatcacccaacacaattatggctatagaatgtttctaaaaatttaaaaagttccttggtttgtctatatgttgtcttgggtggtcgataaacaagcacaaatctaattgattttagtttttgtaattgaaaaaccaagatttcgcaattatattttgtttcagaaaatttaacaaaaaactcaatttctttcttaattaaaacaccgcaaccacccccacgtgttaatttttgagattttctatgacaaaaaacaaagttataattttcgattatccatggactaaagaggattgggtttccctcctttgtccacgtttcagttaacagacaaatttctatgttattatttactaaatttaaagatatttcatcaattttgttgtaaagtgatctaatattaactaagcatgctttaacttcccctattttggttttggggttattgggcttaacatgcttaagaccggaaaagtgcgaatttataaatgttttgtgagtgtgatttggtaaaacagcaagtcaattggtgttatttttaaatgccgcaatgtctgacctcagcatcactttgtccgcgtacaccacccactcgccgccatcttcctttcttttcctgctacactcttcttgcagcacacgtcgggccttgagttcctcttggctgagtgaagggcgaattcggatgttgctcatccccaatttctgattgatttgcgcgcgccctttgttccactgtgccaaggtttgtttctgatgtttggagcacccgaaaattactttcatcaacctcgggcggttttgacctgtctttgcttggtctggggaacccattctgtacacagtgattgggctctcgatgccaagctcatcgagaacgcctgagatggcagttcggtcctcagcgactcgctcggacggcttttgtttctgcgattcagggagacccattacgacgacgcttcgccgacgctcatggtcttgaatggcttcttccatcattttctgttgtttgagatgttggagttgaaggtcttgttcggagatgacggcctgttgttgctggacctgctgtaaaagttcgacacaaattttcaaaagttgtttggtgatggggtcgacactgttgttgtccatttgttgggaaattgccgcaagttgatcactaagagcggtgtatgggtagtcagaggtggacttttttgatgcgttgtctgagagaggagaaagatgggaagaaggacgctttccaaacatgacaaatttgaattaatgacaaacatttttgtttaagccaaacgcatagattagtgccgttgaaagtgcaaccttttgacacttttgtccaactttttccagcaatttctgttcaaattaactgattaaataattaatgatgaaaaatgataaaatatcatttatattgctaattattggtcttaccaaatgagcagctcgcctcgacacaagaatcaggaccccagcaaaaatccagctttctagggtcatatgggtataaatcttcgtaataggagagagtgtcatggctagggatgctaattttatgtaaatacatatttttttcctagattctccatagcctaattagtaggaaaaacactttcttttttgtgtttgcgaacaaaagttgggacttttatttacatatttttacatattttgggatttttctacatattacatatgtacatatttttatacatattttggactttttcgtacatatttcgcaatttttcgtacatatttttcatttttttacatattttgaggatttttgagaatttataaaattttttgtaaaaaatttaaaaaattttttttgaaaatgtatccctaaaaaatcgattttttcaaaaaatgatatatcaaaaattaatttgtaaaatattcaaatgtgattctaagcctattttggtcatttttatggcattttgtgcctatttcactttttacgaagaattttttccaaaaaataaccattaaaaaaattttatttacatattttagtacatatttgggggtttttgtacatatttcatacatattttagcattttttatacatattttatttacatatttcgcaaaatttgttacataaaattagcatccctactgattaattaaaataaatataacataaatatgtatgaaagaaatccaaaatatgtgagcatcaaaattggatggttaaatttttccgaaaactgttatttagaggcgggacgtgcccgggcgctcggcgggctttaccgttccattttttcgacaaaccaacgggaccgtgccgctcagaaaaaaaaaccccaggagccccgtgttgaacataaaaaataactcgccagctgggactctaacccacgaccccagcaatccgtgccgtgctctaaccgactgagataatacattaattaggtgatttttgtataagtccctttttgtgtcttttatataacgttatagaacagcaccaaatcggaagtaaaaccgtaaattcgcaaatcataaaataccatcaaaattgtaacctgtttacctattttaaacaatcactanatttggaatttcaagccttttttgatattttgtgccaatctgtcgataattgtttgtctgacattgatggccccacggccattggcattatgact

SEQ ID NO: 11735 - DNA, 1366 bp, Heterodera glycines
cgttttgccgaagttgagttggaaccgtgctgacaaaaggttggattgttgtttttggaaaacagagaatattcgctccacatccctttgtttaaggttttcgtataatttttgtttcaatcaaaagcttcaactcatagacattttcaacagacaaaacaaagttcgaaaaactcagttttcatacttttacgggttaggaattcaaaattgggcaaaatgggtatggtattcgtgatcagcgacccctaaaacaactgaaaacaaattttcaagttttttggtcaaaaaaattattatttttttttttgcaaaaagagggttcccctttgattttgaaaaaactcaaaaaatgcaactttttcttttctccattggggtattccagggttttttttctacaaattgctgatttcgggctttcccgtgattggctctggaggcgttcatttttaatttacttcttttagcaaagcctccggcggtggctgacattgacgtttgtttgttggttgttttttgccgctcaatgtgatctcctccgacttttggacttcaaaatttttgccccgttttgtgggaaattggattatttacattgttttttctttgttgctttgccagtgactttttttgtttgatgcgcaaacgaccacattattttgcacaattacttcttataaatgtatttcttttactatatgtagaacataaaaatgaaagacatacctatttatgtatttattatactataaataataattataaaatcttaacaaaaatatatatgatgatttccatgcacaatttttgacatttttcagctgtccaaaatgatgagtgccaaattttttacgcatttgattaattcggcatcggtacgacccatctccacctcatgctgcagaaaggagttgcgtgaattgtggaaattggacaaacggaacccttttcaagaaattcccgaggcatgggtcacttctctggatgatgttgagcagaaaaattgtggactcattcaactccatccaggcatggcctcaatttggagcgaaaatggcaccatgataggacattggcaaaaaatttattccaaacacttcttaaatgttcataagcaacacaaacattgcctgatttctgtggatgagaagcgctaaattttctctaataaatttctctgaaatttaagttacaaaaaaatttaattgcgaaaatttcaaaaaaattcctaattctgaaaacttaattttaactgtctttagagttcggcctggatccaggccacttggtttttaatgaatttttgtccaaaaaattcaggtgcatgctttttttttcagtgtcgaacttcgtttttttttta

SEQ ID NO: 11736 - DNA, 2309 bp, Heterodera glycines
aaggaaattttgtgaagatttttttagcgattttttcaaaatttatgattaattactttttttccaaaaaaatttccataaaaatcgctgaaaaaaggtcgaatttttctttaaattttcttatacaaaaattaaagattttttcttggaaattttttaaaaaatgcttcaagtggaactgacaagtggggggggggaagagctgctccgcccaaattccattcctccgaaaggaaccaaaagcgcggccactataaacatatgtaaaaaaaatatggcactgacatcctaaaaaagtggcaaatgctgtgttttaagggcaaaataaccgccctatcccccgggggaggggtccccgtgtcacggcattatatactcgaaaaagcacacactttgctcagcgaggtgggctgaattcgcatgggcgaaacggtggggtcaaaaaagcgccgcacagtcagcggagcatcgaccattttgaaacggagcacaatgctgcagagcaccaacagcaaatccctgccgaaaacgatggcagtcacagggactgaaaaaagcggaaccatttatttatatctatcgcacaaaaattatttttaaaaaatcaaaataaaattaaaaattccaagaaaatgtatgagaaatgttcctaaatttttttttcaaaagcaatgaattctccgtgtcccgacatttgcggcccgacatttgcgcctttgtccaaaatctggttcaaaactaagttttttcaatcactgatcgcataaatagctttaaataagcgattaaaagtgattgtacatgatcatttgatcttcaaaaaaatgttgaaaaattaataaaattttcaaacaaaaaattattgatcataatgaaccataaaaccgtgttttcttaattttaatgcttattaggctatcaggggttgaaaaaattcaactttgagtccgattttggacataggcgcaaatgtctgggccgcaaatgtcggggctccaattttctcgatggtctaggcaactaaaattttttggttgtatattttttttgcatttaaaaaaatcggctgctcctattacaattagagccatggggaaaatgccatttttacagatttttggcaaatatatgagtaatttctggcaaattttgaacaatccaatggcttggcgaacatcggataaagtttaaaaaaaaaatttttttttttatcaaattccctcagaatcgttcaaaaaaaaaatatatttttttaatattagcgatggcatttccccaatttttgatgcaaccaaattcctatgcacgctgtttttaagcattcgttcaccgcatttcattcgcggcggttttgcgcacggcgttcgcggcccgtgcacccaattttacatgctgcccaacactgtccgaattcacgggctccgcaccgcgttgaccctcaaacatgcgcaggacgacttggtcattgtggacagctacgacacgctgaacagcgcggacccacaagttggaggagggtggaaaaaaaaatttttttttttttactagtttttgaacgatttggccgacgcacgcaattggggctattccgtgctgtttgttgatctgtgagtttttttttgtgcattaaacggttggtccattcttcgcttttgcgatgcgcgtaaaccccaaataaattatgattgatttggcttacaaattatggtcctgaatttttttaaaattgtcaggcctctggcaaaactcgaattgaatcaaattgcaaaggcatcatttccccacgggcgcctcggcaccaccgacacacctaaatttgttgatcaaaaattaccaaatatttcgtttttttttcaaaaaaaaattaaaaaaccaattcccagcggcttctatcggtaccctgcaacttttttgttccaattcgatttaaacaatatgtcattaaaatggcaaaaaaagagggggggggggagggtgaggtccacaaatttgtctatttactatttccccatggtgcagccttcgcacatgttttctttaattttcatggtgtgcacccatttacggaccgggtcgattgggcgccgaccagttgggcgccagcctgctttttgaggcacaacttctttcatagtttttttagcagattttcttaaaaatataatggattttttgaaaaatttaacgaaattttttagaaaatttaggtgatgctaggtatgagggggggggggggtaccagcaaggaaaatctataaatttcagcaaaaatactattctttccttaaaaaatttcaggtgcggggggg

SEQ ID NO: 11737 - DNA, 4362 bp, Heterodera glycines
tttcgccggtaataatttcgccgaggaaattttttcccccatttggaaaatttcaagaaaaacacttagaaaattttttatatggaaattccaaggaaaaatttttgaaattttttagcgattttttggaaaaattttcgaaaaacttactaatttatcataaatttcaaaaaaaaaatcgctgaagaatttttctaatttattttttcttgaaattttcttaaaaaatttctaacaataagtttaatttttcggcgaaatttcggcctgcaaaattatgtcccgttaccttttttaaaaattaatggcattgcatcttttggttagttgttgtcgatgagccaatccgtcgtggcaattgccaatttgtggagattgttgccgcgtacaccgtccatttgttccctcccattcacttcatcaacacattgccaatgccagtacaaatttcagtgcccgtccaatgcgaattggcaggcggtgatgggctggatattatgaatttggtcgctggattcccactcattttcacggtaaatgaaatttaattcagctgctaatggaagaaccccaaaatatcgacgcagaaattaaaatttttgaaacagtaatttaccataaaatttcaaaaatatagctgattgtgcgatttttcagatttgtttgctttaaatctcagtttcaaaatttttagaaaaaattctgcgtcgagattatgtctcggcgagatttttccgataatttgaacccatttgtttccctacaggtttatatcggggctgtagtatacgagttgcattacatagtgccaagcgttaaaaatccattggaaaccatccgaatgaaaggcaaaacgaacgccaatttggaattggttggacatacacctttataatttaacaataagtataaattgaaataaattttttttaagtgccttggtttgaattggagcaccgaattattacgtacaaatttgatgctttacgcgccgtattggatggtcaacgagactggcaaacaactcgcttattatgtgagacatggcaaacaaaaaatacattcatttagatttaaatttcctcaagttttaattcgagagtttttttatagtaataagctggttagcatttctgataataatcagtctttttccccgtcattcatttgtttcccccttctcttttagagtcttccgtcagtgaaatgtctttgttgttctgattgtttgtcatgtaaagctcaggtcagggacgtttttatgtaatatttggcggggatgaatgatacgaaagaacggagtgtcctatttatgtcaatcgctttgtatttatttataaaacaacggatttcgtgataaaaataagtttaacccggaaacccggttttggccattttaattcaaatcggttcaagaatatttttcttgtcttttgaaagttgctaaaaaaattttgatgccattgtgtagaggaaagaccagacttttaaaaagacctaaagcagcctttttctcatgccaagttttatagaatttttccaatttatccaaaaacgacaatgttttgcgacaacccaattgcctaatttcttttgcttgggcttgtgttggtctttgtctttgtgtgtgtttgcgtgtccttaattatatttaaacaccgacaacattaccctcaacttttttaccattttcagagcaaatccgtccaaatttcgcaccctcccggcaccaatccgatgattctgccgttgaaggaaagtgaatttatgtcggagaaaaaggcaaaggtgaaaatcgtggacgagtccaattggtctgccgaattccctttggacatggccggcagcagtgagcgtgtcacttgcaaaggcatcgccaaaaagaagcgcgcatttgaggcattgaaattaaaaacatttatttgttttactataaatgcctttctccgttcagatgactgtcgatgtccaattgggtcagtccggcctcacaaaagtggtgaccattttgcccttctttttgctccaaaatgacagcaaagttgacatcgaagtgcgcgagccgcacttgacgaaatggattgtggtgccggcggaatcagtcagtgactttttgaagaaagaaaaacctatttcaaccatttgcaggtaattggtttttggccagcggagaaaaagaaacacaaaaaattagtggcacgttatgccaagacgaaagaggaatcggtgcaattcccaatcacagaggcattcgaaggcttttgtcaaatccggaataatgtatatgtcttcgtcattccagtttcatttgtccctacttttagctgatcggcctttacgtgatcgtatctctgctggatgaatcgtccgtcattcacatggagatttttgtgcccggaatggtgccggcgattctgatgaacgacaccaaatacccaattcgctaccgacagacgggccacagacagtggcaaattgtcaagcccaaccaaatggcaccatttgcgtggaccgactcgctgaatggtgctgtttctgtcctttaaatggctttttatttttcatataatcctttagccctttttcagattgtaaattggaatgggagtcgggcgatgctgaaaattcggatgaattgttgcgcaaccgcgacatttcttatctgccagccaacaatgatggttaccattattgtgtgtcctttttggacgggcgccagcgcgttttgctcgtaatcatttttaatatttacgataattccttatttctttttgtttagttcactgctgacaaaaaagtttctttcattgctcaccaagcgtatgaagtgagtggacagaggggcagaaccatttatcttgttttcacattccatcggtttttcaatcattaaaatttcacagatggaacagccggacatcgaattggagctgcacttgcacgggttgggcatctccctggtcaacaacttgaaaagcattgaagtcctttatatggtcattgagattcaatttgcctgtttttaaatatgaaccactatttaggccatttctccaggaaaacagaagaaaagtgacgaaaagtcgcttaaaatggccaccggtttctggtgtcaatatcgtcagaccactcatcagcagacgcttcacgtgaaattgcacaatttccaaatggacaaccaattgccagcgtccaccttcccctcattactcgccatggtaccacagccgaaatatatggttaaaaatggttgtttatttaaaagtttttggcataaatgttacaagttttttatttcagatccaaagccattcctggagtgtgcatttgtgatgagtcaatcggaacatacgaacattgtccaaatcaaactgctggaggcgttggtgcaagaatttgcgattcgcattgaccgaacattgctcaacgaactattggacataataccgaaagggatcattcagacgggatacactgtgaacaaagatgactgaattaatattatcgtttgccgttgtttagcgcgaatccttccaaatggacatggaattaaccgagaaagcgctgaataaaagggcaattcaaacgcgggagacacaggccaaggcgtattaccagcgaatgcacatttccccgttgttggtcggtcattttcgaccacattttatacattgttctgaaggttcctttccacattttcagatccatttgagcttttcccaggggcatgttgagaagggcaaagagggcgctgctatccaatttatgaatttgcttttgaagagtgttggcgttacactcaccgaaatccaggacgtcattttcaagtacttactgtttgatgtccttttcattgctttgcaattttcggcttgccttcttccaacgcgaggccaccttctacagtcgtgcccaattgcagtccgaagttatttcccattacacccgccaattcatcaaacagctttacgtcctcgtgttgggtaatcaatcaactgtggtttttcgcttcacttgggaaccctttcttttttaaggccttgacattctcggcaatccgtttggccttttccgcaacttgcgcaccggcgctgtcgacttgttctaccaacccgtccttggcatttttactgcggccgaatttggagagggcgtttatattggactgactagcgcgttcaggtggaattcttttggctattgcttattgctcttactcatgtccccctcccactttttagtcacaccgtcggcggcgttctcggcttggcttctcgcatcactggcacaatgggaaaaggggtggcggcactgactttggacgaggactacccaacgacggcgaatacaagccctgcagca

SEQ ID NO: 11738 - DNA, 2783 bp, Heterodera glycines
atttgtaatggctgatcgaaaatagctatgggagctgaaaatgctgtgggagcaaaagcaacaggggccaaaatgaaggaaagatggccccaaaacaacagtcatccctccagtggtggatgtggtctagtggctaagacaacggatccacgtaaggggccccgagcggcggttcaaatccggccttccactccaatttttcgcctaaataataacatcccatcccatctttgaattctgaccaatttgttataatcggactcaacagattgggctgggattggattcattgtcagaacagccccttcccccctcgggcgttggatcaaagaccaccgcccgcccatccgccgccgatcttcacccttttcaccccgaagggattggcggattaaaggtggctttttgcaccgaacgaaaaaaaaatgcattcgccgtccgtacgcaacactttcgcggataaaatattgggaaaattatgtttagcacatacataatttgttactattatataaatatggagaactgaaaagaaagttttaggaaataaacacaaacaaaaattgtgattttgtagacagaataaaagaataattgttttaaaaatgtttttttcttgcaaattgtgcaaaacgtaagactaatttaaacatttcaatgaaagaacctttgataggctcaaaacccgaaaattgaagaaaacttttgcaatttttgatcgctcactgcatcaaattgctcaaggacattgagatttaacggagtgattacgcgccgtgtattccgcgtactccgcgggtgggtgaagggaagaagacaaacaagaacacaaaggaaaaaatcgatctgatcactctgtgatcgatgatcggactgtaaattcaaaggtaatggatttgggagtgtcaaagggattgagttgactccgctgatcagtgatttgaaatgtaagagaattgctcaatgaatgactcatttttattacaaatttatatttttctcacttttttgacgaaattaccattaaatcccaaaaatattttaattgtttgcacaagaatagaggagcaactccccctgtaaaaaccactgctgctgatgtttgttccctcctcagttccaattttgtatcaatcgaaatcattttggtatcattagcgcgctattagtggtttaactgctgcttttatggcatagtttcgcgcataaatagcgactatgcgtccccctcccgcgtctgagcttgctatttatacagcgaccggcgcggcagtgccattctgtgcactgcgcgggcattggcgccgccttgcgccgccggcatcgaccgccccgccccatcgccgcgaggcgttttttgcacacagtttacacagtttattccacacaacagtgcgccatttttgtgtactttggcgaaatgttgcgatacgacggctgtctccgttcgtcgtccgcggcggggattggtgggaaagcaaatattgcggcgatgcttcatcacacacacatattttttagtaaatggcaaccgacaaatgaacggagagggacggaaagaaaacccaggcatatggcaaaaaatggggaaggaatgtgaaaagtaagccaaaattataccaaaaaagttcagaaaagcatcccaaatgtcaagtgattatcacagattgaatgtttcttttatatataaaaatgcacacatttaaactcagaaatattaactcgaatttttgataatgcgattagcaaaaataaaaatgcaaatcctttgtgaataatttgttcaatgtatttattaattataattgaatgatgggaaattttatgaattgagatgacttattggtgacgatgggttggtgctgcacccgccgcccccgggctttagcagatccctccgtcctccccccaccccgctgggggtgacggagttttttgagtggcagggggggcgtcgtaccagccgaccccctaaagatgggtcaggccagacaaacgacctttgtgctgcgcttttgcggaggcggggctggtgggaatgagaaaggtaggaagggccaagcacaaaaagaactttcattgtggaaaattttaaaatagcgccggggggggggggtaaagccgacgaaaagcggtagatcagtggcaagaagcggagatggtcacctatttcacgagatgtggtttttatgtttaacagcgctggaaatccatttggaagaaattgcccaaaaatgtcgtccgtccgtcccctcaaaataccgaaataattggcacatcgttttgcttacccccccccccccgcccgcttcactgaaaccgatctttggcccatcactgccgggcgtatgagatgatgggctgagcacattccaacgcctccacacaaccacaaaagcgtcgtcgtttctttgttgggcccgattttatttattgcttcccattgccttttttttctttgtgtgcggacggagagggaaatgtgtacgaagggggggggggggagaggaaccagcggcagcagcaaaagggggacgaagacgctgcagtcattgcattgggacacgcgggaaaatggcaataaattggggaattttgtgaaattaaaaggaaattaaaatgttggaataggcactaaataaagcaatagcagtattaaaagctttgttccatgcccaaattggagcagaatgtcctcctccagccgcgactgacaaaagcaaacacattatttcccaactgaagacaacccagctaattaaatgatcatcttggccatttat

SEQ ID NO: 11739 - DNA, 1311 bp, Heterodera glycines
  unsure (1)..(1311): unsure at all n locations
tccattcctcattcacatctaccacacctgccccgctaaaagagcacagctgtgaatcaacgacggcaatatgatgataacagcacagcaaataataacaaaagacgacgacgagatttgccacaaactgaattgtgttcgattgctcacaaaataataaataataataagatgagatgagagagatggcattatgggcaacggcggaaatgtggccaaaaggcgaagaacaaaggcaaaatgagagggaggctaaaagagagacaatgggacgggaagagagcggacagagaaagagagggttggacattaaaatgacaaaataaatattaataaaaatggaaatggcatttttcaattcccttttacccattaaataccgtggagtttccccgcttattgttagtgcactgtttcaaacataatggtcgcagattattacgagtggataaattggcaaaaaagagagatcccaacacaaaaacgcacaccacacccactcaaaaagaaagcattgatcgatgcttttgatcagtgatcgccgtcccctcccccttctctcaaaatatgtgaaggttccttcccgaattttgtgacgtaaaaatgaatcttttgctaaacttatatgaatttagaggcttaattcttttcactggggctaatttatgaaaaataaaataagtaaaaaaagaataaattcctttttgggagttaaaacgaaaaaaaaactcagtaaaaaagtcagcgttaagttttccgcacttttcatggatttacatctcataaattttgtttcctgaaaatgaatctgcaaacaaaaaagagcgacgagcaaaatgggcgaatccaacagaaaaggcgaaaatgtgacaatcaatttttatggattggggaaaatcgaaaaaaaaacttacgaggctcgaatcgggtccattttccaatttctgtcttcggttctccaaaacgggcagcgacggtttggtggagatgttgaaagccttaaaagctcaatgatcggatatatttttgaaatgcaatcaaattaatgcttttaaaaaatcgctgcaaatttcgtatattttccttacaagggaaccacccgaactgtaagtcggaaaatgcatatgtgttatataccattggatagagcaatgtcgacttctattgtgaaattttaatattacgcccatatagcaagaaaccaaaaagttatggggcctcaaaaatctaaagtttggctgtgtttccacttaaaattggtggctcagtagattaaattcgtgattttgaagctcgnggttcaaatccaac

SEQ ID NO: 11740 - DNA, 3370 bp, Heterodera glycines
gtcactccaattaattaattattcctcccttttttgtgttttgcttttctttttctcaatttttccatttggcccaacattttttcatttgcttttcatttcgaaactggagcccccaaaagacgaacgcaactccccgccggacttttctgctgctgacggcgttgaacagccaaaaaacgaatcggtcgacggatttcgactttctccgccgccgaccaccgcaacggcgacgatgccaacgctggtcactcccgctgatggcgggcaaataaaaaagcaaaaaccgaaaagtttgtctccgccggctatcgctttgttcggcgccgtcgctttgattctcgcttttggcattctcggtgtgtgaatgaatggtgcaaaagagaacaaaaaaaacatggagtaattatttaagaacttcgaaagactgattagtcaaaatatgaagtaattatgaaggatggtgtttgctaattaacgctaattataaatgtacaaagtggtaaattattgttcaaaaagtgtgccacggtaagcattgtttatgacttaaggtgtgagcatcgccacgctaatcagaacattccaaaatgggcaaaacaatgaaatgccagggacaacgacggcatcgccgccaacagtcactccaacgccttcagcgagcacaaaacctagtaaataaaagaataatttaaattattagataataattaatgaattggtttagccacgacttcggccgccccgacgactttaagccctttggaagaacttcacattcccgagcccgccaaaatgcaaaaggacgaaaattcggaggaataccaagtgacttttgacttatgacatttgcccttttgttttttgtcacttttcaatttttactcaatccaattaaggcgtattcgaatttcactgaacgattgaccaaatctctgaatcttagccaaagtccgtgcgacaatttctatgaatacgcatgcggcaacttcaaagggccgatcagtttcgaccaattgacagtgcaaaacgtaaaaacatttgtgggattggtcgaagatgaacgttacagtaaaaacccaaaggtaattaacccaaagagataaatatttaaattcgctaagttttagttgccactgcccgtcaaacagtcgattcaattctatcaaaaatgcgtcggagcaatgagcgattggagtgccgaagttggcgatgggagccgactgagaaagaaaatgataatgttggagaatctgttggatggagtgccattccccgcggtgtcggccaaaacccaactgaacgtgagcactgattgaagtgattggtccaattaattgagctgatcgcttaagatgatggaacggccatccgtcgacactttgtccatcgctttgggctatttgagcaacgacgaaggcgttaatacgtttgtgtctgttggagtgtccaccaattggcttgagccgcacggagagcatccgtacacgctgcactttgaccaagtactgcttggaaagtgacagcaccgtctgggccaatccgtccttttcacaggctcgccttctgttgcccaccaattattatttaaaagcgtgggaaaatgttcgcgcaatgcttcacgcaaatttggtctcctcgctgaaggcttataccaaatttgcgggtgccaatgtgacaaatgagcaaatcgacgcggacgcgagggaagtgatggacatggagctgaccatcgccacaaatttgctgaaagcaccggacgaaagacgcaaattcgccccccaaagcaacagttatcccaagggggggggaagtggccaatgggcaaaaaagaaacaattctaatgcccgttgaagcgtacacattcgagaaagcggacaaagagatgggcgagtatttggactttggactgttcgccttttgggctttgaaagtgccggagggcgtcgacccggcgcacattgagcctttttacatccacgagcccaaagtgatcaaaagcacaatgcaatttttggacacggcaagcattgatcactttttgtgaattatccattgttccatagatttccccgcgcactttgtacaattatttgtacatccgtttgctgtccgctaacctcaattatttgcccgtgtcccatcgacttggcaaaatcccgggccttctcagtgcccgtgggattggaattcccactctcgacgacggtggcattatcgaaaacccgtggccatatgaccaggatggcatcaattttggtggccccgaggggcgaaatcgcgcaatgtgtgcgtcgattaatgcccaatattttacgtatgcaaacgcacggatatttttggatgcgcagttacccgagaaggaacagcgaacgaagctgagggaaaatttgcggacgatggtggcgggggtggtcgactcgtttagggtaaatggacaaaagacggaaaaaagcaacaaaagaatgaatagagccaaatgatggcctaattaagccaaatgatggttaatcgtttctctagggaatggtggcacagttggattggatgagcagcgaggcaaaaagggcgtctttcctgaaaatggacaatttggtgaccaacttggcatggcccgacttcgtcgaagacgacgccgcactttcggaattttattcgctgttggcattcagagaagaggacacattcacgcaaatggtgaaatagcgagttaagcaatacaaaagttgcgaaatgacttcagaaagacaaactgcgcgacttttggacgaattcgcaggccgaaaggcttttctttgccaacgacaccgaccgattggactttggcattccgtccattgtcaatgcgtggtattcggtacgtttttaaccccctctcctttctccgatcagggctctgtttaagtcttcgcgcaattcgatcactttccccctgggcattctctccaagcccttctacgacccaaactttcccgcctccgtcaattacggcgccctcggcgtcatcgctggccatgagctgtcccatggctttggtttgctctttttttgtccgtccgttttccgatgctcccatcaattacaaaatagcttctgctgatcctttcattccatctttcatgctcatttctcatcagatgacgaaggtatccaatgggatggcacgggaactctccgcggatggatggacgccgcttcggaggcaaatttcgagcagatggcccaatgcgttgtggatgaatatgcccagttcgagcctttgtccggcatgcacatcgacgggacgatgacccaaggcgaaaatattgccgacaatggaggtcatcggtgggtaaaaacgagcaaatttcgcaaaattttcccgtttta

SEQ ID NO: 11741 - DNA, 3022 bp, Heterodera glycines
  unsure (1)..(3022): unsure at all n locations
caagaaattcannttttttgaaaaaattttaaatgaaccattgagtggattagaagatttttttgtaccaaaaaagttgctttgcggaaattttgttaattcaaaaaagacaatcggaatacattttttgtataataatagttattttggggcatccaataacttttaaattgttttttaaatttattttcaatagatgttttgctgtccttgccatcgtctcctcagcgcattaacatccttttgacggggcaacagcaacgctcctctccaagtcggccaggcactccttcgcctgcgcatactttggtggccgcgtcttcgccaaccccattttcaagccaacaacaagcggcggatgaccccacattaatggtgcatctccattttgcccccccacccccccccccccctcttcgaaattattttttgtaaaaaatattttcccaggattatgatgccattgatgcgttttggcgccttgacattgagcaggagaagagcggtgcattgcatgaacactttcactatgagcagccatcatcatatgtgcagcaacaacaacagccaaaccaacaaccatcggcagcggttgttgaaccagcaacaacatgggccgaccacaaccaccaatatgaacgcgacgtgcaccttttgaccgagaaaagtctgctctccgttccacggttggcgccgccgacaattcgcagcaacaaaaatgagaccatcgagcatgaaggtgattggttgaacgatttactgcttgaggatgatgaaacggatgtcaccgcatcgggttggaccgaacgctggtggaagacggttgaggatttttccgccgtctctgttgaacaggatgaggccgggcaacgacaacaaaaggggctcaaacgatccaaccttcagcttgatcaatgtacgtttgagtcctctcgaggaatgatttaaaaaaaggaatcgagtttagatggacaacatcaattctcgaacattaggccaaagaatgagccgccagaaaattttgttgacgaggcagaacatcgtgaaccattttaccaagatgaagtgccacagcagtcccctttctcaccggtggacagtctgatgaagaacacgggagaagaaggtggggtagctattttgaaactttttccaaatttgtcatggttttttaattaagcccatgacaatctgctggagtttgactgttcatcatcaatgttctccaactttgattcgtcgcctttttgtcatcaattcgagagcaacgacgattttttggactatgatgaggaagaggtgaagacgggggacgaaaacagtgcaactgaaggtcatttctggcaacgaaaaatgcgtataaatgttcattaatatctttttttttagcaattttacgtgacatgacagcaacaattcctctgatccaaaatttggatttttacagcaattcagagtgggaaaagcggaacccggatgttttggaaaatcgtaaatttcgatttaaaaatgtgccaatttttattgtattacttactgcagttccttgtacttcaaatacctgcactgattttggtacatccacttcttcgtcatcgacccaccatgaccataatcaacaaatttgttgttcatcatcgtccttacgttgctcttcaacatccagcgggtaggcacttgaattgcaaggaatctcattcaacccatgatattacgataaaagacgacactttgtttttttacagttttggctcattcatcgatgacttggatgacttgccgttaagcccggcaaatagttcatgcactttgttggcctgcgacgacgaatacaaaaataataccgatgctgatgaccatctgaattttgccgacaaagcatcatcatccgctgcaagggatgagacggcttccacaacttcgactgtttcacattcgtacagaatggaaaaattagtgccaatgccatcatcgtcggcaacagcggcgagcagttcaaaacgaagacgaaaaatggtgcacagcaacagtcaacggcagcagaaaaagaaacagaatttgacgaagcaacaaatgtcaaagatcaacaagaaggatacgaaatcttccaagttggactacgagttggagttgaagagacgccaagaggaggaagaagaactaattgccatcaggtattaaaaatggtgtaaattttttgaaaaaaataaatcgttttcaacaaatcaatttttttttcttttttagttccatttctggccccaccaccagcagtcaccagcatcaacaatttgattttacgaaagtcaaaggcaaacgtggacgtaaatccaaggacaattgtaagtcaaaatttcaatttattacctttgaattagacataaaatatgatttttgaattagctcttctcaacgagcacgagctgccttactccgcggaatggttgactgcaatgccctacagtgtgtactccgaactgatgaatgactttcggttgagcgcgcagcaaaaagcactgatcaaaaaaatccggcgaagaggtggaatatgttttttttaaaattttacgcgggaagaggagccgcgggggggggggggtttgcctcccgctggttacggacctgacctgaaaagacacaaatctgattatgcagcacaatttttgtctcgtctaacttgttttgctccaaccaacacaggtcgtaataaacttgctgcacaaaaatgccgcgagagacgggttaaccagaagcaggagtgggagagcgagggatggtccgtcgaagcggacgaggatgaaatattcttcatgaaagaggaggacgatgacgatgaactcggagaaggcattcacacatttgacgacgttagcacacaacaaacggcagcagaagataagcatttacactaccatccaaactattacgcattttgcaacaattaaatgtttaacttttttacgacagttgctggaccctgcaaagatgtcgctttatccgacatcgtcacaaattgatgatg

SEQ ID NO: 11742 - DNA, 2756 bp, Heterodera glycines
  unsure (1)..(2756): unsure at all n locations
tttggaacaaaaaaaaaaatattaaaaaataatntggagaatgttcaagatcctgtccaaattccgaaaaagtgttctttgttgccattttgcgtaatatatatttgcttcattttgtatgcattaccatctctccgcttattcaatatttttgtgttatgtaaacatgaacccggtattaaatgaatggtgtctagagacaatgggtggtcttgaataataatcactttcccattattcgaaagaaaaaaaaataacaacaaaatcattttacttttttcccctgttgacgtagcaaatatgccctcagcgatttctgtcggtctcggaaggatcgctggcggtttcgtccccgcactttttggcggatcatttggaccggtttccgcttggctaactcgcggttggtacggccaacatgcggtccctttgggaaaaagatttgataggtatgtcctctctgtcgaaaaacattgagcctaccctattcggccttccatatgcctctttgccgggccgcccctctttcacttggtccatccgttcctcctttgtttgacgccgaaacttgccataaaaatgttcaatgtcgctaagccggggaaggccaccatgtccatgctgctcattgtcgcttctttgaacaaaataaaattgtggcaccgccaacttctccccccgcccattccaactcattctcatcagccgaagattcttcgccattggacgacgcttttcccgcttcagacaattcgtcatcatcattatccacgtccatttcattgttttcgtcagtagctttttcaggcctccctcggtctttgtgatgcaacagtttcggattgatggtacggaacagcatgatcagtgcatgggcagccaacgacacatttttgttgtgcgtttttttgtactatacgcaaaaaaaagaaattgtaataaataaagatagaagatttactgggaaaactttaccgccgctaaatcccgaaccatctcttcagtggctgcctcagggcaacccttgtaaatttcacgaattgtattcaggccgacagtgattgcctccggtgtgttgcggtcggaaacaaaattttgtgcaaccactcgaatctgaaagtttttgaaaacccattaaaaaaattaaagtaaaaaataagactaatcttccggtttttagataaaagataaaacccattttagttgacaaattgaatttttttagcctgcaaaattccaaaaaaatatcgttatgttcagaattatattaaattcattcaattcggacaactatgaagagttctaccaaaaagaaaattgggttgtcgctcagttgtcttccctttccggcacccttttcaccaaaatcacacttgaaggaaagatgttaccaattgttcaatgacatccgacggcaccaatgggtggcacgcctgcgcggcgtatagcaaaatgcgtgtcacctccttctgttttggtcgtatatagcgatgcaaatatgagtaaaaaccaagcgtttgtagttgatgaacaccaatcactcgagcacacagtgcaatttggagaagtctaaaaactggtaaaaaaatgaaaaaattgagtgccgttagcaggggtcgaacctgcgaccttgggcttattagacccacgctctaaccgactgagctataacggcgatgcaagaaaatttttttaattgttttaaattaaaattattcgatgtaattatctggagacattatattcaacctaatcgcgtatttctcgttccgctgacgaccctccagccgtcgtgaagagacggtccacaaaacttctgagggtcgtagatggcattgatggcttccatgttgcattgcttcatgtctttgggcagtcgcttctcttccttcttgcgctgtgcagtgacaatgaccttcttggcctggtccaaatttttcttgcgtttacgcgtttttttggcatgacgaaacttttgcagcacctctttaagggatctaaaatggtaaaatgaagataaaatacgtttaaaaatgtttaaatgattagaaatgacttggtctctttacggctgccttcctctcctccttccatttcatcgtcagacgaattttgtccatcctcatttggcttttcgtcgcgttgagagccgaggaaaaagcgcattgcacttatcttaaacaataaataaagaacaaggagagtggataaaatgaaatatcctcgccataaattttaattaattagccaaaatgatttcaatacctgaattcgttgcacacgatggaaaacacattcggctaatgcatttgcgatgtttgcatttcgccagtaatggcgccgatacgcgcagataagtgccaactgagaaactcgagcacagacctgaaaaaggggtatcctttttgggaacaggacaaaatcacgccgccgaaatcacgccggccgaaatcacgccgggacaaaatcacgccgctagaaatttttaaaaaattttcaaacctagaattttctctaaaaaaattcttagaacattttttataagaaaacttaaagaaaaaaaaatttgaaaaattttcagcgatttttttttgaattttatgataaattacggttttttgaaattttccaaaaaaattttttttttctttgaaattttcttataaaaaaattttctaagaattttttctagaaaaaattctaggttcgaaaaattttttgaaatttctagcggcgtgatttcggtggcgtgattt

SEQ ID NO: 11743 - DNA, 3727 bp, Heterodera glycines
acaattataattattttgtccatttccaaactaaatttttgtctttttattataatttatgaatttttttagtgacccgcgaacttatgcaaatttaagataattatttgattataatgtcaccattttatgaacagttttattaattacttcgattttgttcctgtgatttcatttaaaaaataaatactataattaaatttaatttctttcaaatgttcactatggtctgttgtacgttactaaattgtactgcaaattcgccgtgccgaaaatgaccccgtcgtggttgagtccctccttctgaaattgttttcctttcggtgtttttttatttcgggtttctacttgaaatgccgcattctctccgtcaatggcactggcaattcgtccgcacgtttggtagccgactttttcgtctcccgtcgaataaattgtgtaaatgaattcgccttcgtatcgcttccttaatttgggcatttcccgcctaatttgccaatgtgaaagctcagactttgaattgatgtccttcaaaaaacgcgagccgcaggacattccgttgagcaaattgcaactgccaaagggcaacacacagagaaaggagccccaattggcacccgccacgccgacgaaagcgcgcaccaaattggtcaatgggggaccaacgtccttaaataaggacggcggaatgggaggccaacgcacacaaaggcacggcacagtttgtgctgttttgccctccctcaccgtacttcgtttgtgtcaacgcacattccgcccaaaatggcctaagagtggcaaaatgtcctcagtaaatgactcccccccccccgctttttataccttccgagcaaccggcgaacccatggaaaaggcgacgatgttcactttgttgtcggtgtacgcggacactgccacaataatcattcgaatctattgaggggaaagtgttcacagtgtgccattggttagcaataaaaggctttctggcatgccaattatgccctacggaaatgagcgattgatttctatttggcactcaaaattggagggtttcagctgggcgtcaaacaccgccattttgaaaatggatatttttcccattggcaatgtgccctctctgtcaactgaccactttcacgtagtggcacgacatcgtaacaaatgccttaacatttggtgaaccattgaacaacaatttccacacggtccctcacaacgtttgttcgtcccgagtcaccgtatgtggtaccgtacacttcttcgtcaccgtacccgttgttctgtgtgcagcaattttttcatgatacatttgcatcacttgccaggaaaaagtgctgtattgagccgaaagtgcccgcattatttgtgatgccgtggacgaaaatcaccggccgacgccttcagccgaatgaatggcattgttttgaattcactttctttcaattaggactaacttcgtctgttgtcccttttgatgagtgccgcccccgaaacttccgccgccgccaacgtcttctcgggaaagttctttgtccaccgcgtcaccgtaacgttcacggagaaattgccgaaaggtcacggaaaaagtggcactaattgaagacggaaaaaggagcaaaaaacagagcgaaagaggaaaaagcaaagggaaggaaagaagccgaaggaaaagcatctgatgatggcatgggaaggagaaaaattgggggaaaagggacaaaagaaaaactgggaaaattgcgattgcatttataaatatgggaaaccgccgtgttaatgatgtcgtcaatggttgtgtccccgcagagaaattggaccgattggagcagcaaaagcattcatttgggcttttccccgccggtgaaaggatattcggggagagaaagggaagaaaacccgttgtttagaaaggaagacgggttgaagacaaagggaagcgaaagggacgtggcccaaacgattggctaatggaagtgatttttcctatctaaggggcgccgcttacccccgccgcggctaatgtttaattttaattagcaaattctacggttgatttgaaattccatccgctgttcttttttttgtttacaattgacaaaatgtcattcaaatttgaacattttaaaccatttgaatagggcaagcttttcagctggtgattacttatgctgttcttcgacttcgttcttcgtccttttgttcagtcctcgtcgctatcgctcgacttgaaaaagcggcgcactttcacataattcttaaaaggcaattattattaaattattatggccaaatccacagcctcacccacccctctcattttccaattgctaatcactttgcccccccccctcgtcggtcagttgttcctctaaaatgccatttcttttcaaatcctaatttccagctaaagctgccgtgccctccccccccccgcccgctttgccctcgttttgccttcggcgttgtggtcattcgatgtgcgatgcccttagggatgatgagtaagtcgccatactcactgacacatttcaaattagtcaattgaccgattgaatttgctaatgctcaccaaaagatgcgtatccaaactccgtcctaaatttgggcattcaataaagctaaatccatgtgtaaatcactttggcttcgacgtcgtaatacgccgacccttccaaaaccatccgtgcttgatcctcgtcactttccgtctcttcgaaaagttctgcgatcttcaaacagagtgccatttgaatgcttttcttcccatttccaaaatgggctttgccttttccttaaaatcgttcgttgtctgtgcgtccaatgtgtacgtgtcctccttggtgaagttgcgctccaatttcataattgcaattcgttttgataatgccacttggtcttccaaatccaactgacgaaggcaaaattaaaggcacagatttaagacccatctgatcagtgatcgaacaatcaaaaaaaaaaaaccgatcaacagacggacaacaattaccttataatagagggcgcccgtccgtttggtcaattcgtccggattcaccaattttggtgggaaacagtggtgcggactgagcggggaaagggaggggggcgggggcaccgattgattgatggcaccgaatgatcagaaaaagacggcacttacagacgcggatcaccacacgggtaggtctccatgcaccacatttggaccattgttaggaagaaaaagttgtcgaaaggcagaggaaatttaatctcaatgaaaggaaatttggcgaagttttgcggtccgtcccacgccctcaggaatttttagaaaagaacgcaccccatctgatattcccatttttctgtttcacaactggccaacggcgactgtgctcattgacacgtagttgtccaattaaggtacttggactttccacagtaaaatgtggtgccaattttggaactgtcccgcctcacggcggggcttaaaagcatttgtagcgcaataaaaaagattattgttttgaatttttcacaatttatttaaaaaagccaaaaaatccggatcccattttaaaaacgaaaaatagtgcacaaaaagaagccgcctcacggcggggcttaaaagcattgtacatcataattaaaagcgaaaataatttttcgtatattttttcacaatttatttcaaaagacaacaaaaaattgatacaatgttgaaacgaaatagtgcacaaaa

SEQ ID NO: 11744 - DNA, 903 bp, Heterodera glycines
ctcgcccaccatctcctacaaaaaatctcacgcaactctcacaaccattgaactcctctacctccttgcgtgtcaaaccggttcaattcgtcccctccccctcaattaacccattaattttgtcgtccaaaatttaattcccctccttctctttccttactttcttccttttcgtcttatacatatttgccggtatttttgatggtgttctctccgcgcgctctctctctctctctctccctctctctctctcactttcctttctctctgtctctctctccctctctctctctcactttcctttctctctgtctctctctccctctctctctctcactttcctttctctctgtctctctctttctcctctctctctcactttcctttctctctgtctctgtctctctctttctcctctctctctcactttcctttctctctgtctctctctctctttctcctctctctctttctcctctctctctctctttctctctgtctctctctttctcctctctctctctctttctctctgtctctctctttctctctctctctctctctccgttctccccttctctaattaaacaatattcaacaaatcacattatttaccgtttgctattatcacaataaacagcaattgcggagtaagtgctttaggctaatattttctacgaaaacgaaaattagaataaaagtttgaatttaaactttccaaattttactggtcacacaattaaatgttattgtgtgttaaaatatgtaaaagtgagaaattgtaaaaacgggtgttttaggatttttttccatgcaaaaaatgtcattgcaatcagatcactcttctgatcagttcctttttctgaaggtatcgtctgctgatcagtatcccggcgctgtcct

SEQ ID NO: 11745 - DNA, 4800 bp, Heterodera glycines
gtatggggtgaattccattctagccaactccgtttcagcaaagttcataaattgttttcttttttgataaaactcagcaaactcgaaagctttaaatgtttagaagattcgacattctcaataatacaaagtttttgatcagacggagttggtccgttccgttttatcggtaccaccggaacccaaaaacttatacttttttcatgaaaattggcttttttgggtaaaatctgttactaaatcgcacaaaaaattcaattttttaccttaaaaacaaaaatgtggacacttttagacaagatctgttaacaaatcacactcaaatttccaaaaatttccccggatccttccgcaaaagttataaagaaaaagcgcaccgcaaaaaagcggttttggaaagcaaaaaagttcgtaaaattcggtgttggaatcccatcgaaaaattggccgctgacccctccccccccccccgctcaagactccttcgcaaaaattttggttgacctaccccctttttaatgtgttttgattaagaaaaataaatttgaatcaatttaatttaaatttctcggttctcgattcccgagtcgagaaatttctcggttttttgggtctcggttctcgtatcgtttcctggggtcatttatcggtatcgtttctcggttcccggtaaaaaatcacttctcgcacagccctacatgttggacctggacctggatttactggacaaaaatccaggaaaatccaggtccagaaaaaatccaggctcctcgagacctggatccaggactggacctggattttttataatttgttttaaaaagcaaaccaatgtttgaaaaaatcaattaattgcttaggaacgtcttctaatttataataataatgtttttataaccaatttatcatttttgaaaacacgaaaaataacagacatattgtatctcatattgcggtaaagtagggttaagccccgagccctcggggggcaaaaagtcgggggccggggacctcggggggcgacaaatcgggggccggggcggggaggagctcaattgtcgggggtcggggaccccgatcggggaatgaccaaattttattttaacccaaaaaaacaaatttttctttttaaatgctcgtaaatgttcatttttttcactttaatcatatgatttcgttagcgccaataagagtgagtccaagctggcctttaatccagggcttccatttgttcttatttataagaatgttccgattttggggtagcgacgaaaattattctgatttcttaaatagacttaaaaaatgtcactattttatcaaaaaatttaaagttctgacgcaaatttttttgatcttttgatccctaatgtactgaaatttacaagtttgcattttcctccccaaaaattgttaaaattgataatgtgagactaaaaatataaaatttgatacatttttgatcgaataaattgtaaaagtaactgatttgaaaaaatgttgtaaaattttcttatttttgagcctaaataattgtggaagccctggtttaaaatacttggaaagggggagggggtttaaccgaaatttttgcgacccttctgaacatcgaatttgaccaccattttttgcggcactcattttcaaaaaaaaaactttgggcaacagcagaacggggatgggcggcgatgctattaggagccgcgaggaaattttttttttgaaaatttgcaatttgttaacagatttttcctaaaaatacctatttttgcaattttgggacaattttttgcaaaaaaattggacttttggggggccggcggtgccgataggcgccgccgaaaagtttttcggaatttttaattaattttattaagaaatttggtcaaaatttcataaatttcaacctttccccccttcgttgttgaattaactttttaaatttttacaatgctcggagtccccaattccccgaattagtgtcggggagtcggggggttataaatgccgggggtcggggcggggaataggcccaaaaatgtcggggatcggggtcggggagctcggggtcagggctgaaccctactttcaagcgaacagtgaacgcgtttttgaattcgtttttcaaagcatttggcctctgcttaaagacaacatttgtgggctgcaaattagacttttcggcaattcgtccattctctccgattgtccgtctcttcgtttcgtcttttcctgtgacaatgtttttcccgaattttcggaagatgaaatgccaatgaatcagatgaacaagcaacggccaaatggcctttttcgtctcgtccggacgatgtgccaaaagtgctgaaatgctatttcggtttttatgaggatgaatggccatcacaattagaaggactgaagacggtgatcaattatttgctgatcgttgtccaatttcatgagatgaaaacaaatggacaaaatgggagaaggaagcgattgaatggcggcacttcactaaacaatggaacaaaattaccattgaaatttatgaagatgaactcaaatcacctaattaatgtaattatttgtttctgatttttctttaaaatccgtccattttcatttttgttgaatgtataataaatttgttaagtaatcatagtttattcaaatagtgcacaaaaagtttgtacaaaagtaagacctaaaaacggtaaatttaaattccccccaccttttttcaaattttagtcatttcgggatcgctgatcacgaattcggcttccatttcggccaattccgaacccgggactaacaagaaaacaaaatgaaagcgtcaatcccacaatgaaagaccatttaagctgtttttagaaggaaaacaaaaaaatgcgaaatttgggcgttggaccttttgttcgaattagggtccggaaggagttcgaaatggatgtacacctaatatttgtgaccagagaacccgaaaagcctataaaacatattttatggatttataaataatttttttttcgaattaccctgaaacctagggtacttttcccgggggaccggtaaattggacaccggaaaattggacaccagaaaattggacaccaagcggaaaaatggacaccgccggaattttggacactaaaggaaaattggacaccagaaaattggacaccaagcggaaaaatggacaccgccggaattttggacactaaaggaaaattggacaccggaaattggacactaagatttccttttttaaaaaaatcaagaattaggtgaaaataaatttgagtagaataaatgggttaaatgagggatgattgatcaatgtgccaaacaatgaaccaaaaatgggtgacgattgatcaatgtgccacaaaatgaaccaaaaatgggtgacgattgatcaatgtgccacaaaatgaaccaaaaatgggtgacgattgatcaatgggccaaaaaatgaaccaaaaatgggtgacgattgatcaatgggccaaaaaatgaaccaaaaatgggtgacgattgatcaataggccaaaaaatccaccagaaatgagtaataaaacttatttctttatgaatgatattatgtttttcttctcctgaagttacaaaaataataacaaattcatttccatattatttacgcttataaacaacatatggcagattaagataaagattggaagcagaggggaagaggaggggatggaagaagaggggaagaggataggacggaagaagaggaggggattgggaggggggagtcaatgaatgctataatttagcaaatggaggcgggggggaagggaaatgtgtacgacgatcaaagagtgtgaaactgtccaatcacttaccctcccctttccccccgatacaattttgggcggaggggaggggaggcaaaattgtgacgataattaccccagcgagtgaaaaatggtaaggaggggggggggggtggcagaggacaagtaaattttgggattgtgaggaggggtttttttgtgccgtaattactataggaagggcacatattttttaaagtttttgatttttggacaggagggggggcaatattttttaccgataattacctatagccaacgatgaaagtggtagggagggagagggcggaaaggaaaatttcaagattgtgggaagggattttgcgtgccagggagtgccatttgtgtaaattgtcaattctcgactgcgggatggggtgggggtggaagatttgaacaatgggagggcggaaaggaaaatttcaggattgtgggaagggattttgcgtgccaaagagtgccatttgtgtaaattgtcaattctcgactgcgggatggggtgggagtggaagatttgaacaaaatttgtgggcatgctgtaataaccattacagcacggcgtcaatattgccgtatataaagcgccaccaaatcattcactatatcactccatccagctaatctctcaacaaatcttccactccgccccccatgaacatttacatagcctcttccatttcgtaggcctaatcaaatttatttttaaaattcattaaattatttcaaattttattcccccaattaaaaatatttcatgttttaattctcaaattaattagttatttcaaattttatttcccaaatcagtagtaatatgtagtatatggacaaaaattatttttaaattttatttcccaatttaaattcctttttaaattaatttaaataatttcaaatttattttcaaaaataaattaattatattatttaaacttatttattaaaatatttt

SEQ ID NO: 11746 - DNA, 1996 bp, Heterodera glycines
aatggctggtattaccatgtgagtgggggagagaaggccaaaaaacattaaattttataaataaaattaataaattaatgtgtaaaattaaacaaattcaaaaaatttgagacggaaaatgtttttattctttttttccatggttcaatttgtgccgatttccttttttattggtcataatcaggctaccattgaatttttcagaaatcggcatttggccaacaaaaaatcaacattttgaaaaattttatgaattgaaagattttctcaaaaattcattcctccaaaaaagaattatttttgcttaattggctgaaaattatgtcactatccgtcattatttcagactttttgtcactcttttggcattgttcctcactgttttagttaactatttcgagatttttcgtaacttaaagtagcattcccaacagggctgggcaactgagtttttaaattacggaaaccgttaatccgtaataacggcaattttctcaattacggaattccgtaatgacgggtgaaaaatgccgtaatttcccgtaattcgtaattacaggatccaaaaaggccgtaattttcgtaattacgcccagccctgatccctaatcatcattgaccccttgaaaagcaacaaaatgatgataaatcagcagagttgggagccatggtcataattaatgaattaatgttgaaaacataggacggaaaagtgacggattatggcaaaacgcggacgctgaccggcgcagaacgtgccaaactgaagaagttcatcgacgaaatgcagcagatgagcgtaaagttcgcgcaggaaatgcaacggatgttcagcgcgacttttccgttcggtccgcccgcggcgccgccgccgcaatttcatttaccaccgcaagtgcgtcgcataaatcagcagaggaaaagcaattggaaagagtgccgtttgttagcctaagcttaagaatacgaagtgccgatcattctcggcacggactctgaaaagatttctcacagatggtcctcccattatgcttaacacaacccaaaattctcctcttcttttaatcatttgtgggttgggattgacacattggccattgcactgaaaacatggaattaaaagccaaaaataaagtttaactcttctgcctgtctcctccttcgattaagaaaaacacggatatttttcttattttttcatagatttggcacccaaaaagtctatcaaatgggaatttttaaaccggcttaatccggcgctaaaagtcgaatgatatcaactgagatttggattacattgtttttttatataaaaatcattttggttaattaaatactggcaaaattatgccaactctcttttgtaaaaattttttaggccgttttaagctcttttcgtttaggtgccgtgcttctgctcatcgtcgtcgtgttcaaagtttagagaaaaggcaaatcggatgaaataaatgatggaggaaaatgaatgtgatttggcataataaaactggctactgtagatgggctttaccatatagccacatgtcctaatgatactgtagcttttatttattaggaaggatttatgtgtagaaaaaatgaataaaaaacaaacagaatatttattcaattttggcactttcaaaacttgttcaaattttgtgtcgtttctacgcagccaacaacacaaaagtacgtatgtacatattatgacttatgaaattactcaaaaaccatcaaattaaaaaaaattttcatataattttgctgaaaaacattcaaaatttttaattctatataacattcgatagccctaagttttttctattatcatgtaaaatttcaaaaagattcgttaagtttcaagaaagttatgaccaaaaatattcaaaaaacttttctcttttcttgtgttcgtctgctgaatattttgaatattaactaattgttttcaaattttaaaggctaatatatgtatatctataggatctatcgg

SEQ ID NO: 11747 - DNA, 2869 bp, Heterodera glycines
cctccaaatctttctctaaattttaattttaaaacgaaaaattcaaattttatttaataataattaatttgcatttcaatttattttaaaaaatttttcctcccattttatttgtggccgaccaaatttttgcgacatttcttcatctttttcttccatttttatctttttcctgttattttcctgaatattttcacttttcgtctcttttttgacaaaatttccaatgtttttgccaattattttttgttcaatttttaattttgcttcttccccatattcaatgggattcttttcctacatttttggttcaacattcattttttttacttctaatttcggccaattttgagtgccgttccctttttccaaaagtccgccatttttccaaagatcaccaaaaagatcctcagaaacggcacttactgttagattgaaaagaacagaaaaacaaaaacaataaaatatgtagacaattgacgacatatttggaataaaataaacgaggcattaagaagacaattaacacaaacaattaaattctttaaaaatttaaaagtattttaatttcctaaagctatgatttattttatgcacaaaaatggcaaatagcgcaaagaaaataacaataaaagtaaaaatttatatgaattcaatccatttaatcttcttttcgttagtgagaatagatcctttttctcaaatttaatcagttaaaatattacatttttgacaaaataaatttgtaaatgaatgacaaaggctagcatttgtaattttgcaaatttggattaactgaaaacgtcattattttacagagcactggaaagaatggaaatccgaataattgaaaatttgaacaaaatcgttgaattataaaattttgtccaaaaatttggacctcagaaaattatcgatttttctgataccagctgaaaatgttggtaccggtgccggtttttgcagtgtcggtcagtaccggccggtaccgatgaaagcgaaatttaccgatacctttctactctcatttaaataattgaaattttaaaattattaaggggattcatttttctaaattttctatttttcatttaattttctcctgacttactaaaagcacggaaaaagaagcaaatttgtataatttttaaaccactaaaatattcatttattcattcattaatttttgattatatcacaatttattcaaatatttgttatgcaattatttcttatttcaatgtaatcatttccaaataaacctttatacgaaatgtgaaagaaaatcccataaaatattttgaaagatatcaaataaattttgggaaatataaaatgagaaaatttccacaaaaataaatcacatataaaaacacaaacattctttaaaaaatgcgtttttattattcttgcatttttgtggttgttcttttgatggcattcgtcgacaaaggaattttggaaaaagttttaaattaaagaataaatattaaaaaataaaacaaaaaacattatatttgcgataaataaattttacaaataaaaattcaatttaaatggtgaataaaagaaatttgctgttcagagtctcaatgaaagcgatgcttcaaacgacacaaagacagaacaaaatgcgcaagaccgtggtaagaacaaatgaataaataaaaacatagttgataatttaaaaatatttaatttttatattaaaatttcttttttattttcagcagttttttcgctacaaaaaaaatctgaggacgaatttaccattagagctgccttttcctgaaaatgacgtgacgaaaaacgaaagatgaacgatcgaacgactgatggatcacagtgatcaacacattcttaagaaaattattggtgactttgaggaaactgataaaaatgttaataaaaaacgcaaaaatattttccaagtcctgtaaatcagattctgaaatttaaaaaaatgttttgaattttcaaaaagagtaatttaccctttaagaacaaaaaaaaacaaaattgagaatttgccgaactttgtcccttgttttttaaatttttatttacttattttcaacgcatttactaattgatgataacaattgtcgtcattacgggatgaatattatgcaatttgttgggacagtgtcacttcaatggtccctcttttcgcttcattttgttgccaatgaattgaaaatggacgggaatacattgatgaattggaagaaagcaatgaaaatttttaaaaaataaacaatcataaattggggaggagctgataataacatttttcaatgtaaaatttaatgcaaataaaataaatgtagcaaattaatggacaattatttaactcgccttaattcaaaatgttattatttttaattgtctttaattaacccaatttatttatatgatttcacaagaaatcaacaattactttatagatttattaataaggatttaaattgaaaatttttatgtttttggataccaaaagtttccggtgattggtgaatgttatttttagttttgctgcttgacttattgccccaaaaaaagatacccacgaacaaatttatgatcagcaagtgactaaaatattatgatcaaaatattaaaaaaatataaagaaacatacccataattaaaaatgctaattaaaattaattaaaaattgtattgaaaagagaattaaatgttatggaaaaaaattaatattatgttttatgtgtataattcgaatatgcatcaaaaaacaaattttcgtgattttttgattatttttgctacccactaataatcgttaaattatttggtcttacatcttttcgcattgctaattttcctttttaatttccaaaatttg

SEQ ID NO: 11748 - DNA, 2616 bp, Heterodera glycines
  unsure (1)..(2616): unsure at all n locations
atttagtgcatgtgaatcgattttggtcaatacctatgaataatggtgaaaaattaattttcgacttttgttcgaattcgggttgggggttagaaataggtcgaaatggatgtcatattcgtgatcagcgcccccgaaaacccccgagtactattcagaatcacataaaaccctttatttattttatttttttagggaccaataaagtacatgattaccaaaggagcggtccggtggtgccggtaagcgccgccgggaaaatttttgaaaattacttctgatttgtgaacagatttgattaagaaaatgaccaaattttgtgattttagccaatatatttacagaatttctaccaaaaatgttcaaattttcaagaaattcgggttaaattttcaaaatttcttatgggaatattgtaaaaaattaagaaatttcttgtaaaattctatgaaagtaagaatagtttttttattttatttaaaaacttttaagctttatttacttagtaataaaatggcaattttcaacaaaaatttaaataattttttgtcattttacaccccttaatttgagattttttagtgtctatttttgggcttttttagcctaaaagtttataaagttcaaaattgcacagaacaaggaaagagagtacctatttatttactgacgaatattatacatactgtacatataaaaacatacattccattgtacaaatacatacgcataatcgaacaatgggatacaaatatgatcacaacaaatgacatcgtatggtgatcacaacacatggcatcttacagcggttgacgacgctcactgcgcggtatggtgcggacgaagttgtagcggcacacggggcaattggtatggtagcggagccagcggtacaagcagcgatgatggaacggatgggtgcagccgagcgtcgtccgcgtgatgtcgcccacgtttctcatgcagatggcacatcgctcgccccgctgcgcttttcttgtctgaaattaagaaaattccattttttggggagggggtttgttcaacttacgtatcctgcgcgtccaactgccgccctcctccgcttggcatcgcgcagcttcgccttggcactccgggccctcgccgcgtttgctggagtggtcatgctnngaaaaattgaaattaaaacaaataagtaaaacaaatgactaaaatctaccgggttgtgatatgtgtgacgttatgggcgacgcttttgagaatggaacagtcggagaagaagaaattgagattgactgaggaattccttttgttattttctatatttaaatgaaaatggtagcaacaaaaagttttaagtttagaaattgtaactcaaaaatgaaaattgagtataaataatcggatccatcgatcccacggtgagtcaccgtcggtgtcgttttaaaaaaagttaaaacgaatcgccaatctaatgtcagattcgagattagcgtccttgaaaactccaagtttcctgttttccgaaaataacaaaagaaaacatgggagccccccccccccattttgccagatttaaattctaaattttgtcagaaaggataccctttaaataaaatatcaagaaatggaaatgctgatatgaacaacttaaaaaattaaatagattttaggatgcaagtatcttaagaattgaaatgctttcattgtacactatgctcgagttttccctgttggtgctgaacggcattgcaattataaaccgtgaacgagttttgaacaaggttaacaaacatattgctgttttttatccaatcgttttccccttatttgaagtatttgaagaatcggcagcacagtttcggagcagaaagtgagcaatcggttgtgtttaggctcgtcaatttaattcttgcagttcaaaccgtccttagaggttccgtttaattaacttttttgcttttttattaaaagtttgacccttttagtgcctctcatcgtcatgaatattattgttatcatcataaagctgttgtttggatgaaaatatgccttggccataatcacatatttatttccagtttatttgttccttctgttgtcattaaattttttcattttgcttatctgactgataaatctcttccgaattttcaacataccaacgaagtatgttttattcatttaaaccagggctgccatccgtccttgaatggcaaggacgtccttgaaattgggtcctctttcttgaaaataaaaaatgtcctgtatgcaagaacgtccttgaaaatgagcatttggaaaagtttaaaaaaatcaaagaaatttgagaaatctttgtaattttcaacaatattttgattaaattatggcattatgtcatttaaaaatggaatttttgaaattttatggcattaagtcactagtcactatttttcttaaaaaattagccaaaaatcgcaaattttggtcatttttggacaaaaatctgtaaacaactcgcattaaaaattacaaatttttccggaccccctatcctcaaaaaaattttttaaaaagcgcgccgtaaaaaaacccattttataaacaaaaaaagtcgtcgcatggcttaaaatcgcaaaaatagactctaga

SEQ ID NO: 11749 - DNA, 2003 bp, Heterodera glycines
ccaaaaatttgcaattatctaggcacatatgccatagtttaagaggcgcaaaaatccgaaaatgtccttaggtatagacaaatctgcttggcaagctctattaatttgcaaaacatggtacaaaaaatatgccaaaaaatcagttgagaattttccgctgtttatattcgaatcttcgggaaggattttcagaattcagaagcacttactaattaatccctccccgtttgcggatgggttgaaaaaaaggcagctttatttttgctatttcagtaaaatcccattaaaaatttcaattcccatcacaaattgtcactaatgatgaaaattttaggtttttacctattttttcctgagctccctatggtctgaatgcacgaaaaacatgtttttttggggcggggggggggggttgttaggttacttttcgagttatttgcacctatttttagttttaatttttagaacttaaaaatcctaaaaaaaattaaaaacctattttaactatttggtattttgccaaaattattaacaaaaatgcaataaaaacgaaaaatataccccctaagaatcgaacccaaaaatttcaggaaaatacaccctacaccccaaagaaaagaaaattttccccaaaaattcgtctcaagaattttaattatttattttcttgacaaacgtttgactttaaaaaattatgtaactcaatattgatttggcttaattttgttgattttttgataaaattttacaattttacacccctaatttagaatagaacttactgacgcagaacaacaggtgaaaggcacttcgaccagcaacgatttgaacgttgcttcgagcgatgatgaataaaattgtgagtctgttcaattcaaaggtggcaaaacaaactgaggagcgctttgtcttttgcacaaggtgttaatagtttttttgtttcattattttcaggcttccgattaatcaaaaacagaaaatatggtagctgattcaggtgcgaacaacgcaattgaccagctacagccaaattgggcgacaacaatttgatgaccggcattttgggcccaaaagaacatcaccatggttgagcttcatcgctttatgatgctgagacgaaacgaaatcagattaagcgcctgatcaaggagaagccaaaaaagaaaccatgtcaactccgcgcacaaaattcggactgacggtcttcgaattgctcggcaccatgaagcgctcgaccaaatggcgaattcgttggtggtgtcaactgttacccatacctatgttcttttctaattcagtttaattttagctgttgtcagtgctagaacagaatgtcctctacagtttccgatctcgttttggaatgtgcaccccagggctcaaatgatcacatccgtggaaataaagaaagtgatgaaggaactgatgatgccaatggaaattgaattttaccattttcaacattttatttttattttttctttggaatttaataaatatctatttgcttacatgtacttttaggttaaatttaattattattatataagaatagctaaatatgaaccaatttagaatatatatggtcaaattcgttgtcaaaatatatatattttgggttagtaggcgaaatgaatgtttttgggttagcaggcgaaatgtcagtaggcgaaatgtcggtaggcgagatgtcgagtaggcgaaatgtccgtacaccaccgagtccactcaagcttttatcagttggtagaaaaattacaaaaaccaacaaagacatccatcgtaccagaaaaagtgttttccctagttttacggtattcgaatccaacaaatacaattcgcagaactttttgacttcttttttcaaagaagttcataaattttatcggtaaaagtgtaccgggtattggattttcaaaaaaccggggtcgggtccgggtattaaaaaaaaccgggtatccgggtctgaggcctggtcgggtacacggacccggccaacccta

SEQ ID NO: 11750 - DNA, 2333 bp, Heterodera glycines
  unsure (1)..(2333): unsure at all n locations
gacgcacanttattgtgtcacacgaaagtcacaaaacacattttaatgttttatcaaaagcatgacacacattagtgtctcacacgaaagtcacagaacaaaccactaatgctttcaaattactaattcaagcacttacgcaagctgagtgccacatggtgtggctttgagctcttccagagtcgtaagcatggcaacaggctggcaccagatttgaaaaagcctaaccggtagaaaaaatgagccgtagcggcagaaaaacaacgataaattgtttagtcaccagatttttgaccaaactggtagaaaaaatgagccatcggcagaaaaacaattctctaattgtttaacaattctaaaataaaacaaaaattaaagtaatatatgaaataatgtgtatacaacaaaaataaatactttttctaaccaatacataaccataaaattttacgacaaacagactttgaatttaaaaaaataagcaatattaaacctttaaattaaacaatgaaagacaaaaacaaaaaattaaaatgatgaatggaggtgtggacgattttggcgttatatttgaacatacacaaaaaagcgaataaatgactaagaatgttttttgcaaaacaaaatgaaaaatcaaacatttccatttttcaaatcattttttaacgcaaaaaaaaacaaacattttcatttttcaaatgcttttttaacgcaaaacaaaacaaaaacattttcattttcaaatcattttttaacgcaaaataataacaaaacgccacacaaattcaaaaatccgtacatacatacagacactcaactttattatgtaggattgaatgaaattgttattttctgcttttgagcacaaaaagaaatatttgtggagcacttttgatgatttatttttcaatttaaagaagaaaaaaattttgcgtgcactcggactcgaaccaaagattcgctcaactagggcggcagcagtaacaactgcgccatttgcacgacattttgactccattccaattctttccttattgttctttttttaaaaataataattttttctttaacacctgcttaccagggtggcacggaattctcgaatttttttgaaaaattaattgccacaattttttaaattatttaaaacaaacaaaaaaataattgcataaagatttgaaaataatttcgtgcccatttttttaatggaaattaaaaaaaaacttgaaaaactaaattcaattttggttgcaaattaagacaattgaaaaaatatggactccaaatttttggaaattttttatttttcgggtcttttcggactacggtagagtataaaaaattttaaaaaagattgaaaattttggaatctggaaatttgaaagggtaacaacggtgactggaatttttccaaatattttttgtctaatttggaacccacaaattaaatttatagtggggattactcaaattcagtttagaatttaggctttaataaattcagacatttggcggttaacaaattcaattggtgaataaccttacgcatatttgaatagaaaaattaggcggaataaaaaaataaatgatggtagtgacagtaatgatgagaagcatgctctaaaatttttataaaattattatttgataaaaatgggaagcgctgagtaaaccatgaaaaagacattatgttattattttaataaagagaaagagactgaaaaatatttaatatatatttaaacataacattgattatatagaaaataaaattaataatttatcgggaataaggaaagcccagaaaaatgaatgaaaattagaattttaaaaaatcaatgtttactgcttataatgctttaaaaaaattaatgttatccagtgttttaaaaaaatcaatgctttttttcaaatttagcaatttgtatagttttttattaagcaaattttttcaaaaacccaatttttcctcattaactctgacattttcggaatgaaaaataatcaaagttcgcttttaaatgtgtaataaatccgagaccaaactgggaatcccttctgcttatcacatattcataacttttatacatttgtattttgcgcacattaattaaatactataaaagctgatcaatgctatttttggggaattatcatacgcactaaaagcgatgattactataataatttttaaatgaaataaatcttatattataattataattaaacactaacacttttaaaaaatatatttgtaatgaaaaccattttaatgaaatagaaaaatgttaccaaggaattttgccanaataataaaattgatcttttttttt

SEQ ID NO: 11751 - DNA, 2101 bp, Heterodera glycines
ttcgtcttgaagtgccgaaaattcatcgcccaaaacccgtgacttccggatctttctgattgattttttaattttttctaataacgcatcgattgacagctttttaatcccatcccacacacactaaattaagaaaagataatcatgaaatttttgattaatcaaaataaccaagttaaaattatgggcagtgcaatgcagtgattcaaaaccagcaatacgagtcgctttttgcattgcactttcgttgtcacgaacaataaggtgcactttttcagcgttcacaccataatcattaagaacttggctcagcaaaccacacattttttcgccagtatgactgccctaaatgtctgcaaaatttttaagtaaaaaccccttaaccgaaccttaattggcttccatcacgcgaaaagtcggttccatattactgccaatgtaatgaactgtgacacttaataacgaatgttttccttcgtgagaactccagccatcgattgtaagagaaatgaagtctgttttccgaatgtcctcttttacgcgagcttcacattcacatacaaattcctcaggacatcacttgtaaaatgccgacgacttctaaaattttaaagatttaaagaccatttttgttttagaccttattttgtacattggagctaaaattgacaataaatttttcaaggcttggtcttcaacaaaagagagagacaatgatgccgaacaaataagtgccattactgcgtcatcaaccctttttgtcatttctccatccgaactccattgtgcttaatcgactttgaaattttaaaatatccaaataattacaaaagcttttgacgatttttggctgtgaagaagagaacggcgactcatttcttggcattttggcaggtgttgggctcaagcacaagcgaccagtacttgtacttgccaacaaaagactttgaattgattgttggccatttggtttcacttttgctttttcctcttccttcaacaattcttcatatttgtccggatgatgtcgctgcaaatgttctcgtagacacgtcttcggaaaagttgtagactttgagccgtaagaataactacagctcaaacatttcgctgttccatgagaaattttaaaatatttaatatatttgctttgtggtggcattttcaagctaaaaatgtaaaatgtgttaaaaatcatttaaaaagagatatacaatatgtagaatataaaataggtaatattgaagaaatatttaatttataaaattcataaacattatcaccattactcacattaagatcaataattaggggagtatttttacttcgaaaactcaatctttaggggtgcatttttcccgaaacttcgagcattttcacgaagctcgaagcacgaaagcacgaagctcgaagtttcgcccgtccctgatcggcaccgcccgaccctctcccctcgctccttccccaaaaatttgaaaattattaaaaaaaaagactcaaataacttaaaaaaacaattcgttttttgtccaaaaatgaccaaatttaaaaatgcggttcttatagttttgtcatccgctgaagacagagactttatcgattgcccaccaaattgtgacctttttccctccctcattcattaattaattgcattttggatgctcactttcgtattgcttttctgcgcctcctcggataaaaaaatattttttgtcttcaataaataaaatatttaacagattttattgtattcctataaattttaatatttgtgaaaatatcaatatatgttatattaactaattatattgtctaatgtacaacccctttaagttcaataatttcttgaatcataaatcagggcttcgatttgttcttatttctaagaaatgttctgatttggagtgtccaaatcttagaaaatgaaaatgttcttatttctaagaaatgttctgattttgggttattgttcttattttgttcttatttcttaaaattattcaaaaattttgaaattttatggcgaaatgtcactatgtatcaagaaaaaatataatatttgtgtcaaaatttggtaatttttgacaaaaatccgttgaca

SEQ ID NO: 11752 - DNA, 3542 bp, Heterodera glycines
agtaaacttttcatagataaataagaaaatatccatccgctcctattcagcatctatatacctattgaatataacattctaatcataacaaattttaattacttaacctaatactctattagaataactaggtgtgtaaaaaaaccgcaaaaaaaaatatatttatatattctatttgtttttattgtgatgcttttcaacaaaggaaaaaaaagataaagcagaataataatacaatttttaaagttatttttaatatttaaacaaagaattaaggtttaaatcctttttaattttagccatcccagaattgatcaaaaatatggagtatagcattcaatagtcacgctttacgcacctgaggcagaggcaactgctcaaaatttgaatatataaatcttaataagaattatattttatattaaaagatagattgttgtagatattgttatttaaatatattttatataaattatagttaaatagcaagagaaaataaaaaacttttctgttggtttatttaaaataaaaattcatataaaattaaaaatataaaatttcaatcaattatatttgcaattctcctttaaagaaattaaataaaataaattaaaaatttgttcattataaatagggctcacatttataggcactaaaaaccgccaaaataggtaggctttaggctataaaaaaacccccaaaataggcactaaaaaatggaaaataggcactaaaaaaactcatttttaggtgtgtgaaatgacaaaaaattattcaaaaaagtaaaaaaattaggccaagacagtattgagattaatagttttttaaagcataaattcttgtcaagaaaataaataaatacattttggagatgaatttttggaaaatttttcatttcttagggagtttattttttaaatgattataaaacaaaatagtattaagaaaatcttttcttttttgagtaagaaaaagtaaaatatataaacccggaaataaatttttaaataaactcatatagtaaataaattcagcagattataaccatgttaaaagtgattgctggaagatgtatgatagcatttgattgctaactgaaataaattttaagtgctttcagaaaaattaaaatttaacaaaaataaataaatttttattcttctttacatcttaattgatcaataaaaagtttatcgacacctaaaattatttatttaaaaacacattatttatttaagatttcatgtgttattataaataaataatgttaaagcaaatattaacaaagagataatccaaaagcaaaaaaatgaaataagagaatgctcctattgtacaatatattaatgtttctattgttaagatgataattgaaaataatacatagatcctttatataaggatttttatttatttttatagattttgttttggtaaagggaacataaaaacaaaaggactgggtagatttccgaacgggattcccgccttttttcgtttccctaaaatcacataaattttaacgagaatccagccggtaaacattaaaattgtacgaaagtttttttagtttgatttcaagcagatattataatattagacatctttaatttttcaatataatatctggtaaaaaattaattatttttatacttatttacaagcttgctcatatgcttcggccactttcgtagacagaaattatctaatattttaattttggcttttcttttttaattattatataaactgaatcattaacattttgttaaattaatttttgtatttctttttatatctttacagtttttattatggatatttttcgatttttttttatatttatttattttataatacatatgccatttattagagctatttcgaaagttcatttgacagatttgattttaatggatgttattataattaaacttttaagtataaatatttttgtttttttttgtatgtaattttaaatgaaatcactagtaaatatttctcacatcataatagtgtaataataggagttaattatttaattctttaatcaaaagttttttatatttttaatttggagttaataagatataaataaatgaaattgacttatattttgatatgatcattctttttcttggctcaatatttctactttaatttttgctgtgcgaagttttgatttatttgattaatttcatgacaaattttagttaaaaattcaattaattcgcaataaatatatattaatttggtgttaattatctaaaatatgtgaatttaattatcaataccaaatttgatttgctttgaaagatttttaattaaattatatattttaatttaattttgctttaatcttactttaaaataaacaataaaaaaggataattgtataatatttcacctaaaaaaaattaattaaaattattaaattgtttgttaattttttgttaatattcccggttgttcccggaccttgatcaagatttaattttttatataataatccctgaaagccgttcttataatttaagttctatttattatattgcatattttattttaataaacctatgtcattatgtaattaaattttttataattccatcaaattattcattgacactttttaagaaagttaaattatttaattttgaaaaaacatttggttttttattttacataacattgtatcagcaaattaacattgtttgggttttttcaaaatttacattatctatttttgattatataaattataaattttttgaaattagatggattatatttttacatttctacaagaaaaacataattgacagtggtgggtaatttgcgttactaagttcatattggtaaatttaaaatttaatttttccaatataattaaacatgcagtgaattgagtattcatttagtttttaagttatatgttttcaatgattatgcttgcattttataatttatattttgtatgtacaataatcaaatatgagtgaaataacactatgttatctgaacaataaatattaattagtttatgcgtagtgttttgtatttatgttctttttaatttatctgcatattaaaagtcaatgaagtgatgggctgcaattttaccatttattataaaaaatttttaaaattgttcaaaagggagtagcaaccggtatacactacaaattagcacatttttttaatgttagatttattttgtatagtggaagataatgacatctagtagagctattttaaatatttcgggtgttattggcttggtgaaaaatttgtaaattttttattagattttcagggacgagagaacgaacggaaaaaaaatctataaatataaaaattataacaatttttaacaaatttttaggcaaagtaggaagaagtaattatatataattattttaaatattatttctttttaactttttgaaatgtaagactttaatttattttaatgattttcttgaaagcatttaatcaaaataatttaattttgctttatatatgaatttattcatcaatat

SEQ ID NO: 11753 - DNA, 3652 bp, Heterodera glycines
  unsure (1)..(3652): unsure at all n locations
aattctttatttatatttttcaatttcttatatttttcctttatctcaattaantgntanctcaattgcctcctcgtaggcacaatttttttctattgactgttggatccttttcttacatatttttattacatttttttcttaattaattggtcgtttttggtttttttttaatggccaacaattttctctccgttcgtcgctttttgcattgctgccctccactacgaaatgttgtcaatggcagatggacgacaacgcattacacacagaggccgagagaaaaggacggaagggtggggacgtaaattaaaaatatacccatggatatgtatttccagtggaaatgcgtggacatggctcgtgtggaggacgagttcgacgtggtcattgtgggcggtggccccgctggactgtccgccgccattcgcctcaaacaattggcggcggagaaggcaaaaggtgagtgaaaaggccaatttcaaatgtaattcgagtctatgtctcaaagaattgcgcgtttgcttggttgaaaaagcacccgaaatcggtgcccatacgctctccggtgccatcattgagaccggcggattggaccgtctttttcccaattggcgagaactcgactcgcccatcaaacagccggtgaaggtcggtttatcaagtgattaaaaattaaatttaaaaaaacagtcaattcgcagaaagacgcattcgcaattctcaccaaaaatggacgaattccggtcccattggtatttgttttgctgcatttaatttcattttgtaaaatgttacactaatttgtataaatgaaaggtccccggcgtcccgctgaacaaccatggcaattacattgtccgccttggtcatttggtgcggtggttgggcgaacgtgcggaggagcacggggtcgagctgtactcgggcattgctgcgcaggaagtgctttttgacgaggctgggaaaacggtgtgcggagttgcgacgggcgatgttggaattcacaaggacggaagcccaaaggttggtaagggaatcatcaaagtttaaaaagaaagtacaaacataaaacaaaacaggagagctttgaacgcggcatggaactcaaagcaaagtgacttttgttcatttactttattatttctaatgaaattccaccgaaagggaaggaagtggatgcattttttagatttcgaaaaaattagaactccgtaatcatcataaaaattttgaaaagcgcaaaaataatttttttttttttttttgggaggaacgaactgctccggaagaaagtattccattttctctccataaacataacttcgctttcaatactttcccattctcgacagatgcacaatttttgctgagggctgtcgtggccatctgacaaagtcagtcattgaaaaattcggcctcagtgagggcagagacccgatgacttttggaattgggctgaaagagctgtgggaaattgacccgtcaaagcatcggccgggctttgccgagcacaccgttggatggccattggtgggcaaacggagggcaaaaaatgagtgaataatcaaaagtgcccaattagccgagggatcagtacggcggatcattcctttaccatttggaggacaacggacagccgctggtctccgtcggatttattgtgcgtttaaaggcttacaattaaacgaatcccttccttttcttcaggttgctctcgactacaaaaaccctttccttaatcctttcaaggcattttcataattaattacaatttaaaaattttctcccattagaccttccaaatgttcaaaacgcatccgtccattcgaaaacaattggaggacgggcggaggatagggtacggggcccgggcactcaatgagggcggcttccaatcggtgccgaaagtggtcttccccgggggctgtctggtgggctgcagcgcgtctcttttggttttaattctttttttgtaattttatttgctttacttggttagaatgttgccaaaatcaaaggcacacacaacgcaatgctcagcggatgcattgcggctgaaagcattttcgaacaattgcaaacggagggcgaaaaagcgcaaagtgcataataaagccgaaatttttttaataatctataattttatttcagcaattactccgcttaattatgccaccgctttggatgactccccggtgatgaaagagttgcagatgtgccgcaatgttcggccgtcgttcaattcgcgcctcggcttttggggtggcatggcgtacactggcactttcttcgtcatgggtttgtgtataaacatttcattgttataatttggtttttcagggcgtggcattgagccatggacaatgcaccatggacacccggacaatgagaagacggagctgaaggagaagcactcagaaatcgaatatccgaagccggacggggcattgacattcgatttgctttcatcggtccatttgaccggtaaaatccatgacttttcaatacggtggttccttccattcttcgttctttccaggcaccaaccatgaagaggatcagcccgcccatttgacgttgaaagatgactccattccggagacggtcaatttggcactgtacgccggcccagagagtcgttactgtccagcggcagtgtacgaattcgtgccgaaggaggagggctcggcagtgagtgcgcagcaacggttgcaaatcaacgcacaggtggcaaaagcaaattggcaatgctaaacagctgacaaatgggtgccatccctctcttaagaattgcatccattgcaaaacgtgtgacatcaaagacccgctgcaaaacatcaattgggtggccccggagggcggcggagggccaaagtacgacggaatgtgaacagattgggcaaaagaagaaactggtggagggatttgatggaaagaggagattgtttgtgtgccacaaccaaccagcagattctgtgcattagtttttgtcctttcatgtaaatcctcaaaccaatcgtgatgttcttaaactttctccagggctgagccaaattcgaaaaataagcagaaaaaatttgcacagccctgccaccttctgtgtttcttccaatcctttcatggtatattagactaagtgtcatcattagggcttccatttttaggcacaaaaaatcgcactaggcattaaataggcacaaaaataggcaaatacaattttttattaacgctttttaggtaacaaagcacgttaaaactttaaatatttcaattgtaaatgaaattattaaatgttttaaagttttttcgaatatgaacaaatttttaaaccaaaagatttttattaagaaataaatattaaattttgggataatttttttgaaaaattttagcacaaaaaccccgaaataggcaaaaataggcggttatagtcggttttatgcgtcccatgaatgaccatacccagtttcttagaccataacttttttattacttggtcaatacctatattcttggtattaaactaaagcttaaggtctatggaagcttttgtataagtttatttttgataaaggcaatagacaaaaaattatactcggaaaagttgaatttcgtatttttttcattgtaatttcttttttaatgccaa

SEQ ID NO: 11754 - DNA, 5920 bp, Heterodera glycines
aaatttagattttttaagaatattttctaaagaaaattttttttgaagcgaaattaattgcaaaattttacaaaggatcagttaaatattcaattttttttggcggttttttatcctcttaaaaaattggctcaaaatcgtaattttgtcatttttgaacaaaatcgtttaagaatcacattaaatattacaaaaatatttcagacggcgcctattagagcaggggtgtatttgttcttattttctaagaaatgttctgatttggggtagtgctatattttcatttaaaagaggaaatttctgaaaaatttggctaattcctaccaaaattcattaaaattcttaaaattttcccccagcggcgcttatcgactcctccggcccgccaaaactcgtatttttttttagtaaaattagcccaagatcgcaaattttggacattttttggtcagatcttgtaaaaagatagcattaaattttaaaaaaaataaaattggtagttttagaatctcactaataatcctatttattaaaaagaataaaaattaaaaaaaaattaatacaataagaaaaaataatataatcaaaccaaactatttttgcaaataaacataataaaaaaattttatatctgaaaaagtttgaaaaatgacaaaaagtttgtgtatacaatagtacaaacgaataattgtataaggaatataattctaaaacccttactagaatttactagctaaaatggcaaaatatgcatgaaatatatgcatacaaatccaaaatatgcaaataaaagtcccgatttttatacgcaaacacaaaaaagaaagtattttcctactatttatagcatggagaagctaggaaaaaattatgcatttgcatattttttgcatccctgacaattattcattttgaagagaataccaaaaaggaaaattattgagtcaaaaaattttcctaaaattaaattttcgagtcccaaatattttcaaaaaattaatttttagcacttaaaatatttttttgtttttttcctccgccgtctattactacaaaaaacttttagaacatttaaaaacaaaattctctgttttgccgttgtcgcgcaaaactacataacgccaaaacgcattaaaaatgaaatttgaaaatttgcccgagggcaccgcttttttgctcctcttgctggaggcggaggacccgtcactgaaactcaagtccattcaggtgctgaaggtgagaaccacacaatttattatgaacaatacatacacacggcacgccaccagtaggttttctctgctgtttgatcggaatggcatttttgaaatggagccgaaaatttaagaaaaaattcatttttaaaattttgtgtcatcggtgatcgaccgatcattttggtgtgcgtggcttaatgatctctgatcagagtttttgctcttagcattttgacacgctgatcaaaaatccagtaggtgaacctgatcagattacacattatctgagagttaattgtttcaatttttggtggtaagggctcggtaaaaaaacggccatgcaaactgatcagatcagcaggtcatcatgatttagcttttctaaattggtcagaccagaacgatcaaatccatctgcttttgattgatttggccggttaaagctgaaaaaatttgatcaatgcaattatttcagttccgatcagctataatcgccaattttcttaggtcactatttctgtcataaaaatgctcaaaaaataataatttttgatttaaattcgaaacatttccaatttttggctccatttcacatgcttttcctctgcttttgattcgtttttcctccgttttttatgcttttgcactattatttatttaattttattttcaattattattattattttttctttttctttttatgttttgtgactttttccatttgacaacaacactaataaaatttaaccaattttgtggtgtcaaatatgaattgaaagaaaattaatttaattttttttgtcaagaaatgtttgtactgaaaatttcttttgacacaaaattaaaaaaaaaatatttttttccatcaaaaaattttcaaatttctaattcatttaaaaatttatttaaaaaattccaaaattttaaatctttgacaacaaaatgtgaaattcctttcactccctcaaaaaaaaaaatagttggattttgccgagagtttcaaaatcacaaatttttatttgaaatttttttaatttcaaaatttgaaattccaaacttacaaatttttgataacaaaaaatgagaaattcctttttcacattttgaaagtgtgtgacttttgttttatcgtcgtcatccattgcatttttcattgtttatttaacaaaaattaattttttatttgcaattttcgccgccgccaaacaaaaaattgataaaattttgatttttgataaaataacggtccaataaaatcactcataaaagccctcagttttgtgctgctcactaatgaattcaattcacacacacacgcacaaacattaacattaacattaacttatataatttataacattttgccccaaattaattaattaattaattggctgttgaaattttatttattttttgctttttttttgttttgcccttttttgagattatttaaatttaaatttttttcagacaatggccaccaaacggacggcgttggcaactgcagccaaaacgacggtgcaagaccaaaatttggtgggcatttttgtaaaaatttattgtatttttaaattatttttattgaaaattacttttattgaaaattacttttattgtttttttttgagtaatttgctggtaatttctctgagttagaacaatatgatcaaatctgaacaaaatgtaatcatttccaaatagatttgattaggttaggtttaaaaagataaaggattgattaaatctatcaatgcgtcatgacgccatgcaataatttgatcaaacctaaaagaacagaacagacattgaattgatttgtgagtcattctttgatcaaaagagcagattagatcatcaaaacagcatgggtttatattattccgggcacaatttgatcaaatctaaaggacagaacggacaattttgaatatgatgagatttgaacaaattgggctgatcaagtgatgaaaatcgtcatgggtttatgtgatcggaatgtcctggcacaatttgatcaaatctcaaggacagaacagacaatttgaataagattagagggtctgtgattcactctgtttaatcatttgaacagctagctcaaatcagcaggagatggatgtccttatctatttttttgaatcaaggacaaaaaaaaaaccattgtccgaaatgaaggacatcatttttggaattattgaattatgaagaaaataaaaatacataaaaatattttaataattatttgaatttatttaatccagaaacaactcgtctacagaaagtgccttcaagcactgatctatccgatcagtgccacaacaccgcacaatttttgcacaacaaattttcaggtaagaatggcgccgagtggggtccaacttttggcatatatatatttttttttctaattttggcatatttttttttctaattttggcattaaatatttttatttttggcaattttttcagactcccacctggtgctatgagtgtgaaggccttttgtggggcttggccagacaaggtgggcaataaattttttcaatttgtacaataaaatcacactaccaaatgcctcggcaaaatttgttttcgttttggcattagattttttaatttttgtaaatttgtataaaaactacaaaatttcctcgagaaaagtgaggggagctaatgaatttttaagaaaacaaatcagatagaaaaatctatataccgtttttctagttagaattttctcggtttttgatttggttttggcattgcgttttttaatttttttttttgtttcgagctcatttctcgattctctttcagtaaaaatcatttctcacatatatttttttaaataaatgatttttttattttacattttgaggtaattaaatttaaaaaattcaaaaaatgtaagccatgcatagataatttttaatttaattgaatttatttaaaataagatattttttaccattttttgccaggccttcgctgttctgagtgcggcgtaaaagtgcatgaaaagtgccgagaattgctcagtgccgactgtctacaaagtgaaatatttttttaaagaactgatcggataacattaaaattttcaaggggctgccgagaaaagcaataagcatggggaaggtgatcgggcacagaatctgatcgcagtgatccgcgatcggatgaaggcccaggagcgcaacaagccggaagtgttccgccgcattgcggacgcgttcaccatggatgacagaacgcagcaggaggtggggccaaacgggggagggtcaaatagagtactggaaaagtactggaaaataaaaatttccgaaaattagacagttggaacttggaaaatcctgctaaataagccaatgttagcctggaaaatgttttcaaaaaaaaaaccaaaaaattgaaggaaattttgaagaaacatgcaccatttttttggctgaactaaatccagcaggaaagaatgccaattggcaatatatgtgtataataaatagggagcagcaggtcttgaaaaaaaaaactttgaaaatattattaatttaatttatttatttcataaataatttttaaaatattttttatttttcaggctcttcgtgtcgtcaaaaactcaattttggagggcagttcaaaatggagtgccaaaattcagctgacaggtggcatatttatgtgttaaatttggagggctgctcgtaatttcctttctcgattctcgagtcatgaaattccttgggtttttcattgtcttggcggtggcggcttcaaccggcttcaactggaaaccggcacggtacgggatcccgcgcgagattttgcgggatcccagtccgcaatccagcattttttttttttgaatttgcgggattaatcccgcggggtctcgtctcgcaaaaagcaatttgaataaattaatttcaattttaattgccagtgatttgtgccaaagggctgagcggcaaagacaaaacgggcaaaagtgatccgtacgtgacggcacaggtgggcaaagtgcgcaagcggacgcgcaccattcaccaggagctgaacccggtgtggaacgagaagttcacattgtgagtgagcattgagtgcattcaaattgattttaaatgaaatattgcttgttttaattttatttttcaattttcaatttatttattttaagaatttcatcataaatgagttaaatttttattatattaaaattgaaaaattatttctttgctaattaattgaaagaaaaaatttatttgttattcagaagttacaaaaatatgaaaaaataaataaacatttttaaaataaataaaaacaaaaaattaaatatttatttattttatttattaattacacttttttatttatttgttatttactatttttattttattagttgcatattcaatttttgaacacattttctatttaatattaaaataataatttatacttttcccgcatttaaatttacgtcgccgctttggtcaaaaaaaaaaaacttttgcagcgaatgccataataccaccgatcggatcaaagtgcgcgtgtgggacgaggacaacgatttgaagagcaaactgaggcaaaagctgacccgcgaatcggacgactttcttggccagacaatcatcgaagtgcgcactctgtccggcgagatggacgtgtggtacaatttgggta

SEQ ID NO: 11755 - DNA, 4399 bp, Heterodera glycines
cttatcttcagaattgggcttattttcaatgaaaacatctggtggacaaaaaatgttggtgattatgtcaaactttggagagacaatgctgagaaatgccaatgaggtgtcaattgatggcacatttgacaaagtcccgaggggatttaaccaattatatacgcttgcagttataattgatcggtaaaaaatacagaataatcgttataatttttaaaaatagatgctattcctgctgtatttggaatactcccagcaaaatctcatgcagtttacaatgcgttttttggttccattcgtcaagccgtcccacaatttgatcccaatgtcgtgatttctgattttgagtcatccgcgctaacgacttttggtgcaattttcccacgttgtattcgagcgggatgcgtctggcattttggagaagcaatttcaaggaatttgcgacaacaaacgaatatgcgacgaatttgggacattggcattgaacaatgcaatgcaaatgaaagagatgaaaaattgcgtttaaagtaaaacaaaatttctttctgtaattaattatttttctaggtcattcaaagcaattccttttgtgccaattgaatcggtttacagttacttttgtgttttagtagccagcttccagcctaatgacgaaatttttggtaggaaaaaggggttttaaattaagggaaaatctgttaagaatttatgcaatattatgtacggacatggtttggtggtgattttataatggcacaaccaccaattcaactgcaccaaaaccctgagattaacaacggacgcggtgttgaccaatggattaggggatggattaacaatgccggtcttgcgcatcgccgtgctttatttgctcctagattgtggaatgtttctgatcggctccaaaataacataagcaggacaaataacagcatagaggcttggcatttgcagtggaattcgaaatttcgagaagattcgcctcgtttaagcagagtgatcagagcaattattgatgaaaataatatttttcataatatggttgatgaatatatggctgcgcctatacaggggataaggggccgtggtttggatcgccgagcagcgaacattcagcaagacgaaaatttgttggctatcttcaatacacgacttgaacgtgagccgctcgattatttgcgcacaattagctatcacttaccgtattaactttttttacaaattcaacttttcaaaattaaattaagaaaaatattttcgattttttaaaaaattgcttcctggtgcccaaacttcccggtgcccaaacttctggtgcccaaacttcctggtgcccaaacttcccggtgcccaaacttcatgtcgccaaaaaacatataaaagacagagaaaattgacagttaatttcattgtttttgcaattataatttacgactaattaattgtaattgtgctcatttgtcagctaattgccgaaaaatgaaccgacgacgttcaaggaaaatgtacgaaattttgggtcataaaaacaagtttcctggtgatttcgagatcgctgatcacgaatccggcatccattttgccaattcagaaccccgaacccgaataattacatgtgataaaaaagattttcggggttagaggaacgattctgacgccctttcgatccatctcttacagcaagtgaaattctccaatcccgaatcttaaaatatttaaattaaaattatttttttttgaaaaaggggcccacaatcgacagtataatcgaaatgtgtgttttgtcatggtatttttgtgttgctttgtgaatatcccgcttttttgtggttgtaaaaactcatcagaaatcaaacccatttaatcactagtcatttttaacagtgcattttacacttgcacatcaaatacaatggaaatggacgaattttgcagcaagcaaaggtcaaataaatacatacaaacaaattgtattgtacataatattgaaatggcatagtgccaaaatcatttcgatcatataatcgcatcaattaataattaattcatttctgctgctgttgctgatcagtgatcactcggcccgtgcgaagcggcgtcgagaaaactgaaaaacgattgtttggttggactcaaaaagtctaattgaaaacaaaaaatgaaattttaaaaattgttcacccgtcgtcgaatccgccatctctgatcaaaaagtgaattggattcggcggattaagcagttcatgcagcacattgcgccatttattctcatcccattcaattggacaacgcgtgagccaaaaatcgtttgtgctatcttgatcaaggaccaattgctccccagtcacttcgttgatcagatcaaatggcataacaaagtcaattaaagtggatgaaagcctccaataaatgcggaacgtcactggtgaagaagcattggaaaatgcctaaaaatggaacaaaaatcattaaaaaccccattaaaaagtggggaataatccaccgttttgagttgttcaatagctgaagaccattggtccatcagtgaagaattaatatggcaagtgagccacttcggcacaccgtccggacgagacgtgaacaaccatttggcaactacttggccatccgacgccatggcactgtcatcgggcggaaaagcgagcacaatgtcgtcattgaaagcgacatagcgaagagacagacaattgctgagcattgacggggccaattgacggaaacggcgaaaagtgatggtgtccaaaagcatcagatgcatggaatcgcggaacattggccaaatttggagcaaaacaaagtccaaaatgtgatcattgcccgtggtattgtccaagtatattgaacaaacggcgaaaagacgctgtaaacgacggagaaatgtgacgacattgtggtcaatgtagctgaaaatgtggatgatcacacgaatcaaattccaatttcatttaattttacgcgatcgtaatgcctcttaatccgagcactttgttcggcaacggtttttgcgggattggcaatggatttccatcagatttgacaatttgcattttcttcgtgccattttcttcaatgtcccattggattagcaattgtttgttcaacgtccatttgcgtgtcttgaaatgttcgtccactcggaggtcaaatcgacggctgatcagtgcaatttcgaggccaagttgagaaggcgcaaggaaatcgaacaccaaaagccaacaatcggcgcagataaagctgaaaaaaatgaagaactttttcgatttctaaattttttgtttattttttttacatttctttgtgagggcgtcgtcgctttttgacattgtccaaaaagaaccaaaaaagaatggaggcacaatcgaccaacagaagaagcacagcacgccaactgaaaaataaattgggaaatgaagggaaaggaaaagccaatgaaaggaggtcaaagcgagggaatccaaagggaaattttagcttttttgggaatttttgaggctaattaagctaaactttaaatgcgaactgtcaaaaaaaaagaaataataaacgtacagaagtcctgaagacatttttgcagcaacaaaatgatcggcggaaatattagggagaatgaatgaatgagagaatgaatggaatgaggaggagggaaagaaacaagggcatttttatactaaaaccgtgaaaaattttcaactttaatgtctgtacaaaagttttgaatgtctgaaatttttttgaattttgcaggcagataggcctcccctaatgctaaggtgttttcctgcaaaatcctagtcattctgacaactacgagctgaagaaaaaaaatgagcattttcaaacaaagtgattaaaaatttaaaaaaattaaatctctcagctctgatcctggggattacaacaacactttttcaagggtttccagttttatggattgtttatcctaggctttaaatgtaggacacgattttctgtttcacgatgcctgttttcatacaggagagtgaaacgcagtttttcacggaacgttatgcagctagctgggcatttaaaaacatttattttttttggttttttggtgtcatggcaactcgtacaaaaaaaaatttctaagaattttcaactaaaacttagaatttttagatgaaaaaaatctaaatggatttttagcctagaaaaactttttaaaggacttaaattttcaaaaaatttaagaaaataaaaaaaatcagctgaaaaattagtaaaaaaaattttaaagaatttttttaaaagtttttctaggataaaaaattcatttagatttttttttatcgaaaaattctaagttttagttgaaaatcttagaaattttttttttgtaccagttgccattgacccg

SEQ ID NO: 11756 - DNA, 3445 bp, Heterodera glycines
  unsure (1)..(3445): unsure at all n locations
attcactatttgcatctgacacatattngggaagtatctcgttgagtcaaaatcgatctttgtatatttcttctccttaattagataattgccccttcaattattaggaaatcagtaaatgaagacggcatcgatccgattttcgttgtaataatttcggtttcattgtgttttgtccataaattctctattgtactaatgtcaatctcggctatttgatcatctttgattacgaaaagtcgaccatcaatatgatcaaatctaaggtccccaccgggaaaattcctgacaaccatttcttgactccctcttgttatcgaagtttcatttgtcttttcgttttggaaaattaaataactatgatcgttgtaataaaagcacgctcggggctttaattgtcgaaaatcctggtaaagcttaacattagtgggtccgctcttttctattgaattaatttcttggattgataggctccaccctgaaatcagattcctatttatcgtacataatctcgagcgatcgaacccgaactgtctttcattgaccgaactctttgtcatagtgagatacttgtcgtcaaaaagttgtgtatcagaaagaatctgaaccctttcggcagtgagatggccgactatcgttaggagaacaattaaattaaacattactgacaaattgcttaactaataaatcggccctcgggcgaaccttatatagaccgtcaataacctcacaataagggattccgtagcatcgctgtgtcaagaaataaatgcaaaattgaccacatgcatctgagaattgatgttggacgatgcggtcgttaaagaggattcggtcgaataagttaaggtatgaacttaaatcttcattgggataatcgcccaatgaatcaaaatattcaatttctgtcggcgaatttacaaaacaggcgacccagtgttcacctatcgtgcccgcccggtcggtattcgccacaaagcagtacggaaaatgcctgtccttaaatttaggcatcttgtcggaagcaaaaaccccgataaaatattttcgggttgtcagatgtttggatagaaatatttcaatctcatgagaattcatcatatgcttccgtcgctactgagcacccgattagcattaatagatagaatcgaatcaaattcccccagaacgatcatctcataacctccgtcctttataggctcattaaattgtaccttgatgctggtcgttccgtttcgaatcaattcaaacccgggggtgtcctctagagtagaggtcatcgggatgacgaagaaacaccacccgtttacaaatttttgtatattgatcgacattgttctttcaccgtcgtccatcccgagtcctgtatacatgtcaacaaatgctcgaatgtatttgtttctatcaaaattaagagaatagggtgacccggggaatatgtttccattcgcttcgacaccgatagagcgtatttttgcatgttcaaagacgaagggtgactctttaggatttccggtatacgcaccggttgaaacaaacccgacaattaaacgtctcggaacaatgcttgtaaaaacattgtgtgagagatcagaagtgcctcgtgggatgaaaagactcctgatctcaatttttctcataggatatttggctggggtggtttgtagctgattgcttattacgttatttaatgactgggtaatgtcgactgtttttacataaattctaatatcatgtatgttaatacgatatgtgtgcgggttcgctatgactgcatttcctgaaacatatggcggtgccataattagaaaatcatcggtgttacggtgtatgctaaaaatgacatcagagttattaagcaaaagattgggctgacgggcgagatcaaaattaagtttcaccattgtttcacatttcgccccatcagcaaaacgtgacgctctgtttttaaagccgctatttgtataatcatcctggtcgacatcgtcgacataatagcaggacgcttcacagagaccctttttgacatcttctgaaaatcccaattcattcatcatatatgccctaaacgcatagtaaatgccggaatcataagactcaacacctgaaattgacacctttagtgttttgacaaagctctgcccaaaattttgaatgacaccgacgtgttggtcagcttcactgtccttggtaatcggaatccaattgcttttgtcttttctctcaattgaagttgacaaataaagaaaagttttattgagatcacaaaactgattatctgaaaaagtctaaagatatacggtccagattgatttattgctgaaagagggagtaattcccgaatactggatttattaattgcaacgttcgtcggagggatgtcgaaaagtgaaaggcccccctcgagaccgtcctcactcgccgtgtcgattttcttgagagttgtcatttttaactttttgtattatttattccatttatacctttagatgaaacttaactgatcatatacttgtttccggttcttattagtgatcagagacctttttcctttcccacattgttgtaacttgtcggtaaggttagtcagcccctgtcttgaatgttccctgacggcatcccttaaatcacgaccctgggcgatgtcactcagaactctctgccccgcggcgagcccctcatgtcctgcactcgaggcaatattcctcgcaataggggtcaagaaacgtgccacattaccgaggaaaccgaatccccgttgatacttgcttccgacaaaatattgtttctgtcctcttccatgttggggagtgataaaagatgaccaatcgaccgactcgggatcgaaaaatacgtgtgtcatttttaaaatatacttttcttaaaatgtaatgtaagaatacaacttccccagtgaaatttaacgaattcaccaaacggtgtgtgaatttcaattgtaatttctgaaattcgtttcgactgtagacgatgaaaaactaggtgctatatataacttcactaatcgatcctgggtcatcgacgacgttaactattcttaagagtggggccatctggttgccgataattgtgtttcgattaaatttggtgcataaatgtatagctgccttacacctcccgtcaaatccggcatataagtcgcctcttccgcgtgaaatagccttgtattcttaaaccccagaacatatgcgaggtgttttgacaaatctatatgggagacagcagcggaaagatagacaataaatttttgatcaatgctgtcatattgaaattgaacatcctcattggctaatctctctcttttttgtggtcctttctcagcttcagatacttgtcaattttcaatatctttacgtttaatatgctcacagagcgcctcattaagcctattcactatcccgctaaaaccttttcacgatttatcatt

SEQ ID NO: 11757 - DNA, 4286 bp, Heterodera glycines
ttttgaagggtttaaaacttaatattttggcagtttttagtgtcttttgatccatatttggtgtttttttataataaataaaaaaataaagcatcaaaaatttttttgataaatccggttttttcaaaaatgagtagtacaaaaaaaagaagttaaaactgccttcataagtggtggaattaattcataaatcatactagaaagatttatcatctgtaattaaattaaataaattaactgaatggagggaaattgccggtaataaattccttacaaacaaaactaaaaaaatttcttaaacaaggtgattaaattttgcgaggtgagccgaagtgacaaaagtatgtatgggtgtgttgttggttttggaaggaagggccgtttaagttccaaaaaaattaataattttaatatattttaattgataatttacttttccacctgcctataaattaaatattttagattaataattatcaaaaatatttagaagagtaatcaaacctaaaaatcatgtttcacccattcattctattgcacttttatttttttatttcattttaaaaaacacaagataaacccttgctatgattatggatacgatttttaagtttttacctattttttcctgagctcccagtgacctgaaaaacacaaaaaactttttttttggaaaaattaaagaatatgtgtacctctatgacgaatgatatatcatcattcgacgcctctaggtctctaaggaacgaatccaaaaaaattttttggcggaaacgcctttgggccgagttatgggcccgggactggtggccaaatggctttgggactgaactgttccaatgccttaaaatgcataaaaatgcaacaaagtatatagaaaacgattcctcacggtttaaatgacgaatttgaaagaatacttcgataaaaaagtaatttatgaaagttatgggtcctcaaaacctcaaaaaatgatcgtaagggacgggactgaattgtacaaactaaaagtgaattggtgagtgtattttggcaaaaacaccgcacactcgactacatacattcacaaggggtgtctcagcccaagggccatacgacggacgattgggacaaggaggggggggggtgtctcgggaccgatttttcatacgaaggtccaaatttttttccggcgacgacctttttttttgctattcaaagtacctttttttgcggcgcgtttttcaaaaaactttttgggaaggggtggggtggcccggcggtgccgataggcgccgccgggaaaaattttgaaaatttgagtgctatttgttaacagattttcaccaaaaactgccaaattttgcgattttttggcaagtctacgacttataaaaagaaaaaacgtttttttgcggcgtggaaaaaacatatattttttaaaattttctaatatttacaattttttaaaaataattcggaattccgaaatttttcggaaaacattccctccccagaaggcaagcgtaaccttatgatggcgtcgcacaacgtccgtcaactcgtccagcccgttcaacaccgacttgagccctttgggcggctccacgttcatgcgccttctgcgtattagacgtccaattcttcggacaaagcgaactaagaaatatttgtgtgtaattactagggctgggatttttagttttttaactatagtttgcggctttatttcgacgagaaatgcatgaaaaacacatttttagctcggaaatacctccaacttaaataatagtttgacatcttagtaagtttaccaaggcacaacttacttgtccaataaatgcccatactcagtttcttagggcatgcctttttttctaaagaaaatcccataaacttctagactttaagctttcaatttgataccatgaactaaggcatttacgaaccaagaaaaaatgtatggcctaaaaaaccgcggatagtcatttattcgacgcgtaaaacttggttagaaacgtaaacagtagaaccgaaaaatggaataccgatcaagaagccgagttccatcagcgagaagacgggcagcaacgacgagaagtccatcaccgcgttgaccacaatgccaaggattgcggaaagcattgtcagtgccaaagtgccgtaaaccttgcgcaaatggtcacgcacatggctctccctaaacaggcacattttgtggcataaattgagtgtaatcaaaaaaaaagtgtcaacaatttgtcaggccaagcggagaaagcgcgattaagattgcccagaatgtccttcttgctgcccgccggggccgaggaaccggcggcggaataagtgtaggacgccatttgttgtaataatttggaatggaatcgaataataatcacacaatgatgtatttctgaatattcggtcaattacactatgtatttaatgtctcatattttcaaatgaacgaaatggggttttttgaaccggctaaaaactacaattttttctcattaacattcaacggacatttggtaggcatgaaaaagatatagcacgggaaaagcgaataaatgagaaaggttaattgtttagattcaaaaacccctattggggcattgtaaaattaaatataaaaataaagatgaaaaaataaatgtgaaatatgttcaagtaatttttataaaaaatagagattatgatgatattttagccaggtatgcccacggtccgaattagttcgccaataggttttaaatcgactttttaatcatgaaaacctgagcccttcataaaaacgtttcaattattagtaaaatgatttaagtatatcgtggacaaaaaacattgaaagaatatgaaaaaacaataactttgggctacgaaaaaatgattggggtgtggttctctttgacaaaacgaatcttagcggaatatgtaacctgttatggcgacaaaatgggtgaagaaatattttttgaaatgactcttataaaaaaggcgtttgtttggcagagaaacattttgtgtgtaatatgtacaatcaccgtgtgatgaaaaataaaaaataaatttgttttatgaaaaaataaatagtcgtgtggttctcatcgctaaaaaacgaatcattgaggaatatgagatgacaatattaaccggttaggcgcgagcgagtgattgaagaagaaatgttttttagctgtctcttagacaaaaaatggaataacgtttggtcgactgggaaatttgtgtgtaaaaaacataaacgacaacgagtaatgaaaaataaaaaagaaaaaccaaatttggttgttatgaaaaaatgggggtgtgtttctctgtgaaaaaatgaaactttaatgaatatgatatgctcaaaataagacggtataaatacgaatgttcccgccataattttatggtcattaaataatttcctttaaaacatatggacccttccaacacctttgaagtaagtattatgtaataaattgatattaaattaaaatattaattaaaacaggttttatgtcgatgtgtaaccttttttaaaatattttaaggtggacatggttatcgggcattgctaacgaaatggctttgacgagtttttgataaagtggactttaagttttttttgggtttaaataaactgtattagccatatatagatcgagaatttttatttaaagaaagataggggaacatctaatttatgtttaccattttaagggatacggcaaccgttttaacgagtgggtcccgtcgtatcagtgtcagtatcagaccttaaacaattaaaagacggtgttgaatgaataaaaatgcacaaatcaaaacgatcacactttcgttccaaccaattcgaaacaactaatgatggagaatgaatataatatggtgcgttcaattgcgttcataacccatcacttcaaaacaaataaacgacattaaagtgtgtgcggtgatgtgccgtacacacacaacatgttcaattcagggaattgaaaagtttgaaaaatcaaaattaaaaagaacgtcatctttgttgggttttgttcatattaaaaagccgattttgacgctcagtccaacaaaaatttgcttaattttttgaaaacaagattttccgtttttttggttaaaatatcatttcgtcccatcttccatcaacttgttgttgttcaacaacggcgtttgttctccgcgtcctttttgtcgttcaaaagaaaaagcacatagcggaagatgttggcaagatcttggaacaccaagacctgaaagtggagcagaacttaacaaat

SEQ ID NO: 11758 - DNA, 962 bp, Heterodera glycines
atttttttaaaaaatatttgcaaacctcgaaattttttataaaaaaattcttaggaattttattagtacgaaaatttcgtgaaaaaaatttttttgagaaatttttagcgatttttaagaaaatttttgaaaaaacttagtgttcattataaaatttctaaaaaatcgctgaatattttctcaaaaaatttttttcttgaaattttcgtactaagaaaattcctaagaatttttttatgaaaaatttctaggtttgaaaattttttttaaatttctcggtggagaaacgacgtgggagggaaacaaccagcggggaggaaacgacggggcggggggggggggaatgaagtgcacccgtcgccggcgcgaggggggtgtgtgaagaatatggctattttttcaacaaaattcgttagaaattctcaattttttataggcaccgccggaccccaaaaaaaaactattttttcttgaaaattagcccaaaatcgcaaatttcggtcattttttagacaaaatctgttaacaaatggcactcaaattttaaaattttccacgccggcgcctatcgccactgccggactccccgtgtcccccaaaagttttggaaaaaaagcgccgcgaaagaggctttgaaaagcaaaaaaaaaggtcttcgatttacatggtcgggacgggagcaggaaggttcgccgacagacgtttcgccgataagatgtgggacagaatgttttaaacaaaattgaaataaatcagaaaaccttctgggagacctctataattaacatatttcactcggcgctgactttatccttgacatacatatatccgtttaagtttacctctggagcatcatgtacccgccgggacccctttcacaaaaatttcggttgaccccccccccccttttcatgtatgttctgcccctccccaaccaataataaatgataattacatttgtt

SEQ ID NO: 11759 - DNA, 3751 bp, Heterodera glycines
tgtcttcccgcgggccagtgttgctccccgacctttgcgggattctcatccgctttcgttcagcgtcaattcccgtgttagctgacgtccaaggcgcctttcacgccatcgaagtcgaacctgaggaccggtgcttctgcaaaatgctttggttgaaaaaccccgcccgacccgtctcaggcgacaacctcctcatttaccgctacaaacggctcgtttttggtgcgcatgtcacctgcccgccaaacggcttttccaacggctatggggagaaggaaccgcctgggacgccccactccccgacaccgaggcggcgacgtgaagccaaaccctttctctttggcaaaaccaaacaatagtcatcccgcggcactccattctcggcaagcaaagtcgcctacaactccacgtgttttgtgacgcctctgaacacacatttgccgctgccgtctacatccgaagcgagactgccgacagctcccagtcgaacctaatcttcgccaaaaaccgtcttcggccacgaaccgcaaatcagcgctttaccatcccgcgaccgaacttctcgccattctcgtcggaattcacggcatgcgtttcgccgagaaagagctccggcgcccgatcgacgggcgacacttatggtctgactcccaaattgcgctctcatgggtgaagtccaacgaacccaaggcccaatttgaacagagaagactcgtcgagatccgacaagggcagcccaccactttccatttcgtcagaaccgaccaaaatcccgccgatgtagcggtagcccagacaaaattatttctcggattcccataataacacagtggcttttgatagggcttgtacatttgataaccgcggcattgaattttgggaagaaaagcttgagttctttatcaaacttcgagtcatcacctatgagacatcgaaaaagctgctcaatttttcgagattggaccaatttataaagagattcttcttcgggccgagttgataaaaaaagggagtgaaagagatgaagttcaaaggttccgtggaaacggcggtgcttctcaaacagcctgaattggatgcagaacaaagtcttttctctaaagggaggaagaaagagtagcacacaaagcaatgccatcgatgtgggcaaaatagccactgcagcaccgagtgccagaataagaactcgaaatgcaaaaaatcggtaaggtttgtcactgggctttgatgtacaagacaaagcagggccccaattcgtcaaaaaggtaagggaagccagttcacgaggccaacactgaaagccaaaaagcgcacgacattggaacgggctaattctgaactaaaattaattctgtgccacgagcgatagtaaaatttaagctggagaggagtgcaaccgattttgagataggctgcatcgcagatatcacattcatcagtaagaacaatgggtgtcataagtccaaaacggataaatttcatgattgatgggctatggaaaaaagcgatcaacatcctaggatcattcaaaacagatgttgcgtatacaggcaaggaagtgaatgacgaaatttatgtagtggacggagaagaaaaaattttggggaagagatttaatcggcggattgcaattctatcgcaacaaagcgttcgcggtcagtcaatgaagtcaaattcaaggcagtagacctagagcttggagcggtgcttcataaatacggcgaaatctttaatgacggactcagccgatgcacaaggcaaatttcattgaaatgcaagccgggagggccaccaaccagccgaaaaatgcaaaccacgtcccgtgccttttgcattaagacctgaagttgagaaggtcaccgataaaagatcaatgatggagtgttggagcaagtgacaaattctgattgggcgactcctttggtgattgtagacaaacgcggaaacaaaattcttgtgttgcgactacaaagtcacagtaaaacaatggctcgacatttatcaatacccgttgccggggctttgagagttgttcagcttgttgaaggaagttaaattatgatttcgaaatcgaaaattattcaacctgttgtgtccacaaggaacaacagaattaaatttattttagaaagacaaatgataacaaacaaataaataataaaaccaaacaaataaaataatgatgacgacggagtcagaggaaggcaaaaatggaaggagcaaaacagaaataatttagaactgaaaatgataataaaaataataaaataataatgaatgaaacaaaacagcgggggagaatattgactgaagaatatggcgaccaaaaacaacaggaacatcatttctactgtgaattaatgcacgccaaaaaaacgttcatttattggtcatcattatgacctattggtcatcattatgacccccttcgttgtgcccatttaagccggcccttttcccctctccgtgcatttcccacatatattgttgtattccaattatattatgatccgctcgcctaccttctttttcaaattatatttatttatggaataaagcaatatttatttaacaacaaatttttcttcaataaacttagagctcgagatttggaaaaaaaactgtatctggatctagacctggattccatattggactttcatctggattttctggaaaaaatgcaggaatatccaagcaaatgtgtgaagtaaatttatttaatccttttttatatctcaaataagtcattggttatttgaaatgttaaattctaaaattttctcaaggaaatccatgtttttcgtccaggaaaagcccaggtttccgaaatcaaagcctgggtggggtagacgcctaattttaatggcccggcgttcaaaattttaaattatcacttgagaaaaaaattgcaataggaaccgacaaagtcacttcgattgattactgataaaattatgtaagaaatattttacagcataaacatatgagcacgactgtaaattcgttaactggtggttatggtttatgccttttatttttatttcctaattttacaaaattattattattttttaatatgccaaaatctaatttatattgtttaaaaaaacgatcaaatatttaaaaaaaaatattccatatcaatagtgaatcagatttttcacatttgtctgttggcttaatcggatgatgttcattttgttttttgagttggcattttggacttggttttttgcgccaattgtgtggacggctaaaataaaatttatattgtactttttaaaaattaattatttagaataccatttttgttacaaaaatagcccttcaacgcttgaaattcttttttgaacacgcgacgatattcagtgctaaaattataatttaaatttaaaaaaataaaaatataataaattaaaaataataattaaaagctataataattagagaccggaaatttcaaatttgcggatcccgctgcgggattggaactcaaaattttttgcgggacgggatcccgcgggattaatcgtacaaatctcgcatttaaaatttgcgggatcccgcgcgggattgcggattttgaaattcgaaacacttaaattaaatttcaaaaaatttccaaaaaacaaaaaatacctgatattttgaaaaagaaatttttagaggcttgcgagatgcattaaaaggggctaatgagacccctagaaggaatggattagacggtaaaaagagaacgggaataaaa

SEQ ID NO: 11760 - DNA, 3029 bp, Heterodera glycines
taataaatatttttaaagtaataaattgataggtcatctcatttctctgtttgtgtacacataaagctaacaaatgagcacctccaatataaataaagtgattgattcagagatgttaattaacaacaaattgttagcctaaggcaatcgccgaaatcatcgagaaatacgaggaaaagcattcattcccacccgctcccttaagtagctttgatcatttactaattaattacatttgtgcataaaaagaccgaacgcagcagcgctttcacattccttttttggctttgatcgcgaattattatcggatattatgtggctaaggacgttgtgctaattaatacccattaattaattgtttaatctattgaaaatgctcttcgtccgtccaacttttctcctccttttgctcttcttctgttccaccaatttctttccgattatttcggcttctgccgaccaaaatgtcgaaaattcggaggccgaacaaagtgaaaatattcttctccaaaggccgttgaacatcatagaagtgagaacaaagcagatcaaaaattgcacaaaatttcaatgttttaaaaaagtgaagttggctgacacggacggcgacggacggatcagtttggacggggaattgaagcagttcctggagtcgacaaagttcgaacgaatgttcaaggcgctgttcgaccaccagtctcggggcgaattgcgcctggagggcttcagaaagacactgacgaagcattttgagggacgaaagtacgcgccgaagttgccaactttggtgaacgaagttaacgtgaacaaaaacggtggcatcgactggcacgagttcaagctgttcatgtacgagctgggaaaacaggtggctgataaagggaggaaatttgatcattttgaaaagggttttcgaaaacaataaaactgaaacgcatttagttggtggatgccgaccatgatgggttcatcaccctcacagaatcacaagccttctattcctgggagtacacactggtggaaatgaatgaatctcaccaaaaggtttcataaaaagcatcgaatatttgttttaatttttattgtaatttaattattattttagtggttttccaccaacatattaccccaattttattattcattcgcttttcatttgtaaagtttattcaaaagaataaaaatatatgctgggacaaatatatggagaggataataatttcatgttattgggatgaattgataaatggtaatcttaatctgtaggaattgatgaaaacaaaagaattctggctaatgcaggggtgcgatctgttcttatttgtaagaaatgttctgattttggactattgttcttattggtcaatttttagacaaaatctgttaacaaatcgcattaaaaattacaaaaatttttggctctaatgcactttatgagtccaatcgacttttatgagtccaatcaattgacaatcccgggttttgattaattaattaattgctgattattttcgtttgttactttctttaaatgttagaattctctcgttttctcgtattataacattattcagactttgtgctttcgaatgataccaaaaagatagggtttgtttgaacatgaacaaagttactgtataaaaaacaaatgataccatgaattcatatacctaggtcttgatcaagtaagaaaaaagtatggctaacaataacaaaccaagtatggtcaatggattggacgggtaaaagtcatttgacgattaaaatgcagtagagccggctttttgtggaaaaaggcagggaccggaatttcgacagacccgaggctttcgaattccggtctaaaaacatttttttgaggattttctccaaattttcataaatgtttgttttgcacatatttttccatttttatacatccgaattatttccttatatgaggttttttgataaaaaatattttatcaatgaaaaaaagggttataaattatatggactaaaaaccaaaaaattttaacgtagaaatgctatttttgagcccctttcttcgtagcatatgcgcagaaaaaatatgttaatccatataatttataagtagggatgggatttttagtgataaaaaatcccaaaataattaactaaatagtgaccaaaaaatgccaaaatagtggcaaaaatagtggcgaaaaagttccaaatttaggggtgtaattttttaaatagctattttagtttgaaaataatttaaaactaaggaaaaacattttattatcactgatgaatagggctggtaaaaatatggatataaaatcgcgaaatatggccataaaatatggaccaaaaatcgcaaaatatggacataaaatggcaaaaatctcaaaatatggaaataaatggcaaaaatgtcaaaatatggacataaatttttcaaaattgagtgcaaaatttcttcaaatttgttggttgaaattgcatatgagatacatttccaaattttttgactcggtaaggcgctttgacaaagacggctttcgttttgcaattagtcggtcaacattcggaaattggtctcgaattttttcggcaatacgtgcaatcattttaaaagaaaaaaaacataaaagccaaaatttattaattttttttagcgcaaaatcaacaacaaaagcgaaattttcgcttttttgcttatttttgacataatttattaatttttaagaaaatttaaatttattcaatattctcgagaaattttggcgaaaaaatgattttttgaaaaatttttcgggttttgggctcaaaaaggctaatttagctgctgggggccgttctaatagaggtttttttgaaaaatgccaaaatatggacataaaatatggaccaaaatgccaaaatatggaaatatggacataaatcgcgaaatatggaaaaatatggaaaatatggatatagaaatccttcctagaagcttcaaaccaagctaaaaacatattttcgtgcgtttcaggcctcccacattccaggaaaaa

SEQ ID NO: 11761 - DNA, 3052 bp, Heterodera glycines
  unsure (1)..(3052): unsure at all n locations
tttaaacggtatttgatttttccggcggttttcccaatttttaaattcgcaaaactttgaaattntgtctcccaaaatgtaaaccagttggtactgatgagtaggaagccctttgactttgtataaacgaaatttagggagcagtttctcccccgaaaaatttaaaaacagatttcttaatttttttacgaattaaaaattataattttcatacgaatttcattcgtaaaacatttcttcttttttttcatttcaaataaaatgaaaatttgcacccgaatttttggcttggtcctccccttaccttgtggggctttatcctcctggaactcccgaaaagggagagttccgatttgtcccgcccgcgcatagttttcctctttctcacccgttttttgggagtcgtaattttccttagccgggatcagtttgatccaaccatttttcctttatcgagactttcaccaagtctcttccaaattgcgcttctccgtcccccgcaggagcgcgaacgcgagtacggcacttggcgttggacttccggcgttgaggacggcttggtacatttggagcaggaggagaagccggcggaggagggcgaaatggcgccaggggacgacgaaatggacgaggacaagaagatactggaggcactggagcagaagcggaagaagaaggcgtggtggcgcatttggagactggggaattgatcgggaggcgatcggagatttattgattgatcagtgtgtttgtgtgtgtgatcggttggcctatccgattgatcaaccgcaattgattgatgggcttcaattcattcattgggattgatcagtgtgtgtcgttgccttaaaatttgtttgtttgtttgaacgagataattaatgattgatgatcagtgatgctaacagagtaagccccaaaaacatgttggccaatcgcgcggctttatcctttttgcctcagtttgtttttaatcgatccttcgattgatcaatgccaaaatgactgacttgatcgaaggcatttttcgttatttaaaactgatcaaatcactaataactgactcatcaatcgctgtgatttgagtaactctgtccgtggcgctgatataactgatcatttctttagtcaaccagtcacacactttctgatagttgttgtttttacatttattttcactgctcaattcctcaaattaggcttttttaaaataaataaaataaaactaatgcaattatttttgttttaaatcccttaggttaattagcaaatacatttttgttattttaatttattttactcaaaaatactaattttttggctccaaattccatggcacaactgttttctgtggccgatttgtctgccggcaaagaagcgggtgcgctccgggcgatgaatgaatacaattttgagcaacttttgccctttgaatacatcgcctcgagtgaaccgacaaaagggcttaaattcgaaccgccgactgatcattttttggtcagtattttggctgattctgatcagtgatcaatcaacttatgcctttggcaataaattaaaaattaattgttgctgattgctttcagcgtctcccgcggccgaaagtgagcggctttgaagtaagctctcaattcatttttgtacgccaatttgggcgtcgccgtttccttttttggcatttttagtcccgggctcgatttgtccgagccttatttcttcgaatcttaattagcgttttttttacatgcgcttagttggaaaatttggttggcacttgataccgaacttggcgtcttcaaaaaaaggataaagcggttggctctcggcttttctctcgagaattatccgaattctcctttgctgaaattaattttgaggttttttactctgatccaaccaaaaagtgggcacttcgcacaacgcaatggaaaagcattgccgaggacgcggtgcttttcgaatacgccggcgaactcagcgaggacagagacgagccggtggagcaggacgactacatcttcacatttgactatgtgctgttttaataacgcataattatgtttgggagtgatcggacccaaattttttgtaattatcccttccgatcaatgtgatcagtgtttttgagcagaattgcactgatcagacggcccaatttggtgcacattaatttgatctggtgcacaacgtttctcgcccgaaaaaattttcagctatattttagaaaaaaattttttgagaaaaactttgtaattcatcacaaacaaaatttggaaaatcactaaaaagttttctactttttcttgtaaaaatttatcggttttaaaaatttttagtttttttcggggcggaaattatacggaggaggcggggacggtctgctcacgaccggatcgcctctgaagagaatccactgctgatcattcgcttcaaaaaaccgattagatcaaagagagaggcctccgtgggtctatctgctgatcactttcttatcattttctgctgatcagtcatgctctcaaaaaatgatttaaaaaataagagacggctcttaatcagtcaaataaaaaatagttggctttttttgcagcaaaagcgccactttctactcgacgcgtgccgacgggggaacctggcccgctttgttaaccattcgtgcgtgccgaactgcttcactcggttggcattggtggacaacaacaacaacgatggtggcggtggcgacacggccaaggacaatatgccgcgactattcatctgcgcgagtcgccgcattttggccggcgaagagattacgctggactacggtagggggaggaaaatggatggatacggtaggacaaatcttttgaggataattgtaactgcggcaggtcttaatgccagcgcagccccatttttggaactttggcattacggacgacgacaaatttgacattttccaaattcgttaaacccaaacattgatgaaaaatcattacgaaagcatataaaattaaaatctaggacggataaatgatcattgatcagagaacttaattaccagaagagt

SEQ ID NO: 11762 - DNA, 1703 bp, Heterodera glycines
  unsure (1)..(1703): unsure at all n locations
gaagagaatccactgctgatcatcgcttcaaaaaaccgattagatcaaagagaggcctccgtgggtctatctgctgatcactttcttatcattttctgctgatcagtcatgctctcaaaaaataatntaaaaaataagagacagctcttaatcagtcaaataaaaatgttggctttttttgcagcaaaggcgccactttctgctggatgcgtgccgacgggggaacctggcccgctttgttaaccattcgtgcgtgccgaactgcttcactcggttggcattggtggacaacaacaacaatggtggcgacacggccaagggcaatatgccgcgactgttcatctgcgcgagtcgccgcattttggccggcgaagagattacgctggactacggtagggggaggaaaatggatggatacggtaggacaaatcttttgaggataattgtaactgcggcaggtcttaatgccccatttttggaactttggcattacggacgacgacaaatttgacattttccaaattcgttaaacccaaacattgatgaaaaatcattacgaaagcatataaaattaaaatctaggaagaataaatgatcattgatcagagaacttaatttacccagaagagttacagttttaattttgtgaatccccccaggcgctgcgtggtggcgcgcgaaatggacgacaaacgcgggcatttgttgccactgcaaatgcgaaaagtgccgatacaaaacgccaatttgaaatggaattaataatattttttttatttcctcaaattttgtccattttccctatttttgatacatttccttcgtttttggtcatttttcacttttttgatcatttttcatattttttgtgaatttccatcgatctctctgcgaaatttatttaaattttatataaaattttcattcttgaattatttcctcccattggccacattttgaataaaaacatatttttcttttgtcaaaatcaaataaacaaaaagaatcaaaattttcgaaacatttggcataaataaaaataaaataattcaaaaaatggaaaacaaaacgaaatgaaaaaacaaaaacatttgcaataatttcacaattttttttgataataattaataataatgaatgataatgataaattcggtgtgaggcaaaggataaacaaagaaagaggagagagagagagatgaacaaattaagggggctgagtgcctgaggtatggttgagattttgtcgagaaaaggagggtcaagaaaactttggacaaatgaagacgtaatgaatggtgccccagggaaggggggggggcaggttttttgaatggcattttctgggagaagtgtagaaaatgccagaataggataggcggctcaattgaagtaagacttatttgagtccgctcccccgggcaaaacaatttgataacaaaaacagtaatgaggtgggattgttggacaaattgtgtcgagaatgggcacggggacgacggcacaacaaatggaaaagaaagagaacgaacaaatagcaaaactgctgatctcgggcaatttctaaaatcatcaatgatcaataatcagcatatatggncaatcatcatatcatgctacacatgagggggggggggggggggggggggggggggggggggggggttttgtgttatattattttttttttttttttttttttt

SEQ ID NO: 11763 - DNA, 4992 bp, Heterodera glycines
  unsure (1)..(4992): unsure at all n locations
tatcgcaaatgataagtataantttttctctaaatattagttttcttattgttcccttcttttctttctctctgtttatatcactcatgtgggacggaatgacccctggttgatcctctctaacaccccaggccatccatctgagatgaaggtggacgagctgttcattattgtaatgcgcagcctggtgcgtgagtgtttggattggggaccgaagggcgaagccgttcccttgatgtgtttactcacttttttcaaagggaactctaagaattctgatatgccttcaaatctatcaaaagagttgcatactttctttttatcatttctctttattctctattttacacttgtatttttcatttgaatgtttattcagaaataaaattgaaaaaatgtgtcattactaatataaattaaccaaacaaaaaggtatttaaggagagaaatagtcagggttttgtaactcaatttagaaattagaatgtcttctacttcttcaaagaagactctccaatctgtagtggagcaagtaattcaacaagacgcagaaataaaaagcagtgagaaaccactaaaacagaatgagttggaaaagagtgaacggaaatcaacccacaccgtttataagttgcttgatcatcagcgtttcttttggaaattggctcgaccaaagtttgcagtgatcaactttctctgcccagggtgtcgtcgaattaactataagcacaatgaccagttcaagttgatgggtgaaaatgagtttcactttacccaagtgatgtgccccggttgcgtaaagtacaatatgatgcagactgatatttataataaacacactaagaacccccactaattgtatttaagattaaaatttaacattatataattaataaagatgattgatgaaaaattttttcacttgaacgatttgaaattaaaacttccttttggaatggtgataagtggaccatctagtagtggcaaaacaacatttttactaaattttttgagagaaagagatgaattgattagcccacacccaaaatcggtgctctattgttatggtcaatttaatgatagtattcctgtactacaaaaaatgggtgtacatgtgcacaaaggacctcctagggatgaattgctgagctctctaaagaagcctctcttattaattctagatgaccttttaacaataattgatgagaaaagcctatctgaattattcattaaaaaagctcatcatcttaatatgggagtgattttcataacccaaaatttatttgaaaaaaaggtgaaggtagcccgaattaattcacaatatattgttttaatgtctgctccgaatgctgcacttcaaatacgtaatttgggcgttcaactgtttccaaaaaatcttgcatttttcctaagtgcttataaagatgccactttatcaccgtatggatatttatttttggatttacacccagcatcaaatccattgctgagaatacggacaaaaatatttaaagaagatgaagaaaaagcattgtatattcaaaatgattagtttacctaaaaatgttattcaaaacttggattttttaaagaaattgacaaaaacaaaagcttttaaaaagagacaacaaatatttaaagaggctactagtgaacaaattgcattattaattgaaattagttataatatattanaggggtacttcccgctcacgaagagacaaaaatatagacttttaccatacgcaaattttgtaagaaaattagcaagagttagaactgagaagggtgcaaagaaagtttttcaacaaaacggtggtgattttttcgttaatttggctccattattattgccagtattaattgccgcgctaaaatatggagaataaattattcttgttccttccgacttgtacaaaaatttattaaaacctgagtctggcgagattaacgttgaaaatgctaaaaataaattgtcatcacttttgaagcagagaaaattagacgctacttcaaaaaatttactttataaccaggaattgaggcgtttcttgaaacttaggaaggaagttgaagataaaccggtaaaagttgagctttcagatggatctttgatggtgtttaaaccaaagcagcgtgaaagagatagcaaaattcctactcaaattgttaatgacgaaggattggatgaaacaggctctattccaacacttgaagacccttacactactgctgaagagagtgatgctgagccaacaacatcaacaccaaagacgagaccattgataagaccaatgcgtgtaggaacaactaaatttcgtcaaaagcaaaagtcttttgtagtcaagaaacaacaaaaaattatgtcaattataaataatgaccctgagaaatttggggttggttctagaggacatatactgagagctgatggaacggcatatttaaaaagtaatgttaatcaagcattagagcgaatattgagacggtcacccgagaatgctccatcacccataggtacaaaagctttagagcaacgactgagaaacgacccgaggactagtggaatattaaaacaaaaatttaatgaacaatcgggatcgggcgttaaaagtaaacaacgaaaatttataattaaaaaatggaaaagttactgaacaaattgtataatgaccctaattcacctgcgtgttatgctggacaggaaagactttacgaagaggcaataaaacatgactcttcgatcacaagaaaagatgttgaacactttctcgagggagacagaacatatactttacataaacctaggcgtgttcgatttaagaggtcacgaacagtgccctctggattcatgactgatgttcaggttgacttggcagatttccaaaaattatcacgaaaaaataaaggattcaattatatattgttgggtattgatgtgttgagtaagcgggtctttgctgcacccgtaaagtcgaagaatttcaaacacatgagagaagcgtttgacaaattgataagtcaaatgcctatggttcctcatagaatattttcagatagaggaacagaatttgaaaatagagaaatacataaatatttccaagagaagaacatacaaaagcacaaggctcatactagtacggttaaggctgcgctagccgaacggtgcataagaacgcttaaacaacgactatatcgttattttagtcaaaaacatacaatcaaatgggttgacgttttgccaaaaattgtaaatgctttgaataactcaaaatcacgtattacaggtatgaaaccagttgatattaacccgggtaatgctcaaaaaatttggaaaagagtctatggagatgaattttcacgaaaagcatatagaaagccaaggttcaaggagggtgaccatgttagacttgcaaagtataagtccagttttgaaaagtcataccttcccaattactcggatgaaattttccaagtttacgatattaaaaaggctaaacctcatcggtatggaataaaggacgacaaagaagagccctttgatacacgtttttatgctgaagacttggccaaaaccagaaaggacgcggagacgacatatcgaattgagagagtgttgaagactaggacaaggagtggacagaaggaacatttggtaaaattttacgggtacaaagaaccggagtggattaaagacaatgctattgagagatgaatgtatttaagtatttattatttatgcttttaataaaaaataaaatgtcaaatttgttttacgttcttttacctagtgactctcctggttatgacaataagcctaataaatttagggttcatttgcctaggaccctaacttttggaggtcattggttgtgtgggttgcacagtataatttatacaaattcttggcccgccattggtaccacagagaaccaatggattaaggtgcatttaaaaaatggtgataaaataaaaattgatattcccgctgggtcataccaaaatgagcaagaattggaaaatgctataaatgagtcgataaaaaatggtataaaacaaccggctacaagagttaaaagacaattggaagatggagtggatttgttttttcattataatccagatgattactgggaaaaaattgaggaagaaaggcaaagatataaagaattgttaaaattgatagatacaaagtcaagagaacgtgatgatgagacggacacgcataggaagagaaaaatagaggatgaggaaattgaccctctccaaaatcaatcattgactaagaaagcaagaatagaggcgcttgaagaagcagcaaggcaaagagatgacgggaaggaggaaaaggaggagagaactggtcaagaattcctcgaaatgtattctgttaattatagggagaaattaaatgaagttcgattagaattaataagagatttattcaacattcaagaccatatgaaaaaataccaaggagtaacagatggtagaacaattcaggctctgaatgaggaagcattaagaatgagaacagcaatgaaacacagaagaaaaaatttgaatgcttttaacaaggctgtattgaaaaaagatttacaaatatcagctgaagaatatgagaggacgagctatgaacaaaataaggattacgttgagccattttttgatagtcatccaacagattactgggaacatattcataaaaaatatgaagggcttcaagacgattacaaaaaaattcgcgaattaagagagcaacaacaatttttaactgatgaacagaaaaaacagtcaattcaggatgaaattgatcaacttcgtcgtcttgtcgattataggaaaaaaagatttgcagcgttagagtatgaagctaaaaagagggacgcactccaacaacaaccaatggctttagccttgactcatggtgaagcactgaaggaacgaataggaaaaatagagggaactaccaccacagcagacgggaaagag

SEQ ID NO: 11764 - DNA, 3446 bp, Heterodera glycines
ttgctgtgccctcagggggcatccattggccgggccaaactttggccaaccgccggggcgccagcgacgcgacaggtgcggtttattcgaattttgttatagtttaaacattttaaaatgcttccgcccgcttcgtcattgtcgtcgtcatccttttggccaaccattgaaatttagggaaaatttgtaaaaaaaaaatgtaagaatttatttgaaatgggaatcgttgggccaaggattggcgccaaataaacaaatgtaattttttcggggaggatggaaataatgctaagcctagcggattttcggacatttgtggcagcatttaagccacccacacggccaatttatcaaaatgcgccaattccaagtgtatgtaggtggtaggtactagagaccggacaactagggtcgaggattccgaatcggggtcccgaccgaatgccgatcccgattaatctcgaagattttgggaaaacgatcggtacggattccaagaacgggatcccgaataaatcccgccggatctcgatcccgtccggtttctagtagctacatgcatgcatatataaagtaggcatgggaataatttttggcaaaatttgactcataaccgaaaatcaccggatgccgaaatcgaatcggtggagtgggcaatttaaggcaaagaaattcgttgagtcccggagcaaaagtcgaaacagaaattgaggctcagttctcgagagtctcgggacagaaatttaggggcaaaagggaaaaccatgccgaaaaatgacagaaaatttgggcaaaaaattattgaaaaataaataaataaataaatggacgaaattttgttgagaattaatttgtgctagaaaaaaagtgacacataaaaacaacgcatgaaaaaatgtgatgatatgataagtaatgacgtgacaaaatttcggggacaaattttgacggaaagtttaaaaaaaaatggggaaaatgacggagcagaaaaagacggacggattgattgaatgattatggccggaatgaattaatcaaatcaaatcaaatcaacgaccgaatgattaaaaaaatatatttgcaaaaatgcgcgaaaatttatttgaaattttaaaataaaaaataaaatatttaaaatggcaaatttggaaaaattgtgcctaaaaaataagaaataataattttaattttgaatttgaaaaaaataaaaattgaaataaataattaagaaaatggaagtattctttcgatgattttgtgaatatttaaaaaatagaaaataaaccattttaatattgaaattttactaaaaattcaaatttttctaaattttttttacttttcgataaaaatacattttataaaaatataaaataatttttatttctactgatgaaaaagtcgcttaagcttattgttagaaggaagcagcatttctgctgtggataattagtgcgcgaaatttgagttaatttgcgaagtgcgcgaaagtcagccgacgaaaaattggagagacaattttaaaatgggaaatttgggggaatttctcaattttcaaagaattaatttattaatgaatatggcaatttaatgaaaaaaggcacaatcattttcatcagaaaaggcgaatcaaatcaaatggtgcgcgaaattttcgcattttttaagtttttcgtcagagatcggtgccgacggaagtgtggggaacagaatgtgccgtactcgtcggagctgtaaaaaatatattaataaaatatgaataatttaaatatgcaattaaatattaattatttattcaattaattaaattttttgaatattttatttttatgatattataagtatttttttatttattaaataaattattgtgcttttgtttaaaatttaattaattactattcttaaatttaattatatggtgtctttattaaattttaagtgatttgtgtgtttataatttaatttaatatcaataaataattaatttttttatttttcataaattaattattattcaaaaaattaattatataaaattgatgattaattacgtttaataattttatttatttttaattatttttctcatattcacatgctgttgttgtcatttcggcaccgctgctgatcatttccatctcggcacgttctttgtacgaatttgatgtttgcatttcttcgctaacagtgcgctcaaaatctgaaaaaacataaaaggtaattttaggaataggaaaaataaattttaaaattgatttaattttaattattttttttggaaaatttaaattttgccaaaaagtcaccttcaatggttaaacggcgccacgtttggctttgctcgcagaaaatctttaaaaatattattaataattatataaaaagtaattaaatatataaaaatgtatttaaaatttaattaaacaaatttaagaaaatttaattaatttcatttcgcataaaaatccccaaaaatgttaaaaattaatttcaaaatgtacaaaaaaagcatagaaaaattcccattcccatttaattagtattaaaaaaaatttctaattaaataaatcaattaaataattaatttaaatgcgaaataaaattctcattaaaataattaaaaaagtataatttttcccacttgctcttctcgcaaaatgcggcccaaatgcacaatgtatcggttggccaatcgcagcgttcgaatgcgcggaatttccgactttacgccgggcacttaattaattaattatggaattaattaattgattggccaactaattaaggctaattaattaggctcacaaagtgttgtcaatgtcctcatgtattgtttgatctgcaaatttcgttggcgctccttttcactcgattttttgcgctttggccgttgaattggcagcagtgaatttgttggcacttttttggtcgaatttcgcagccgattggttctaataaaattttaatttaaaaaaaaatcgaattaggaaattccatggaaaataaattgtaaaaattgatgacggcttaaagataaaaccaaatttttaattcaccaaaaataaagctttatcaatccattaaaaattatttcgaccaaaaaaaaatgctataaatcaaaaaattggcaaatttttaattaaaattaatgtggtttaatcccgatgccgtcttacatcagcttaaaatttgaatttcaagcccaaaaatggaaataatttgtctgttttgtgcacaaattttattcactttcttggccgattttggcacgacaaaccctccgagaaattctgatcatggcactcggaaaagcctggaaaagacaaaattaaatttaattaattaaattaaattaattttttatagtgaccctgagaagaagaagaggaggaggagggaactagtagggcggaccaaaatttgacgtctaaaatggcaaaata

SEQ ID NO: 11765 - DNA, 964 bp, Heterodera glycines
gtcctcatgtattgttgatctgcaaatttcgttggcgctccttttcactcgattttttgcgctttggccgttgaattggcagcagtgaatttgttggcacttttttggtcgaatttcgcagccgattggttctaataaaattttaatttaaaaaaaaatcgaattaggaaattccatggaaaataaattgtaaaaattgatgacggcttaaagataaaaccaaatttttaattcaccaaaaataaagctttattaatccattaaaaattatttcgaccaaaaaaaaatgctataaatcaaaaaattggcaaatttttaattaaaattaatgtggtttaatcccgatgccgtcttacatcagcttaaaatttgaatttcaagcccaaaaatggaaataatttctctgttttgtgcacaaattttattcactttcttggccgattttggcacgacaaaccctccgacaaattctgatcatggcactcggaaaagcctggaaaagacaaaattaaaattaaatttaattaattaaattaaattaatttttttaatgaccctgagaagaagaagaggaggaggagggaactcgagaagcggaccaaaatttgacgtctaaaattagcaaaatattaaataaaatttatttaacattgaaaattcattgtttttaccgtcatggacaaattgaccaagcaaaaaattgtcataattttccattttttcgaagaaattttcctgaaaaattttgtccatctgttggggcgacggaatgccagaaaaagaaaaaataaaatggggaaaaagaggcaaaagttttaaggaccaattggaggcggacggacaaaaaaactgagccgagaaaattgcgtaacattgtgagatgaaagaaaaatggagaatggcgcaaatcttttgaggattttgtggacagaaaaaaagaattattaaaaaaaaacatttgtat

SEQ ID NO: 11766 - DNA, 969 bp, Heterodera glycines
  unsure (1)..(969): unsure at all n locations
ttgcatnngcctgcannggtccactttcaatgggcaacnataaaannattgttggcacttttcggtggcaacataaaaattgttggcactttcggtggcaacataaaaattgttggcattttcaatggcaacataaaaattgttggcattttcgatggcaactgaaaatttgttggtattttgtgtcctaaatttgttcgcattttcgatggcaatatttcttggcactttcgatggcaacctaaatttggtgtttggcattaaatttgcaaagactttaataaggacatcactctatcaagtgagcaattgcttacattttgccaaatttatgacgtaaagtgtttattatgaataaattttatagagtccggaataattaggaatgttgtcagatttctcaggtcccgattttttttttggaatttcaagatcagatcctggcatttgattcaaatcctggaaattctgtcctgtcccgcccgactctcaactctcgaccctgactttgtttttgaaaattccaggctctcggagacattttttcataatggcaaaaaggacaatccgcaaattgattgttgtaataataaccccccaggggattgtgccattccctcaggggattgtgtcgttcccacccaatctctcccggattgagtcttaaatttttcggcactttaaaaacaaaaacaaaaatttttttttgcggtctctctcatatggtctcttcttgagtgtcctcacagaacacacagttttagtgatggagaagatgaaaaattggggcatcgtaaacaaatctttggcggaaaatttccttttttttgagggatgggccgacggatgacgcactttgcccgaggcaaaaattgcaatttttgaattggaatctttttttaattttttatcattcggttacccgcctcaaattaagtaagtatattcatttcaaggattataaaggat

SEQ ID NO: 11767 - DNA, 4613 bp, Heterodera glycines
  unsure (1)..(4613): unsure at all n locations
cggcaatcatttcgtgtgcttccgaattcttcccggtcatgttggttgcccattggttggtctgtggacgagccgagcaacgggctgacgaactgatcaggcgtagacaggtgggtcagttttagccgtggtttgtgcacaggattctgatcagacacatagacagacgcacctgagactgtttgaatagccgaacaaagaaacataacggggtaaagctgatcaatcgtctaaagttagacacgcgatcaacttgaaggggtctgcctgcatggtggcataagattactgatctggtgttgattgcattgcgcacaacaatgtgctcagatagtggggtctgctctgatcagtttcatatttgatatcgttaatcaagtgtccttgtcttgtaaataagcaaaatttgagttcaggaaaagaaaagtgtgcgccgaatgttgcatggtatgatgggcgatgtgagcaaagtttacggtgagaatggacaaaaaaaaaagctcgagatctcgaggatgttatgtcattatcacactttgcttgtcataaatatgctgccctgttctgtgtgcaggtgttgatccaactgcacagcatcgccgtgaactgcccgcacttgacatccctccgggcctttcctgcgccctattgctgctcgcttcggtcaccgccgtgctggcactgctcaattggttcgtcggtctctactttgccatcaagtgagaaacatgcaacaacaacaaacaaataactataattaccgtaactttctgaaattgagccccccgggggctttgtttctcaacccccctcaaaaggggggctctaattcaggggcggctatattataggtaaaaaaaaaacaaattctttctgtgttgcagttatgatttgatgatgccgtccgtgttggatgattttgtcgaatgtgttgcctctggctgtcagctgattttattcggaacggtcggtaaaaaaaaaaaaaaattttttttcgactaataggtatatgtgttacaaagagttgtccaagagtcatgaatggcattctcactgaagtgcctgttcccctgatctttttcttcacagcaaatctaaatttaaataaaatccaagtttttttacaagaaagtttttcaagaacaaaataaattggaaatcaatagttttttagaaaatttttgaaaaaatttagtaattcatcttaaaatttgactccttctgtgttttcagctttggtggtggacccgacgagtgatcactttcaagcgatgggacccgcaccacaaggccgagtcccggggcgatttggtgctgatcggcggcagtgccgcctttatgactgtcaaactttttctccaagtaaaaaaaaaagaagctatatccaattctttcctcccccccccattttttcaggtgcttgagctgaattttcaacgcattgacggctttttgccattgtctgaggccatcttgcgcactgcctccctggtgctcatccaatccgctgaatggctccaattttgcagtctacaacgtgtgatggcactccatttcgagtacagcttcggggaccagcagcagggctgcccatcacttaattagttatctaattgggatcatttcccacacaaagggatgtgtacgctactcgacgtttcctgcccgttgtcacattagcagcgatcattgtcaactgggttggctttggcaccacattttttgaaacgtaagttttaggccagaaactgtacataaagtgagtggagtggtgttacattcggaatgatcccatgtgagatttttggtctcgacatccaatttaataaacatcacggcacggcacactttttgatcaaaatttgatgaatgatgccatttagaaacagcatcaagtatcagctgggtttggagcatcgtcacttctcacagtcaactctgatcagtatgatgtacgtgtacatgttataacaagagttcgaaaaatatggataaaatggcaaaaacatggacatatattgttttttttccaaattgcgggtataattccatttttatatgaaaaaaacgacctaaaaagcgaagttttttatttgttaaatttttatttttgacataaatttacaatttttaagaacgattagaattaaacagaactctcgataaattttccggtctttaagaatggaattccgcatgagggccgttttaataaagagattttcgaaattttcatgcgtttcaggcgcatcccatagtcgagaaaaaaagggatttccagattttcgaattaaatatgattcggagattcgggttgagcatttttttttcgtttccatgttcagtttcacccaaaccatttatccggccgactatctgttctgtttcactgcagccggttgttggacggatgtgctgcttcgctacatggagttgggcctgttccagctgggcccaccaatggagctggacgagttggaggagttggagcagcgcaggcacagctgtggcgaggagggcgccgtttggggcacggcaccagggcacatggcgatgaagaaggtgggcggctgttcggcttgaacacgttttcttcactgattatgggacagacccccaccaggcgccatttttatcaaaattttgttgccaaagattccattcgtctcaatttttatgtgtgtttagagtcatttcggcaatggaatccatgccaaccatggtgaaaaatggatgccaacgcatcgtccgctgacgacgagggcggcgttggaagtgcccactgatccgtaccgtccggaccggccaatacattttgtacagccagtggtgccaaaagaagaaattgttgatgatgacgaagatgtagtggaggaagtgatgaaggtgggcaatggaataatggtggaagaacaaccaaacaccatggaaaaggggaggaagtggaggaaaaggagagaagggaaggcacagtgggaggaggaggaagaggaggaggaaaagcactttgagagggagagaaggaacagagaggaggaagaggaggaggaaaagcactttgagagggagagaaggaacagagaggaggaagaggaacgcagtgataaaagagagaaaatgggaaggagaggaggaaaaagggagggaaaagaggaagaagacgacagaagagaaaacgggcatcaaaaacaacaacagcagagagagaaagacaaaaaagaagaagcaataaatgcagcagcagaaggagactgattcgttgttgataagagaatacctaaactagagttcaacctggacagatggactggttttttcctgcgtccaggtccaggtcatttttcggcaacttcgctggtttttttcctttggcatggcttttactggttttttagccaggtccaacatagaatcaaggtcaaggccgtttttcgtttcaacctagattttccttggacttgatttttgtccagaaaatccaggtccaacatggaatccagtggtccacgcgtttttcaaagggtcgaactctagagacaacagtgattgtgagagagaattaaagtgcaatataatattttttatttttatttaaaacaaacatttttgaagtaaaatatttaattaaatttttgaaaaatttcacaatttatacatattttatttccaaacaaaatcctcaaaattctcttgaaacttgtattgggggatcggggcagggaagtgcacacaccacaccattcattaattaagtcacaaaattacgcaccaccaccagctgtttaaggcgcctgctgccgccgccgccgctgatcatttatgatcagccaaccggacaagccattaatttgggggggggggggcggcggataaaagttcccgttttgggtggcgccgcgtgtctcgtgtcattgaaaatttatttgaatatctctgtgtgtatgtgtacaaatttgtatgaattgtatatgacacacacacacaaacaaaatggtggtggtgatggaaggaaagcaaccggaattttaatttattccaaaatttaccagccccccggggcatcattaaattctcttctttgtctgctgctggtcgccgcagaatcccacccatctccgccggcagtggcagtcggcagctctttcggcggcttctaatcctccgccattttcccatattccaattatctcatccattgcattatttttgatcattttctgctgctcctgttgctgtaatactgagcatcatgttgagcaatagcaattattcaaagaataagactgctgctactgctgggtttggccatcgtcaaaggtaattataattaatgagtgaataaccagcacagcagtagcataagaggtccaacgactccaaggagttcaccctctgtcaatcttattttaaaaaaataagaggaaaaaacgcttaacgtaactatgccatttacttggccaattctttcaaaaagaccaaaataggttttatcatcattaccgggatttaattatgaatattcaaaagaaattaaaatctaattttgtcgcgcgcataaaatggccccaaattcgcaccanaaatttgtacgcgtttaaaggacttccacagcg

SEQ ID NO: 11768 - DNA, 1241 bp, Heterodera glycines
ccccccaaatgtggcaaacgcggacttttggaaacttttttgttgtggttgaaaaagaaagcccctggacgaatttgccacagcggttgctgaaggggacgactttttttggtcgacttgttgtcttccatgtagtcaaaaggtgaaaaggtgacttgagcgggtgaggaccgcaaatttggcactttttcccctgcaggaatttgttccagtcgcccgttgataatgcagtcggtgcagatgatggtagccgctgcaaaagttaacttcatgctcgagccggttctccacttttttctcctgtgtcgcctcaaagtcatacacgatgatcctgtatggcttaattcgttgttgcttcaggggttggatgaagcatttcgtgcaggggttcatcccgtcgtcgtcgtcttcttttatatggaattgtttgcaaagtttacaaaactgttccccacatttatgcccaactactctccatgaacgcataatgttataaattaccccacaatcttcgcagcgctgaaatttggtgcacaaatccttgtggaggtggcgctcataacagctgttgttgtaaaaggtgttgttacagtgatcacattttttgatgtatccttgttgtggctcgcagggatagtcaacgcgcccccgaaacgaaaattaaagaaattttcaagaaaagtgggcaaatttttttgaaaattttaagcaataatttaacccaaatggcaaaaattagtctttttttggcaaaaatggctaaaattcctgctttttctccccggcgctgaaaattttcaaataaaactggagaaacagtgttttctgttcaaggtgtggatgagcagcaagttgtcaagcgtgccgatcgcttctattgtgctttgcatggccaacaacaccaaaggctcatacaaaaacagcttcaaaaagtgcgtgggtatgacgacgacgacaatttgatgatgaggacggcacgaaaaatgccatcgttgtcaactccaaaactgtcaaattgtgccatcgccgctcacaatgatggaacagcagcggcgtggaagagaggggccaacatgacgacgacgaggacgacgaacatgacgacaactgttgatgaacaacaacacaatcatagccgatcaagcagttacggtgaaaaatgtagcaacaacagcaacaaaaataatggtggtgatgaacatcatctgctgctgcaaaagtggtgggaacgccggacggag

SEQ ID NO: 11769 - DNA, 2294 bp, Heterodera glycines
  unsure (1)..(2294): unsure at all n locations
attttctggtgtccattttccggtgtccaatttaccggtcccccctattgctaaatctacggcatatttgtccccgaaagattaggggatgacaagggctggagcgtggacagaaaaacccaaccgctaatggatcgcgcattcaaatcgcaaaaaattccccgcggtttcggattcaaattatcgcagttgcgaatcgcgaaaaaaaagtgccgcaagtcacgggtcgcgcgttgcggatgtgctccactgctccaccctcaagtctcttaactatacacctattgtggctagttcccgatcgcattgctcaactcaacatttggccaatgccttgccaaatttgaatcctcttttcccgtgttggcccacccctgctgctgtccgaactgcttcacccattcgtcccatccgcttcattttccggctccattccgtcgtccgtcgttccatcgctctcttccgcctccgttgtttcatccccatcagttccttccgttttcttcgtccttcccttcgtctccacagggcaaaaaagtgccgaattcgcctcagttttctattgttgtcctttgacgaatgttgagaaatgaacatttgtctggctttttctgctgcttttgtcgactcatttcctataaatttttctaataaaaaattatttattatacaaaaaaaaaatccaaaattttgacccgtgactgaatcgaattttacatcaaaaagagaaaatttatatatattgtaaataaataatttttactttttgatggaattcaataaaacaactgaaatggtaaattaaataaaatttatgaaactagaaagcaaattcaaaaactaaaaaataaataaaattattggggcaattaaattattattaaaaaattttccgattccttttggtcatgctccgacaaaggcttttggctattttcttaaccacatccagcaactaaataaaactcactttccgcccatttgttttgtctgtgaagctgttgttggtcccggctggaccgtatcaatttggccaagcatttggccaacttcaccggacatattgcctcctttgactcggccacacactgcttgaacaacacttgttcaaccaatggaacagtgtccatgagagtatttgccttggcctttaaaaatcaatgctttattgaactgttgggatttttaaattgcgttaaaaattaaggcgcaaaattttcgccgcggaattttggcaccgtaaaaatttcaggtattagacccacaagccgactttgtcaaatttgtatcgacaaaaaatccctcactggcccctaacaattttataacactgtactttaattaccctcaacaaagccatcagtgcagtacgacgaagaaaaatatcaattttggccggatttagctcaaattgatcgggaattgtcgtcggtatctgggaagaagaggaggaggaggaggatgaggagtggtgcacaaattgaaaaaggatgacactgatcagtggaaggaggagggcaaagttaaatggcattcagcagagataaaagtatggagagaagaaaacaaaatggaggaagtgatcaggaaaggaaaagtgattggaagcagcagcagcaagaagagaaaaagcttatcctcagccattatttgtctcgcgtgctcgtggcagcagcagcagcagcagcagccgaataatccaaccagtctgatcagtaaaggggggatttttttggatcaccggcgaagaaattgtgatcagaagggataggatttttttggatcaccggcgaagaaattgtgatcagaagggataggatttttttggatcaccggcgaagaaattgtgatcagaagggatgggatttttttggatcaccggcgaagaaattcaaactactaatgaacgagaaaaaagtgctaagaatgcattcattttcatttggttatttattggttgatggtcggtcattcttctgtggaaaatttattacggagtatggcgtaaagtaaatgttaattgtactaatagaaccgataaaatccaattaagtcaaagccccaatcaatactgaccaataaaaaaatgaatgagaatgaatgaatggaattgnnggtagtttgagtaatttaatcctataaattgtacaaatttgttggctaattccaattgatattgaattcgattttattttttattgaattttnaattgtttattttttcattatataatccccactaaaatatggaagcaattatttttatttttgttgctgctgatcaaaagttgatt

SEQ ID NO: 11770 - DNA, 3159 bp, Heterodera glycines
tgcaaaaattctccttttccatcaaaacttatttattaaagaagaaattaattttatttaaaaatttttgagcttcttttatgtaatgataaactaacagttttcaacaaaaatcttaaaaaaagattaaaatagatctctatgagaaagaattgcctgagaaagaagcaagagaatctaagagattaaatttttatttcctccaactttgctcaacattttaatccagacccccattcttaccagtgaacttttggacccggacctaccgggtcgggtaccgggtattggattttcaaaaaaccgggtctgggtcctggtattgaaaaaaccgggtatccgggtctgggacccggtcgggtacccggacccggcctaccctagtttttacctcaaagaagcatcaaaattaaaattgtttatttggactcatgaccaaccaaatttttattcttgacttaaaggctgacaagctacaaaagtttttcttttttacaaaatacaatttcgataaataaatttaagtttatttttcaatgcgataaatgaacataaagattaaaattggactttaaaaaaccaaaatttaaaaaataatgaaaccaaaaactcaaaaatatttaaattttcatatttcttagattttttttctgtctatatatttccagtttattatattaactttttaaataaatttataaattttttggattaaattaagcccataaatttgattgccacattaaaataatgtaagcctttttatttgcttcaacacctcccctcactcgtcccatgcttaatttgttgtatccaccgcttcacttacaaattagcgcaactaaaagcacttcccccagcaagaacagacgacctcccataaataagtgaggcaaaaaatagcgtcgtccatcaaatgggcagagagtgaatgggcgggggaatctccgtgccgccgacggggaccggcgggcgggggcgcttggaagtaacacttttgtcgcggcgacttcatgccggccgacccctttagatacgcttcatcgcccagcagcagagcaaaatatccgttgcgcgatgaacgacgaccatttttatccggagggggggggggaaggaagctgagggaatctaattttttttatgtgtcaattttcgcggaaactcaagcaaattgtgaacacttgactggattggaactcaatggacgggaagagggagggaatggaggagaggaacggcgggacgggcgggggggaaggagggggaggaagcaactaaatttgaacaaatttcaacattggatgatcgggtgggtcaccaaatcaaaaactgacagcagcaagcatttttcaacactcaccacagcttcgtacatcagaagagcgagcaggaagggcgatgatgatgaagactaacaaaatttggctcattatatccatttttctgaggtattaacttcttacgggggattagcaatatctgtcgccctccctcatgaagtctctctcgttcagcccctccctgtatgatgatgccttcggggcatatgtatccatcccaattatggggtacagcttcaatcgacaaaagtccttcctccgcccccgcccccgtcgagggtttactatgccttgtttttcgtgtcatttcaagagggggatgaggcgggggggggatcgatgaccattgtgtgttattgggtgggtggttttttgtttgaaatgtgaagagtgtgaagcgggggatgggggcggaagacgattcaatctcctgctgccctttcaacaattatgtattcgtcattccattcatcatcactcctgcaattccttaagcaaaatcccgctcatttgtcacccaccagccgctgaagccgttaaatcacagcggccctcacagatcgtcgtacaaaacgcaaatttttatataaatttttgaagcattcaaaaaaaaggttacattaaaaagtttaattggggtttttttgaattctcgctcacgcacgaattttagtaaaaattatgcggctttttcaagtttttttttcataaaaacattcgaaatgggaaaaacggttatgaacccagacattgacaccaattcctcccccaccaccccagcaggagaaagttgtacattcaatacacccgcaaaatcattccatcggacgctttgtcgcctcaattatcttatgcatatcacagctcattgagttaatttgattagacatatcatatcgggttgggggggggggcgggagtggtggtgattggggtgtgattttcccctttgatcccgacagaagatcattatcatcatcataattatcatcaccatcaaatccaaatcttagagtgcagtttttctacatagcatattagcatgccccttattcatcgccttctcccaaattttcttgacacataattcccgccggcaaaacggccgcttcattccattgaaccgcttcattgtcacagccgccaaatgcctccggctgctccactgatcagattcctaatcagtcgtcgtcggcttatttcggcatgaacgcctttggaagtgtgttcaagtggtgtagttcacacatttatctgccctcataatcgtttatccctcaaaagcctcacccaattaattattcattactcatatctggataatgagcaccacccaccgcacttcattccactttattattcggttcaaatctcgttaaataaaactcaatgccaccaatcgcccccacccaatttttcccattcccatcaatcttcagcagctttatcgtcatcattctccatgcttaaatccagctttttatcatcagttcacgaaattacccatcccattctcttacatactttgtcattctccaactttccatttttgcacttcaatcatcagtagggcatccaattatatggaaatccatatttttttcctggactgtgggaggcctgaaacgcacgaaaaacatgtttttagcttggtttgaagcttctaggatgggtttccatatccatatttttccatatttcgcgatttatgtccatatttccatattagtccatattttggcatttaagtaatatttccatatttccatatttgtccatattttggcatttaagtaaatattttatgtccatattt

SEQ ID NO: 11771 - DNA, 1203 bp, Heterodera glycines
cccccatcgttttcccccaacaaatttttttttaaataaccaattaagaaatttttcgaaaaaaattttttaagaaattgcggctctagtgcactttatgagtccaatcgacttttatgagtccaatcaatggtttttatacaataactttgtttatgctcgaacaaaccctatctttttggtatcattcgaaagtacgaagtctaaataatgtaataatacgagaaaacaagaaaattctaacatttcaagaaagttacaaacgaaaataataagtatttacttaaataatcaaatcttttttggtaattgcctaaacgctgcgattttatatattttagcttcgttagactttgaattttcttgctaaaaaattctcaatatttttttttttttaattttttgaaaattctgttaaaaaattttctttaaattttcttgctaaaaatttcaaatggtctttatgatgtgtcggaatttgtttttgtttttagccattccgtacgatgaaacgccgccgcccaaatttgtgtacacattccaaggccctggccgcggtcggtggaccttctcgtgccaattcacttctgccgacgcgttggacctgttcaggaaggggcacggaatgtaccagacaaagaaggacggatgccgctatttcttctgctcagtgaagcgatgcccgtacaaaatgatcggcattgaaaatggttggtttattgtttttttcttttttgcaatttcaatttgctaattagtatttaataatcagcaagcaaagagcgtttcgtttacccttgggaatttaaaaaaatcagaaacataaaattttcagaaattttcgtataaattttaaggaaaaaaaattttgtacattttttttttgttgaaaagcctagtaattttttttacaaaaattttctaaaattttcctcaattttttcttgattttttcatgttttaaaaaaaaattctgttgtgtgaatagtgtcgaagaggtcaaaacattgtggatgttgcttggaccattttttctcaccaaattaaacatttttgctgttatttgaaagaactaaatgcctaaacgctatcaacccgcaaaatttaaaaattcttcatttaaactttttctggccattttgtccatagattttttgggggaataagaatgctcaatttggataacaacaaagggcttggtct

SEQ ID NO: 11772 - DNA, 766 bp, Heterodera glycines
catagccatttgatttttcaggccattcaatatctcgtgagtgcgctcaaacattcccccaacaatgtgccgtgacgctttctcaaagtgcccccctactgacgccctcccaccaatttcggataaaatgcagaccaaatcgtcgtcgtcatcgcccaaaaagcaacaaaattcgcccaaggccaatcgtccgcgcattgtgctcaaacttcggtggaatgccggcggttttttgcccgaccattcgccgaacgattcaacagcagcgagttcttcgtcgtgtactgctactgcagatgattgtgccaacatgaaagtgccaaaaagcgaaacgcaaccgccgctgccgctgccccaggcaaaattgttcgagttggccatgtgtgtgcaggaaatgaggcaaattgcggccggatggaacctgttgttcagggagaagcggtaagatttttgaaaaactcaagaaataatatcagaaaattcaaaaaaaaattttcaactctttttgttttttttctggaaattcagcaaattgggttttcagtaacgggtgtacttacattttcccccgccggtcccccccccccgcatcgtttccgcaccggaaaattaaaaaaaattattctaacctagaaattttttaagaaaaagcccttaggaaattttttataagcaaatttcaagaaaaaaaaaatttaaaaaattttcagccaatcttgggaaatttttgcgaaaaacttagtaactcaccataaaattttgaaaa

SEQ ID NO: 11773 - DNA, 1364 bp, Heterodera glycines
taatttaattttattttattaaatcccgaattaaagatggatgagttcctcgcgcttcggctgcgcaaggacaaaatacagcgttggccaaaagagctcggccacgcgacgatcatgcgactcgcctgcgaacaatgtgctcggctgtttgcttcttcttcctgactgtgccgagaaaattgatcacaactgattggaaggaaaaaatatgtgaaattttgtcaattttagaattgttagtgttgtttttctttgtcccatttgaattttccattaaaattttttgtttttatttatatattatttatttcatttgaagtacgccgccttaaaaaataataaaaaatgccaccttctaaaaaataatatatgtagtatgtagggctaatatttttttgcaaaagcctattttttcctgacagatgagctccccgtggcctgaaacgcacgaaaaacatgtttttttgggctgttgttaagctacttttcgagttattagtgcctattttctaggcttttatttttagagtctaaaagcctaaaaatttttgaaaaaacctatttttgcctattttgtcgttttgtccaaaatttgttaacaaaaatgcaataaaaacgaaaaatacaccccccaagaatcggcctaaaaatttttcaaaaaatacacccccaagaatcggcccgaaaattttcaaaaatacacccctaagaaatgaaaaatttttcacaaaaatcgtcttttaaattttttgaacaaatttttgaatttaaaaattaatgtaaactgatttgacttattttttacatttttgaatgaattttgttattttacaccaggggtgcgatcgaaaatttttcaaaatcaaaacatcgggctcaaaaaatcagattttggggtcgaaaatcagaacattttgcggaattgcttcaaatctattttttagcaaaaatttatcaaatattatatttttcgcctccaattatcgaattaaacaattttggggaggaaatatgcaaatcgttaaatttcagtcgggatcaaaaaatcagatttttaacattttttttgcggcgtatttttcaaaaaaaaacttttggggaatgcgagaggggagagggtccgacggtgccgataggcgccgccggaaaatttttataatttttaatgcgaattgttaacagatttttgtctaaaattggccaaattttgcctaaaaccttatattttcttgataaaatagttacattatgccataaaattttaaaattatgaggttatttaagaaaccagaacaaattttggtcgctaccccaaaatcagaacatttctgataaatcggaacagatcgcagagcacttactgc

SEQ ID NO: 11774 - DNA, 4499 bp, Heterodera glycines
cggcgaatcaataaaaaaattgagatgcaaaaaagttttccaatattgaaatggagtgaaatatagaagaaaaaaacacctttttcaccgtggcaaaaaaaaatcagaaaaaatatttgttttttcaattggaaagggattaagttgtaaaaggtagtgaagagcataattttaaaaaaagtcaacaggaatttgttaatttcccaaaatttttgggctctgatgggggaggagggaagtcaataggtcaaaaggagttcgaatcaacccacctcatccctcccccctttttatgcattgaatagactgaccacgtgtcggttgtccgtcgacgtgaaaaatgttatccatcgcattttgtgttcttcttaaatagaaaagaaatgaggaattcttctaattgtaagtcttctgccatttctcgccttaccaatttctgtcgtgtaaattacttcggaaaagcaaacgctaaatgaaaaagagaagcatggaaggagaaataaagtaccaacagcagcaatttcagaatttccgttctgttcgcatcgtaaacagcactttgcggtgttttatttgcaaatccgacgccggactgccaaatgttctcacaactgtcgactttggagatgttttccaagtgctaaacaatgcaaaatcggcgaagagaacgaaacttgcaacttgaggacacttacaatgtttttgtccaaaataccaatggtaaaatttggacaaaacaaaaggtcggagagagccgtgaggagcagtttcgaaagaggtaactctttttggctgtcgtttagaccggctttttcatcttggggaagatttgtccaaaagaattcgcgccactcattttgctcaaagaaaaatggcatcagacgggtgagaagccgaatacaattgagcatctgaagaaactcatatttaacagtccctaatttttaatgaaaagtacgacttttctgtgctctttttgcgggggattcgtctgagtggctcggaccaaaagtttcacggctttataacacaaaatagaaagtgcctgaaaatcaaaaattaaattaaaattgtggtaataaccctgacacccaatttatttcattgggaactctgaacggattcgaataaaaagtaaatttaaattccaaaaaactccactttatgaaaaaaataaatctttttttaaatattttcgaaaaataagtaggggtgattagtagtattacaaaatcttttgattaataaatctaacagacatttggttgtccgtctcgcagatcacgaataccggagggttgtagcgccataaaaaggtccttcgccgtgttaattggaagcaatttttcccagtctaattcctctccggtggtcgaactcttcgtggttagttcgacgacggttttgccaaattctccttaaattccgaagaagcatttgttgaacaataattgtataccacaacatacccaatgaagtttcggtgttccccattgttgtttgttgttcgtaaatataacttttaattggacgcttctaaaaaaacaaataaaatattaaaaattatggaggcgttggctcttatttcaaggacctaatcagattcttagaaataagaagaaatggcaacaatataagttttttaagatttactttttagtcgaggttttcggaacgccaaacaatgttttcatcgatgttttgaattaattcgaatatggatatgaactgcaaaatacagtcaaaatttttctaaattatttttaacgaaaaaagaacctaaatcgaaattttacacttttatttttgacataattaaccaattaataatattttcgcgtgcgaaaaccaaagccaatcggacaaagtaacgcgctgtctccataaaaccaaaaagtaatatgtacaattgcattgaaaaataaaacagcaaataaaaaattaaaatggcaaaaaaacatgagatcagttcggaaaatggacaatggccattgggcgatttcttttctttacaacgaaaatgtctaaattggtgtttatttgttccatcatcatgtcacattatcccaccctcattattcgttggtcgataaaacttgtcgtcatatggccatccgtcgttgatcttctcgaggaagtactgctgaaaggccttttggcttcgtctctcttccgcgtcttccctctctttctcaatcgtttctttcaatgcttttccttccgcataatcttttcctggcgccctctcatttttggccattatattctccattttgaccatttgttgagtcgacggtatttgtgacggtggtacatcaacggaaaaggcagaaacggattcttcctgctgctgtacaaccgaattgttggtgtgctattgcggtttcaccccaagtgctttcccttgagataagtccacttggatacagcactcctttcgttttgaacaaaaattcccctctcccctcaagctcagagcactacagtatattttacagtatctttccactacttacaggaatgtctgtttcatttgggtctgctgttgttttgtgagtcagtgctgggtaattgcttttggactcctttttcaccgttccgactgattgtatttgtgcactgctttttcttgccaattccttctgcggtttgaccctttgtccgtcgcccttttgtccgctttttgtgctcttttcggttcgctgcttttccccgctgtttgaaatggtcacttcgccgctcacttgcgttgttaaatgggactgaatgggttgcgacttttcgttctcaaagcgttcacaacaaagcttcatcgtcgcaccggtgtaacaaaacattttcggcttaattggacaaattagccatttaaattaactcaaattaaacatttctttgtgcgggttgattggcttgccttacttcaaaacattcccttttggtgcccaattggccacaacccatcgccgtcccctcggagttcaacacactgaaagaaccctccgggcactcctcctcaatcatttggccttcttcactttccgtttctcgctttccgtcttcgtcgtcaattaattgttttatcatattatcaccgtcatcttcttcatcatccgatagacttggacagcactgataattaaagccggaaaagaaacacgcgtggccaaagccacaaatcgcagaagatgaacggcgtcctgcgcaagagaaggcaattcgacaaatgaattaccagatgaaattagttagtctgctatttgattcattaatttgcgagtctaaagagtcgccagcagggcattccccgccgaaagaattaatgaataaattaatgacccaattgacccggcaaacactgcaacggtttcccggtccgttcgtccatttttggctctcctccatttggacaattaaattggcctccgaattctgtgtaattaatgagtttttaatctgtttgcatgttcttttgtgattctcacccgccgaagaaattgtgaaagaaatgaaaggcaaaagaaaggcgaagaaaatgcaaagggataaaagggaaaaacgcatcgaaaaaagggacggggaaaggcaattagggataatttatcagcaattaaaatgtagcggctttttgaattcctcgcaatcatcagaaagcaacatacgaaagttgcttaaatatgctttcaatcagttaagttttgttccaaagaaatgtccgatcccttttaattgaagcgacggaagggcgggcttttgctgggatttgaccgcccaaaaagagaaacaatgcgcggcgcgcccaaattagagcagccaccaacggattagaagaagcaaagcttaaaaaagtgaaggcgaccgacggacgctcccgctgttatttcttttcacggaggttcaaatttggggggggggggcaaatgaagaaaatggttggattaacggaggaaccgaccgaatggaaagcggcgcctttgaaatataaaagggatttgtaaagcaaaaaaacattcagtgatgaaagtctatgggcaaaaggcaaaaagcggcgagagaaagtgaaacgaatgaaagcggacgaaaatgcctgagggcaaagctttggggctcatatcgccggtcctcccatccctcgctgagcacttccgccactctctcccaacttccgttgctttggtgggtcggctcaacgccaagaatgttcaggacgagctgaagcacaaatggaaaagcgatcatccgaccaaaggagggagggagggacctggtaaatgtccaccacctcaatcggttcgcttttgtagtccgctttgaatgcttaattaattagcaattccaactgattattattggcaattttacccggtcctcttgccatgaaaattcctaaaattctttttttacataaaatttggccaataaatgtgccctttcccacccttctgtccccaccttgcattgcttcgtgttcattttcccatccgtcgagcattttccatttt

SEQ ID NO: 11775 - DNA, 846 bp, Heterodera glycines
agtcgcgccaatggaaatgctcggggagttcgtgcctaattgggacaattatggaattgtcgttaattattattattattttgagtgccggtgccttctgtaaacattgactaaaggtgccgtctcttcattttcgtaatcgccgacgaaagcccactgatcgcacactttaagttcgaagaaagttgtgtcctgaaggaaggggtggcacttatacaataaagggacattggacgaaggacctcttccccgtcgatgggccaaaccatggcaaatgccaacgaattggccactcgtctgaccatggaggggtccgccaaacactcgtcgatgtaaaactggtcctcctcctccaccgccatcagtccgtggtctgacagcaccaccaaattggtcgactggtgaaggtccatcgtgtccaactcctccttttgggggatgagtgcttggattagttgagttcgccaaatcacttggatctttcgcaggtaattgtcgaccgtggaaagtgcttgtcgtgtttgacttgacgactgaccgcccgagcgaagtgcctttgggaaaatgccaatgagtaaaaatatttgccagaattcaatttttgtttttttgccatttaccttgtccaatccattgtatcgtagaaggacaagctgaaaatatttgatcaaaagtagttttaataagttataatcaattaataaatgacataatccaatcaaaaatatttgttaaaattcaattaaattccagatttattcgcctgttgtctgtagggctgatattttttgatatgtttgacaatggttggcaaatgcggcagcagatcgatgctattggaattgt

SEQ ID NO: 11776 - DNA, 884 bp, Heterodera glycines
ttttgagttgggtaaacaaaggaaaaaaaaattaagacgaataaaatatattaaaaaaattatcgaaaaaagtcttggtatcattaaatggccctttaggttctctatctacttaaaatgtttccaaaaaaatatgagcaaatattgtaaaaaaaaatatttgtccaaaacttttttttgattcataaccaaattttttggaattttgcaagaaaatagagaagcttaaaggctatcgaatgttttgtaatcctcaaaaagaaaaataaggcctagcttatggatatatattgtggaaagagtttttcttttacatataacctcaaaaataatggattcttttcagcttccggcgacacatgatgcccaatattttagaagcacaactgccaaatgactattttttctatattttacgtctttttgccgttaaacttgaccaaaatgcgaaagaaaggcatgaattgaaaaccagaaatttgcttattaatgaaattttagtctcaagactagtcgccctgggtgcaaaattatcacagaggcaggaacttctttcctgaatgcctataatgaaagtgggtttttttaacaatgaataataattttaaattttaataattaattttaaaagaactgggattttatgttgcggtttttacttgttcaatttcaaattaaacacttaattagtttccaaagccctttttcgggacgggattccgcaggcattacttatcaaatttgcgggtcctgctgcttcaggtcaatttagccgatttaatattaaaaacattaattttttgaaaaatgcaatatacagattttctaatttttcctaattttccccagtattttgggtgctttggcttttttaatcatattta

SEQ ID NO: 11777 - DNA, 929 bp, Heterodera glycines
catattttttctcttttaattattttttacctgcaacaagcatcatttagtaatatttttaatatttatgacatgtggttttgagttcgtttatgatttatttttaaaccttttcaacccaaagaatttcctcgtatacgactacattttgcgctctaataattattgtcaattcttaacaaaatcaattgatcaatgttttcgttattttagcgagtggttttgggctaattcagaattttttcaaagttacaggtttatgcataagacggctacatatttttttctcttctaattattttttacctgcaacaagcatcatttagtaatatttttaatatttgggacatgtggttttgagttcgtttatgatttatttttaaaccttttcaacccaaagaatttcctcgtatacgactacattttgcgctctaataattattgtcaattcttaacaaaatcaattgatcaatgttttcgttattttagcgagtggttttgggctaattcagaattttttcaaagttacaggtttatgcataagacggctacatatttttttctcttctaattattttttacctgcaacaagcatcatttagtaatatttttaatatttgggacatgtggttttgagttcgtttacgatttatttttaaaccttttcaacccaaagaatttcctcgtatacgactacattttgcgctttaataattattgtcaattcttaacaaaatcaattgatcaatgttttagttattttagcgagtggttttgggctaattcagaattttttcaaagttacaggtttatgcataagacggctacatatttttttctcttctaattattttttacgttcaacgagcatcatttagtaatatttttaatatttatgacatgtggttttgagttcgtttatgatttat

SEQ ID NO: 11778 - DNA, 2690 bp, Heterodera glycines
  unsure (1)..(2690): unsure at all n locations
ggcgacaaaaaggacgggtgggatttgaaaattggcaaaaagaagaaaatttnggcgaagggcctggcgaaatgggcgcaccgctgctgcttttggaggagcacgaggcgaaattgggcagcgaagacatgaaaaagtgtgcattttatagacttgggtatttaatctttctcttagccaattacaaaacattttccattttgaacggcgcgaaatgctttccagcttttgtccatttaaaaatgtcattcattcatccattcttcctccctgaaagatggtttatgaatgtccatgccagcgacaaaatttccttagaccgttcgctgcccgactttcgcttgtccgagtgcaaaggcattgcctatgagctgagtttactcccccggtaaatatatttagggtatttgcactccccaattcatttaattgaagtgcttcggtggtgatcatcttcaccgacgaagcctggtcaccgctgatgagaacggtgcactccgtcgtcaatcggtcgccgcccgaactgctcgaggaagtgctattggttgacgacgcaagtcaaaggggcgagttgcaggaccaacacgcaaatggacacgctttgagttctcttcagacgaactcaaggacaatttggacgcgtacatccgacgatttggaggcaaagtaaagcttttgcgcaagacggaacgccagggactgatccgcgcgaaattgtttggcgctttgcattccaaaggcgaagttgtggtttttttggactcgcattgcgaagcaaccgacggatggtgcgcttttcatttaatatgccaaatttgacgaattctgctcaaattcaccctttccctgtgccatcatttgccattcgcaggttggagccgttgttggcccgaataaaggaaaagcggtcggccattgtctgtccgtcaatcgatcacatcgatgccgaaacactttccttcagcggctcgtccgaactcggctccattgggggcttttggtacgttgtgcactttctgtttgcctcatttgccccccccccttttcaggtggagtttgcattttcggtgggatcgaatccccggccgaattctcagcgtgcgaaagtcgagaaccgatcccattccgttggccaacttctgtctgtttgcttttatcatcttttcttcacttttagctcaccgacaatggccggcggactattggcagccgatcgcaattatttcctggaaattggcggatacgacccgggaatggacatttggggaggcgagaacttggaaatctcatttcgagtaaattcccgtcctttggctataaacagttgcatatcgttcttacaattagaataattctggtcatatgcaaaatacaaaatcaatgttttcaacataatcggaattatttatattgaaagatatgagaggaaattggcaaggcctccattcttcgttcacatctttttacttcccctgccatctctttccatctaaattttcaattcacaatcagcatcatacttaatgcaaatgagccaatttacaaaaaataaaattaaaaatgcacaaaaattaaatgaaataaattaaatataataaaaataaatatttttgaggtgtggatgtgcggtgggtccatcgaattcgtcccctgctcccacgtcgggcacattttccgtgccggccacccgtacaacatgacgggccctggcggcaacaaggacgtgcacggcaccaactccaagcgactggccgaagtttggatggacgactacaaacggttgtactatttgcaccggagcgacctcaagcacaaagacgtgggcaacctcgagggacgaaaagcgttgagggacaaattgcgatgcaaaagcttcaaatggtacctggacaatgtgatccccgagaaattcgtacccgacgaaaatgtgaaggaatacggagcggtgagggaaagaaatgggcattatcatcaggcattttgggatttaagttgcgaaacccggagagtcaattgtgtctggacacccttcagaaggacgaatcgaacaccattccgttgtttctgttccaagtcggggggaagggaagggtccgcccaatgggacactttcttccatccattggcatggattaatttttaaaaattgtttagtgtcaaggcggtggcagttcagcacaggtgaaaattgccatgagaaaagtgtatccaaatttccacagatgttttctctcgctaaaaatcagcaaattcgtcgcgaaatttcgtgtgccgttgccggacaaaacgacaaagtcgagctgagagtttgtgccgaagaagagagcagcagacaacaaaagtgggacttaggaaaggtgagttgggcgaatggcaaagggcgaggggtgccatcgtccgtttgccttgccaattgcgtttggtttttgcttgcccttttgtgccgattcgtcagtctgtcggtcccttccaaatttcgtctgtccctttcccccctctcttttttgcgtcgtccctctccccctttactcatttcctctcctttatttttccccattgtctcaatttatatgcaaatgcctcgagaattgctcatcaattcgcttttccctttcgcttcttcggggggggttctcattgtcgggtttcaatttattttaaatttctccgaccnntgcaggcccatgcaa

SEQ ID NO: 11779 - DNA, 2454 bp, Heterodera glycines
  unsure (1)..(2454): unsure at all n locations
ggctcgaaagagcagtccgctgcggtgccgcggattacgctgaagacggaagtgcggagcaaaaacaaagcggtgaccgtcgttaaagncctcaccacttgcggtcagtcgcccgggcgaacaaatcgatggacaattacaacaacggttttgattgacaaaaggtgtcgacttgaaaaccgcctccaaattcttcgcaaatcgtttcgcctgcggctgttccgtcaccgttggctcagccgacgaattggtcattcagggcgactttaaggtgaaagtgtgcagcccttcccacacattgccattttgttgattgaaggacaaactcttcgtagaaatcccgaagaaatggggcgtcgatgaggaagtcattgaggatttggacgaccaaaagaagtgaccactcccctttcacactgcttgtttttactttaatttatatactaattcattgctttgttgtcgtgccgaaaagataaattttaattcatttattggttttccattaattatggcgtttaaattacgcggttccaagcgacctaaaaacaatgttttactcgtccaagtgaatgtttggggcaacatgtaattaattttggagtttctcttatggaagtgccttctcatttctcaaggattcctctcccatttttggcatcgccgcgacaacgccgccggcggaaaagcgaaaggtgccgatggcttctcgctttgttcctttccgtcgtattttttgccatttacgtccttttctatgcctttctgagtgggcggcagcattttggcactgattatttttccgatgggtaatcgtaaattcaaattttgttgagtctttggcataatgttccttctcttttcccctaagtcaccctttgcctgccgaatttgccctcatcgcttttcctgttgacgaacattctctggttggccccgatggcgagtcgcctctgttcacccaccgaatcggcaaatcggcgccggagggccaaccgggcgaaaatggcgcggcagtgacactgacgggggaggaggcggctgaagggcggcgccaaatgagctactggttcatgaacgtcaaggcaagcgacaaaatgtcgctggaccgcgcagtgccggacgtgcggccgtaagttgacggagtcgtgccaaaaacgcaattttcggcaattttgaagtttaggtggccggtaaaaagccaaaaaagtgaaccattttaattttataatttttttgtaaaaaaacatagttgattaaaataaataacacgtcattgttcaacgactctaaaaatagcaagttgaaagggttcctctttgggttttcactgggccacatgaactgaaaaagtgccgaattctcttttcggccaatacgattatagcaatgcccctgatcagcagcagttgatcacttctctttttccaattcccccccccccccaaaggaacgcctgtcgctcgctttcctacgatttggccaatctcccttccgcctcggtggtcattgtgttcactgatgagcccacttccgtccttttgcgcaccgtccattcggtaaggtccccattattttgtccaaatttcttttccattttaggttttcaatcgttcgccaatgtctctgctgcgcgaagttgtcctcgtggacgacttcagtcagagaggtctcccaaatttgattcttttcagaaactcattctttctttcttccagaggagctcaaagctccgcttgtcgcccatttgcgtcgcttcggttcgcgcgttcggctctttcgagcgaacgaacgtttgggattgataagggcgaagatagtgggagcgaaatacgcccgcggtgatgtcgtcgtatttttggactcgcattgtgaaacatcgccgggatggtcagttgggggagatggagaaagaagagataatgaaaccacagagacaccagcgagagaaaatgacgacagttagagagtgagacagacaaaggggaggacagagtggagtgggagacaaaggggaggacagagtggagagagagagataaagaggaagacacagtggagagagagagagttgagggaggagaggtgtatgggagagagagagagggaggggagcgacagatgcgtatgggagagcgcaaaaggaaaaagtgaccaaaattaaaaaaaggctcgagcctctcctccatcggatcaaagacaaacggtcggctgtcgtttgccccgtcatcgacatgatttctgactcttcgatgcaatactcgggcggatcagccgctggcattggcactttttggtcagtgtcaaaaagatgggccagggagcattttctatagtaacaatcttcaggtggagtttgcatttcaaaatggaccccatcccggagagagtggcaaagatgcggaaacacgcggaccatttggacagcccgacaatggccggcggactgtttgc

SEQ ID NO: 11780 - DNA, 4236 bp, Heterodera glycines
  unsure (1)..(4236): unsure at all n locations
ttttgatgatcttatgttgggcgttcggagaagacaaaatgagagcattgatgagttggctggaagaatttctcgcctagtaaagagtgcttatccgggtttgaccaacaatttgtgcgacgaatattcgatcaaatttctgatcagatcgatgggaaatcccgatcttgcgttaaatttggaattaatccgcacaccgggaatgactcttgatcattttgtgtcactagcagcaagggctgaatcgacccaacgcgccgcaaaacggttcagtacacacccaaatgatggctttcaacagcgcgagcaacaacccaaatggcgacaaaattttggtggtaactcaagccaaaacatggcgaagggtcaaaattttgctggaaacataaatcagcacccccagcccaaagaagacacaagaaatcaatggaaatgttacaattgtgatgaatttggccacctttcacgcaattgttcacgtccaagaacttttatgcaaaaccagccaataaatcagcaaaaaaactttgttgctactggtgcgaaccgaactcaaatccaacccccaaatcagaaccgaaattttcaaacaccaaaaccaaattcagctaatttcctaaagcaaaattgtttggtggtccagcgtgaagaggttttagccgaggcgagggtaaacaaaattgagttggcaccggaagtaagtgaattttatgaaaaattagaacggatcaccgaaagcaaaaatgaaatttttttgccaacaattggaaaggttatgtcgttgaaacttgaagtgtttggcacagaaaccgacgcaatgcttgacggaggcgcacaaatctcattgattagtagtgattttctgcataagttgctgattgagaaagcgattacgctggaaacattggagattttcaaaacgaaaacccaaatttttgacgtaaacggaaaactagtgaaatgtctcggcacgattaaattgcctgtcaatcgtcacggtttttatgaaccggtgaccattcctttgcacatcactaatgccccaatggtttcggtcttttaattcggaaccaacgcacttcaggatttgggatttaagttgtatcgatggacgaaataaggcactcggttgaattcgaaaaagttgaacctcgaaaagaaagaattttctgacggtcatttatcggacaataattgaggccggcacagttaagaaatttagaattcagcattaacactcgaattcgaaggacaggaaatggtcgttacttcggacgaaacttcagcaattcgtggtagaaaccgaccataggaatccccgaaaaaggaaaaatagttggtcccagtggacaaattcattcgtttttggccattactctggtttgaaaaatcttcgatcggaaaagtcgaacgagtgggactcaatcagtgagactggaaaatttgttaagtagcccaattattcggttccacgaaatatgaacaaaatggcggcccccgaatgttacgagaaattcttcgaatgtttacaagtcagaattggtcaactgaacgaagcgaacgacaaagaagtggggaaaatgatttgcacttttcctgaaattttcgctttaagcgatgatgactggaagcagacaaatttagtcgaacaccaaataaataccgcggaaaattcgccagtaaaaatgaaaatgcgcctggtcccatacgcttatcgcgaaaaaatagcagaaatgctccaaaattatttggcaagaggcatcattcgtccgtctatgtctccatgggcaagtcccattgtgattgtcccaaaacgtgatggaacgttacgtttttgtgtggactaccggggcttaaattcaatcacccgcaaagatagttttccactcccaaacatcgacaatactcttttaatgcttggaggacaaaaattcttcagcactttagactttatgtctggatattggcagataagaatggatgaaaattccattgaaaaaactgccttttcgactgagtacggtctttacgaatttacagtaatgccatttggtctaaccaatgcagtggcaactttccagcgatttatgtcgcgtctctttgagggaatgattaatgactttctgttcgtttacattgacgatattttaatcgcatctaaatcctttgatgagcatctgaaacaccttgaagcggtcttttctcgagttaaagcagcagaattaaaactaaaatttgaaaagtgtaatttttgcacaaccgaattaccatttttgggccacatcctcacaagggaagggattaaaatggatgcggataagctaaagcctgtgatggatttgcctatgccaacgaccaaaaaacaactccattctctgcttggttttctgacttattatagaaaatttatccattcattcggcacgattgctgctccgcttttcaaattgataagcgaaaaagctgaattcaaaatcggagaacaggaaaaacaagcaatcgaagaattaaagtcaaaaatcattcgagatgttgtgcttcattttccggatttcgatgcagcacagaatgacctaactaggcagtttataatcatgactgatgcgtgtaagaccggcattgcagcaattttatgtcagcctgatccggagaaacagattaggccaatttattttgcctcaagacaatgcaatgtccatgagtcacgctacagtgctaccgaattagaggctttagccgtcagatttggtgtaaaaaagttcgcacaattcatcactatgattccgactcgggtcattactgaccataaagcactaatttggatgttccggagtaaaaatgagacaggaaattcacgtgttgaccgttggcttcttgagttaagctctcgtttcatcctaaaggtggaattccaaccaggaaagaaaaacataattgctgatgttctatctcgttcgggaaaatcaaatgagagcgtcactgaatccttacaggaggaagacattgcctttattgggaaagttcgagtttttgaactcagtaataatgtcgaagatttcaatgaacaccgggaaaaatggatcgaggagaccaaaaacagcgaaatgcggccaatttatgagtttttggagaaaaaaattatgcctgctgatccgcgaattcgacagagcacaatggacaaatgccatagatttgtgttaattgagaagtttttgcatctttgtgaaaatgacggaaaacttagactctttgttccattatcatttcgtgaaaatttggttaaagaacggcatgaaggaaagtgttcgggccacatgagcgccaaaaaattgtataaacaattggcagagttatatttttggccaaacatgttttctgattgcattcatgcacataatgcatgcagaatttgtgcacatacccgaaatgcacgttcaaatgaacctcccttaaaagtagttcactcatcagaaccattggaattggtctgtatggacattttggacgttgggccaagtcagtcaaacttcaaatatatttgtgttatcatcgatcatttcaccaagtacttggtcgctgaaccaatcccgaataaatcagcagattctgtagcaaaagtatttgtcgaaaaatttttgttaatctttggaacgccgaaaaaaattcattccgacaaaggaaaggaatttatgaacactatttttaaaaaaataagtgaaattcttgggtttgagagatcctttacggctggatatgacccacaggcaaacggtttggcggaaagagtaaatggagttttgattcaaatattaaaaaagtctacagcaagtaattggacgtgggacgaacgattaccatactcagtttttgcttacaatataacgccatccgagtcaacgggtttttcaccatttcttttaatgtttggcacatcagcgnacattccgatggataagatcaccgaaatgaaatttaaccccttatacacaattgattatgaaaattattttcaatttgtttttggaaacctccttaatattcaaaatganggccaacaaaatttggatgagtatcggaaaagaagtaaagattggtatgatgcaaaacctcaagtgaaagccaataaatttgaaatttcggagcgagttatggtggcttttcccggaatgcatcgcaattcacgacacaaaaaattattgtggaatcattttgngccttacaccattacaaaaatct

SEQ ID NO: 11781 - DNA, 2907 bp, Heterodera glycines
aaaaaattccaatcgactctgacccatacggatacgggaccggggacaatgctataaacgtccccttctgacacgtcttgcgcatcgttttctttcagcgccggcgacgtcagcagaaagtgagcgcctattcagcgctcgcaggattaaaaattactgatctgagaaaaagattgactccggaaaatacaaaaattttatttttttacatcacaacctcaaaatctatgattttgactattcgcaaattttttttaaaacttccgcctttcgcatttttgcacattttggcgtttcgcatttcacttttatttttcaatttggcccatccttgctcgacacggacgaggaggaataagaagaaaatacacagaggagatcgggtggtctcccgactaatcaatcgttgattccatcatttttctcttaatttcttcgtgacagcccatttgatttccttatttcaagtcgaaggaggcactgaaggaaggaagagccgagcggtgccaaaccgtccgtccaccgaagggcaggcccttcgccgcgaattccaccagccggagaagtgagtatcattcaaagcggattcccgcctgccggagcatccgcaggaagagacgggagtccaaatccgtcctcatcgagtcgagagcgaagcagcagcttccgcccattcggaagcagttcgaaggcgtccgacaagcccttcaacccaaatcttgtcggtggtgccgataaatcacttatgtcaagagtggtgtctttggcacaatatgaccaaatatttcttgcacatgcacaaaataatgaagtttattcaaaggttgaagaggaaaaaacaaaagaatatacaaaattttaaattctgcaggggtaccagacaacatttttgaaattcctgaaaattctttttttcttctttaaaccttgccattttcttaaaattttcctctcgaaatgaaattgatatcattcgatagccttaactgttttctattagccagcaagatttcattggatttgatttccttagggttcaattaagttacatatttaggaatttattcgactattgataaaaattgttttcaatgtttggcttacaaattagtttctaattttccactcttccaattgttctgacaccacacgattgtatttttgaaaaatttacagacaaaattttttatttttttttaaataattttttttaatttaggaaacagcataaaggtacaggaaaaataaacacaaagtgtcggtttcttagaaatgacatcgttaggaaaagccaatatctttcattttcgttgatcagtgggtttggtcctttcgagaatcaaagggtccttcctttttaatgactgccctttcactgatcagtgagtccactgtactcctgatcagtgattctctttttggcattatcgtttcgctcatcaatcggtccgcttttgtctttatctcgtgctcctcccatttctccaaaatccagcgctttgctgacacatttgttcccctcctgctgctccaggcatacactaaatttacagtagtacccgccttgctcttcctcttcttcttcgtcttcctcttcttcttgttcatcatcttcgactggcactttattgttgatcggatcacaggacaaatatttggagtcaatttccacaatttgatcattgtgatctgaaatttagcgtggataaattcaattttaaaaataaattgaaaaaaaatttatataaaaataaaatttgatttgggcgacatacggagcatcagagagttcggaatttgtggcacaaaaagactgatcagcaagcaaacgtagaaactgtaaatgatgattgaggtaggcaaattaaacaaagaataaatgccagccaaaattatgaacaaaagcccgaaaatggaacctaaaaagattttcgaaacccttaaaaagcaaaatccaaaattttgtcaagccctggtgaactcccatcaacccatgctaagttaagtgtaatgggttttctgcactgccaccggccttacgtgcttgcgccccacaatgaggaggagaacagcggtcttggcagtgtgctgctggcgccgttgccgaaatagtgtggaaacaacgaatgctggggcgtctttgtgtatggggggaattggttgcccgggccgacgggcgggcagccgacggtgtttggagggtacggtgaaccagcagcgccaggcgggcccccggcggttggcacttgctgctggggcgtggacgacgcggcacccgccgtctccagtgccacttggctggtgctgtagccgcacgggccctgcccgtcctggttggccgtgaatacttcttctggatgtctgttttttttggacttgccgctgtatatctgaaccggaggggggggggggcaaataaaggttttatgggtcaaacacaagaaatttattacaaaaacaatttcgttaaatcaaccctttcaataaacttttttattaaaaataatggcgcacaaaatgattatgggacacataatattatacatagcaaagaccgcaaaaaaaagtcaccaaaaatcgcgaaaaaggcaaataatagtcaacaaaaaatagaaaaaaaagacatgaaaaggctggaaaatcccgaaaaaggcatgaaaaaaggcatttaaaattttttatgaaggctttttagggagcaaaacacgtaaaacttaatcaaaaaaacttaattttggccatttaaatgattattaaatattttataatgttttttcaataaggaaaatttttaaaccctaaactttttatcaataaaaaaaatgaaaattttagcgatcaatttttgagaaaattttttaattccttaggggtgtattttttttgaaaatttttcaattaattttt

SEQ ID NO: 11782 - DNA, 3776 bp, Heterodera glycines
cgggttcggattcgaaacatggatgatttgcatgcacaaacccgaccaatttcagtcctaaacagttactcacgcgaaaacgtaccccacgcgaaaacggccacgcgaaaacgaccccgaccggccttcttttaattatttttatttttgaataaataaataacatattttggcgttttgcctgaattattaacaaaaatgtaataaaaacgaaaaatacacccctaagaatcgaccaaaaatttttcaaaatataacccttaagaaacgaccctaaatttttaaaaatatacccctaggaaacgaaaaatttctcaaaaaatgcatctccaaaataaattaatttattttttgacgagaattttagtttccactaaaataaaaaaaattcggcttatatttcccattgaacaaaagatgttctcaattaactaggtaatttataaccttttaatgttaccaaactttcctttatgcaataaatccggcaccggaaaacaccaaaattttccaacacttattagtccaaattaattattggttgatcaaattgtatgtcaaatgaaaatcgtcagcaatcctttttgcacgtgcttttccatcatcatttctcgctggcgacggcacggcatggctggctacagattggacaggcgacgcaccacgccggccaactcggcacggagaaaacagtctccgccgaccgactgccgctgccgctcatcagccctattatggtaattagcggacagtagcgatgtcgtcggtacggtagtagatgaggatgatacggtggatggttgtggaagcggtggtgaatcattgtcaacgtcatcatctgccggattaataaatgtgtaaaaaatcaagttacaggcagccaaatgcttagtgtcaattggcgagagtatgtacgagaaattggacaccaacagaaaacagcgtgccaaggatttttgaaaaatttcaataattacataagctaacaagaattgtaataaactttttgacattgatcagcaggccaatttggcgccaacgctctaatttttctaaaagattagcagtctacatttggcggcaaaatttaaaaaaaatttggttgtggcacaaaaatttgctttcaataagaataattattaaagtgtatgtgaaaaacttatgaattattttaaaatttaaagcacaaaaatattgggtgccaaagagacccgtgtccccccccccatttgccaccttcgtttgatgccgccgatcggacggatttcagcggatttgtcaccgaattgcgcttcacagttgcgttgtcgttgtgctcaaaaaggggcgtcgccagcgcgcccgcggcactgctcaacagggcggaggaggtgcggcgccgttggcttcgcaattcgccggtgaaacccgtcacaatgtgatcaatgattttagcgatcagaactggagggaatgtggtgaaattttgatccaatcaatctgattgaaaatggcacaggggtgatcgaaggggaagctttgagaataaaaattgtatatttcgacatttatggcaccgatgaaaatggcacaggggtgatcaaaggtaaaaattgtatatttcgccatttatggcgccggcaaagataagaaaatgtaaacaattagaatgcctcagtcaaaaatatattttaaaaatattcttgcaaaatttcaacaaaattttctcagagactgtgcaacaataaaaaatctaattaaatgaataatcactagggcatccaattatatgcacatgcatatttttttcctggactgtgggaggcctgaaacgcacgaaaaacatgtttttagcttggtttgaagcttctaggatggagttctgtacccatattttcaatattttattttctgttttgggcattatgaccatgttttggcatttttcaaaaaatttctattagtacggctccgatcagctaaattggcctttttgagcccaaaagaccatgaaattttccaacaaatcagttttgagcaaatttttctcgagagtattgaatatttttaaatttattaatgatggtaaatttatgttaaaaatttgcattttggcttgttttttcgcaaaagtttagtaaatttggtccattttaatggcactattcgcgattttatatcatattttccgagtcctaattatgatcataaataggttaaaaaatagggaaatcgcgtattacctaaaatatcctcccccaattaaaaaagctgaaatatttaaataaaaatatagtttaactctggcacaaaatcgtttcatgttttttgatccaaaatttggggttttaaggctgtatgtttaattttttaattttcgagatggaaaccctgcccaaaatctgctaaacctggcaaatgtattcgacccctttgtccgtctcttgatcatacaactgaatgccactcagggttgctgtatccccgtatatttggttgacagctaaacaaatatcaattgggattttttcctctaactgtatggtgtcccactttcttaccccctcccctctctctctcctcactctctctctcctccctctctctctcacactctctctttcctctctatctttctcgcgtgtgattagttaacagattttcacctaaaaatgaccaatttttgaaatttggcaaatttttgtggatttttctagaaaaaaatagcgaaattttctttaaaatttgagtgcggttggtcttagaggtggaacgaagaaggaaaaatcagaaattttggtcagaaaatatactagtttaccgttaaaaatttctgttgtggatgctaacttttaactcacaaatcagcagaattacgacacccaaaattctcgtgaattcggaattccatggcatccctaggccgggcgtgcgctctcagaaaatgcatcagtggaaaatgtaaatttccgaatgaatactgtagggttctttccctcactattttcactactactgtattacaactgtttgtattttccggcacacgctctgctgttggtgtgccgcagaatgtacatattcagttaaaaacataccgacaagcgtcagtccgggcccccgcattttgacgtccgaaattgtcacatgtggcgttccacctgatcagaacagctgccacatgaacagaagagttttccgaacttgcctatatttaataattattacttagggatgggactttaaatcactaaaaatgtggaaaaaatcggcttaaaaagtcatgaaaaaatagccaaaaaattcacaaaagacgccaaaaaaacacgaaagaattcaaaaaaaaccgccagattttattatcccaccatttgagtcttaatggtataggaaatttcggtacgtctcgaagatagacttattgttcggaattttcttcgctaaaattcaaattttgccttaaaaagtgaaaaaaaaattcattaaaaaagtcataaaaatggattttataagcttcaaacaaagtgtagaacacttcttaagtcattttaagcgggcggaatcgttatttaaaaaaccatcattatggcttaaactagagttgagcgggaccaggactggtactgaaaaaaacgggtacaactgagtacccagtcccggttttgaccaattttgaccgggaccgggaaattcccgggttttttcccggttttcccagcaaaaagtcccggtttttcaacccgaaaattcccggtcccggttttggtcaaaattcccggtcccgctcaactctagtt

SEQ ID NO: 11783 - DNA, 1889 bp, Heterodera glycines
  unsure (1)..(1889): unsure at all n locations
ataagcaaatctgtggtcagcttggtgatcagcacctttgaaaaccaaaagcaaataatcatacctcgacgccggaatttgttttttattttttgacattttgttcccgacgctgggttgagcaccagctttaaatttgtaaattttaatttacatacatatgctttaccgttttcctcgttttagttgttgtatcgagaaaaagctgaaaaatttaatgattaataaatgcattataaaaaccaaaattatattcgtaagaaattaaattagaatttcttaaataaaagtatttttcattatattcaatagcgaatcaatgaattgtttttgaaaaaaactataagacaaagatttgaatatttaaatcaataaactgaggctggcaccaaaacgtcggcgccaaaacgacccgacctagtcccccctgcccgatccgatctctagtttataggctgtttttaaataaatggatcaaaaaatgtcctggaatgaggggcaatataatttgcagtaatttaaattgattcaattnannatgcatatgaacatttactgctaatgtgaaatattaattgtcgggtgagaagatgaaaattttgaagcatataataaatagtaaaatgtttattttataattaaatattttagatgaaaattttattttatttttttgccttattgttagaatcacattttagtatttaaaaagaatttttggtaactcttttttgaagaaaaaaaacaaatttttaggggtagattttcaataaaaaacttaattttcacgtgaaatttctacaaattcttagaaattctcctatgaaaataaataaagaaaaattcaaaattttgattttttggggcatttaataaaaaatttccttaactcctcaaaaaatgtaggaaaaattactaaaatgtccaaaatatttaccaaaaatgtataaaatcccgaaatatgttttcctgcacggtaattaataaatcctaactatttattcacttaatatactttggaacagcattcgcagcttgttgttttgtcacagcacatcccagtcataatgtgatcaaaatgcagtggatcacatgcgcaataaatgggcttgcctttgcattcattgttcgacttcttttccaattctgcaaccatgtcttcctttaataacaaaatatttaaaaaatttctatgaattaaggtgtatactgttttttttttgagccaatgatgaaaaacatatgagggaggctttataaataaaatgaggttgcgaaaattaaattatttaattatattttcttgtgattccaactaacttttgtagcaaaaccgggaataggactcaaaatctgaattaaaggtttttttaagaaatttgttacaaggcaagttttttacccaaagtttatgcacatcgtcttcatacgagaacttagtctttcctttgtgtattagattccaggtaataaagtctccatttcgactgactatagatatcagcgaataagagaaatttgcgtagttaataatttttatgagagaattataagtggcgtgaactccttgctaggccctctacaaactaaaatttttagttctctattcttagaggtattccctattaaaatattatttttaaatgttcaaattattcgtcaaaacattttgattagaaaaactatgtcagaaaactaaataattggtgatatatcgttatataaaaccatcaaaaagggcgctatataaaaaacgatcaaatgaaaattttcaacaaaaaactgcccataacttttgtccaaatcaataaaattagacattctttatagcactcgatagccctaagaattctctnataactcacctaaataaatcgcgaattgaactg

SEQ ID NO: 11784 - DNA, 3792 bp, Heterodera glycines
  unsure (1)..(3792): unsure at all n locations
aaaaataaaactcaaaaaatccacaatcaataattcccctcctgatttaagtctgacaaaatttgaataccatgtttttcctaaaaccatgtcctgatctctttatatagaatcaaaaataatgaaattaaaaaattgggttggacggatgcgggtattaaaattctcgtattataatctgcaaatattttatatttaataaaaatttaattattgaaattttcggtatttttgaagttttttacaaaattttcgatttgctgcgaatctattgaatatatatttttaaataattttaaattacagtttaaattaattattttatgaaaactcggcctgccctaataaataatttgcctgtgtaacttacagcagaaccaacatattccagcgggcttgcttttctccagataatggatttaatagttgaaagcgcataattttcatcgcaacattttgacgccttttctccttctttgaaatagcatgcgaggttatagtcttctgtttaaaaaaacaatttcttttgtattatactttatgaaaaaattaaatttatctcatcaaattttttctgattttgaaaaaaaaacatcgttaatctttaaccaataaatttcttttttaattttttaagatttcctttagttaatttattttttgaaaattcaaacatagataaactgaaaaaaaaaatttaccatttctttcagtattatgctttgtggtctccaatttgcactcgtcgtcttcactccattttgtaaatttgaaaagctaaaattgtcaaaataaaaatagttttatattaaatgaatttcaattttatacctctggtaattttgcaattctcttgttctaaaaaattaaaatgtattaaaatttaagtttctgtttttatgtaaaaaaccaccgttgtgcaacagttgcatggatgttctttcgacccagtgcttcggtagaaatattcgcagcatgtatcacgcaccattgagtccgccatgatatcacaataacactgatattcaccgtaagatgaataaattctgttacccgtgcaaacatttctctgttcatattcaaaaacagccttaaattaagaattttaaaggtcacttatttattagaacattaattgtctgcgcaaaatatgctacaataaatctgttgtatatgtttagattccatcttttcactcatatatcctccaccccaattcatgcatgtgtaatttcattcacgtacttttgagagaaaaaaaattatttaacgggaaatgggaacttaaaaaagcgttatgacggtgctgggacgaattgactttcagagaaaacaggtaacattgctatttttgagcttttcatgtgatagcatatgcgcaaaaaaaacatgtaaaaacatataaatccgttccctgattattagtcataaacttttgaaaacaacgaaattttttgaaattttcatggcaaacagaaacatttaaggctttcgaagatatcatgagttccaaatttggttgcttctgagcaaagtcataggcaaattttttttttgccacaatagacatcaaggttgattgttttcctctttttattttagggtttttgatattgtttttgatcaaaatttctcagataatcctttaaaattttcgatatttcaaaccctttttataaataaatctctattgcaaaaaagaagaaaatgctcattttgaatatcaattttaaatttgaaaaataaaattaaaattttccacgaaaaaatgtcgcttttttccagattccaattgaaaactgagacccggactttttctagtccatggtagtgcaggtcccggcttttcaacaatttccctgcttcattaataaaaaaacctattgaattctcaccatgtgctccccgcgccatgtatatttctgttcagataacttaaaataaaaaatcatctttcataggcaaatactgttttaatatgtaccaatgtgcagcacttgaaaacgtagttagtcgggcagcaaaacccaagatcactttgatctctcaattccaaatcaggcggataaaaaaaaggctgaagatattctaaaaatgctaaggttagcttaaaacaagaaatgcgaattcaacaatgatagtattttttcattatgcattcaaagcagaaaatttttttgtttagtttcttgaaaaacataaatactttggatgagaatttattcacggtttttactttaccgtgcctattaattgagcccggtctctttcgaacatgtgggcagcaagtgacatcatttggctcattattatattcacttggcacacaatttgcccagccacattccgtgcacacaacttgcgcttcttctttgcattcttggctcacaaacaaatgccaaggcatcggctacagtgtgaaaaatttataattaattgttgtctttagcgcgtcgaaaatcccaaaaattctttttttatcgatgaattagatcttttttgaattaaaaataaataaataaattcatatactagaatatttcctacaaattaaaaaaaaaattatttttgattaacgaaaaaataattttaaaaaatttaaaaattctatcacaaaagaaatacaaataagaaacaaatgaattattttataatagctatattttaaattaaattcattactttgcccacagcagatatccgcttaatggacaaaacgttgcgcatagcgcacaatgaaatgataagccgtaaaaagccaatcatctaaaaattatacgataaaatgttaaaattaatctatatcaataatatattatagcgagagagcattaaatgaattaatttttttttaaatttttagattttaaattaatattgatcataaagaatttaagattttattaaattaaaaaatatatatattttggtaatattttcgtaaatgttttttaatacaaaatatagaaattaattaacaaataaataaaagaaaaacaccataaaaattatcggtaaacgctgacccaataaatcaaatagcaaacgtaaaatacggataaaaatcttttaagcgattcattttattgaataaaaatgataaaaaaataaaaaaaataaaagtgggcaccgaaatttcaaatttcttaaatcttcatgaaataatttggcctaaaatctaaaagagcaaataattaaaaaacataatttcaaacattatataaaatagtaaataaatcacatttttaatgaagaaatgttttatatagattctgatcaagttgagaagacgtcgccagaatattaattttccaatttttatcaaataaaactaaggaaatttgtctccctaattgaaaattctcattcattctgatgaaaagcttgtttatcatgtattggatggaatattaattatgtattcaagtgtctagcaaattttcgcgttaaaaatatttcagatccaaatttattcaacacagcaagcatccttcttaaacagattgatagacaaacggtatggcatatcacgtggaattgttattacgaatttataaaaaatttaaataagtaaaaaggccaagttttttgggttttagatccctcgctaattttggggctaatgattgtctgtgttaatatgtttgttaatttaatatacgctacatatatataatttcggtgttttaactcattaataaaatgtatgaggaaatagaattgaaacaaaatttaaatggcacacttataaaataccgccanaaaaatatttgtctccaatttataaattaa

SEQ ID NO: 11785 - DNA, 1020 bp, Heterodera glycines
  unsure (1)..(1020): unsure at all n locations
tccaaatgtgccaaagtgagtacaaaagtgccaatgaccataggccgcacaaatttgcccgtcccgaatcggcaccgacgctttgcgcagcaatactgcccaatcggtccattttccaacaacggcacttccgcatgtggccaagtgccgttctgtccgttgtccttttgccaataatcgctgaacatcatctcacttttgatgtctttcattgagggaatccaattctcagagttctgttgtccaattaaaaaatgcacaaaatgaaaagggcgaaagtgtcacctgataatatttcaacgcttcaaaagcttcattttctttgcccagcaaaaaaagtgcccgcggcgagtcgggcgccataaaaagcaccgccagggaaaagggaatgatcagaacgggaaggccgagggcaatgtgccaagtctcatcggtgccgagaaccaaaaattggataaaacaaaaatgaattgggcagtcagaaaataaaaatgtacggtgtccaggctcatgaaaagaccggccaattcgccgacacaggcccaaacagtgagagaagcgaggcaagtcccttaagctgccgattcaattagctggtcaattgaatttccattttctcacctcttaatcggatttggggaatttcggctaacattgcggaaccgacgacctgaaaagccaatgctatcaaggcggattttgccgcgattacctgcgccagtcccgagccgagcccactcagaaagcggccaaggcaacagaggaaaatgcccaagtcgggcactctgatcaacatgcagagaatgccaccaacaaaactgattagaaaggagcagataagtggccactttctgctgngacagtcggaacagagaaaggcacaaaaacagccgaaagcgatgcccataggaacgggcggacaccacccaaccnncagggcgaagtggctaaacagaaaagtggnncatttaaaaatttgattgacacatcatcttttttacctcctttntccgaaccata

SEQ ID NO: 11786 - DNA, 2683 bp, Heterodera glycines
ttttttactgctatatgtcatttctcgctatctctgaaaaatcgcggaattttttgtgttcatgattatattgtatttgaaaaggagggataagtccaaaaaattgaagaaccacaattccaatttatgcatttgattttacatactttttcaaaagtgtgatattaacttatgacacattgttgctgatacaattgacaccggcgacacccaccaaattttacaaaatctttgacgacgggtggaggcatcaaaaaaaaatgatgaaagaactgatttttcattcgttcggtcaatactacggcatgggaccatatctaggggagaagcgaggcaagtcccttaagctgccgattcaattagctggtcaattgaatttccattttctcacctcttaatcggatttggggaatttcggctaacattgcggaaccgacgacctgaaaagccaatgctatcaaggcggattttgccgcgattacctgcgccagtcccgagccgagcccactcagaaagcggccaaggcaacagaggaaaatgcccaagtcgggcactctgatcaacatgcagagaatgccaccaacaaaactgattagaaaggagcagataagtggccactttctgctgggacagtcggaacagagaaaggcacaaaaacagccgaaagcgatgccataggaacgggcggacaccacccaaccccaggcgaaagtggctaacagaaagttggcatttaaaatttgattgacacatcatcttttttacctcctttttccgaaccataaaaacgtatcaaatattttcgtgccatgggaattaaattatcgacgacactgtcgagggaaacctgaagaacagcttcgaattggtgagttcgatttaaatgatcaatctgattaatatatttttttaatagttgcttaagaatttggccatttcattttccattttttggccacccaccaaaaacattgaccctgcaccgatactcaaagcgaccacaaacattcgcatttttggtgccaaaatgcattcgggccgccccgtgccaacattcggtggagtgactgcccttttcacaccgtattggcacttctgctgatggtaatttttgctatgcgaaacaacaatttccatagcatcggaagaagaaaatttgtgcggcatttgttaataaaaaaactatttcagaatgattaaataataaaataataaaaaatgttcggttgaaaattaaaagatgggataataattcaaaaatgaataaattaacatccattttctctcttcaatctctgagggatgaagaaattttagaaattttttgttaaataaaataattaattgtcgttaattaaaagaacaaacataaaaataaatgccttttttataatgaataaattcgaccgaaaacatttttattgacaatgtgacggaattcgaacgaaactcattaggaaaaagggaaattcaatttcaatgcaaataaaagaaagtgatgaacaaatagcagcaggtgggaatgattagcaaatgttttaacaaatcgattcggtctcaaaattcacacattttaaaagttaaacaataaatgagcagcaccaattaaagcgaattgccatttggccaatctaataaaaaaattcttcggttacaaataaaacaatgggacagaacgaaagcgaaaagtgtgggggaggggggaggggtggcatatctcagcaaaaatcaggatcaaatcggagggggggggggagaagcagcgaaaagccgaagccaacggatgaagcgagcagaaccggcgacaatttatcagcgaatcgcatctcagcaaacgaataagcagcagaacccacacagagacaaactttgcattgaaaatgcattggttttttttggagttctttaattcgtaagaaatttatttgaaataaattaataaaatagcaaaaaatgaaaatgaacggacaaatggaagtgaaacaaacaaaacattgtgaatgtttattccgagctgttgttggtcgtcattctttttgaaaggtctttcaaaaagtcggaattatttaaaagaattaaaatggctgtgattaatcaaataaatacaaaggaataaattcaaaaaagaaagacaaaattggaaaatattaaaaataaaattaaatacaaagaaaataaaataaaaaatggcaaataatgaccatttccaaataataatcagatcaaatggacagaattcggcgattgcgaaggaattttctgacgaacgcttttaaaaccaatgtaacctaaagaaagggcaaaaatggacaattaaatgccgatatcaaacaaaattagcatgacctgaataacaaataccattttcaattgaaggaattttttggtgcaattttaatcggacctgaaaaggttttaagaaagattcttagccaatgactgatgattggccaacaattgaaaattgttggcacttttttacctttgtcattcaaatgtttgctgaccttttttgtggtagtgccaaagttgaccgatcatttttgccgaagtgagcggagggcaattggcattgacaatgtgcagaagggttacggtgtcacggcccaaactgtacttgacaaactcatgaaaatcagtctccgtgggaattgcgtcgtcgtttttaattttgagcttaaat

SEQ ID NO: 11787 - DNA, 2273 bp, Heterodera glycines
cttaaatcgtttatgattttcataattttgattttgtttaaaatattacgagctcatcgcgaacaaactgttcggcagatcgccaggagaaacagcggtggagccaaagcgccaaatttaaacagccgacgaatgccaaagcgaacagggcgaacggaatgaacagaaaaatctgaaggaaaatgggcaaagcgaggccaatcccaagcagcgcagaagtggccaagcggacgcaccttctcgttgagagtgttcatgttcagcaaacattggaaagtgaggcgaagcggctttaagtcgcgctggggaggacggacgagcaaatcgcagaaagtcacctgaaaagccaacgcatttgggcgaaactgagcaaataaaatcactctcggaaaatgtggcgactcgcgcccggccgaaagattggctagggcattcagtgcccaaggggacgacaattggccatcgtcgggcccaaaatactaaatatgaggtcattcaaaatggaaattccattaaattcaccgaattcaacaaatggagctgaaggaggacaacggccaaattggccaatttgaagccaaagtaaccgaaagtgaacttctgatcgttaaaccaccaggccaacatagaaaacgcatttttgctcgttgatttggggcctaataaatacaaattgaggttaattgagcggggggggggggtaattagacccaccgtctcccgccttcgattcctccgcttccattttcaattggattcccctccgaaagcacagctgatcccgcctgtccttggcgattcgcactgcgaattcctccgctgtcgtaatctctcggctaatgtcatttccgtacgcctttccgattttggccattttgtcaaacaaaaaactgacggcaaagcctaatgaaagaattaattagcaacggaaattttgagcaaaaaatgccatttttttggatgaacaaaaaccaaatggccttgggcaaaatgagcagaagcgcctgagccatcagaatgaaagggacccatctaagaagaaaaaaggtcagcggaaaagcgattaatggcccactggtaaaaatgcaattggcgatggtcgcggtcgacccgacggatgggaaagcgttcgttgaagccgacgaagtaagtgttctccacgaagcaaaagccgtggatgtaattcagccaatgctcacgcgccatctccgccgggggccaacacttaacaaatcaatcaatgccattattgggtcattggtttttaatggtctcagtgattaatctccccgccgccccttttcttttgcccgatcacctccaccggtcggccgaagtactgcttgagcccgtgaagcccggccatggacagaagcacagccggtgccaaaaggtaatggagacggtcggcacaatcgtcgtcatttcgggaaaggatgcgcaattggagcgcactaagcacttttaaagcggtggaagcgggcatttgggaggaatgaaaataaccaaattaaatgaaaaagattaagcatccaactcaaattaatatcgtatggttattttgtgcgtttttattcatagaaatgtcccttcattcccttacaaaatcagacaaaaatgggttgaaaatgacaataatttgaagaattaatataattgttttttataattaccaacattttaatttacttttgcatgtatttaaaatcattaataataaattaaataattttaatattatttaaaaatattttagccttttccctttaaataaccgaaaatttttttttgtgtaaaaattgaatgaataaatattttaaaatgggaagagaaaagggatgaatggccaaccaaatgaaagaacgatttgttgaatgaaaagcgaaaacatttaatattacaaaacagtggagagagaaaggaaagggaaaacaaaggcaaaaaaacggaggcggaaatcccaactgaactgatgcaatctgtgaaatcagccccaccattattatgttaaaagactgatcgatgcaaaagataccggcagaaaatgccaaaggcaccgccagtgaaagtgccacaattgcgaaggcaaaggaaagtgatcacttccgtcctctcttttatttgatcccccctatttatgtacctaatgatttgaacgtataacaaaacatatttttatttgaatgcaattaaatatgaaaaacaaaacaaaaaagggggtaaaaaggaaaaatgaaaaatgaaaaatcagtgatcgatctaatcaattcggt

SEQ ID NO: 11788 - DNA, 4079 bp, Heterodera glycines
tatttaaaaagttttttgaagcagaaaggtttaagaattggtcaagctggatccgcaacaactgtctcaacagcaggttggcgagtcgcaacagctgcagactgctgttagcggtgcccaacaacagctttccatgccgactcagcccaatcaattgctgtcccaacagcaacagcctcagatggcatccatagaacagcaagcggtgctgaacatttttggtaaaaggcatatttacgcttagcgctaattctaacttttagaagcattgaccgtcaatgattcgggaatgcctcccacttatgtgcctgctggccttctcggggggagcggtataggcggccccagtgggtcccaatttccacttgggtctgtgcatggcggacctccatttgcacaacctccgatacaggcacgacaggctataataaacctaaaaaatctttaatcttttgtaataaaaaatagccctataatctaacaacaacaaaaaaagtttagtatcccgaacatttctatatgcaacaaatgatgcaatctgccacaacgccggtcctttcgaccggaggcggaggtttgggcaatacgcagtttctttatgagcgccaaagtgcgttggggagtggcacgatgggaagagggacgggcggagaggtagcagtagcgagccaattcaccactacactacaacagccgcaacagcagcgctcactcgtccaaccccaacaacagcagcagctgcaacaagcagtcacaagcggtacaccgctgcaaggtgtgaccgaatgcaattcggacaaaaaatgaaacggaagcaagacgattagccttgggccaacatttacattgttaaaaagcaattcttatccacttttttcaagggtcccaattccaatgccctcgtcgacccaatcacggcactgaggggagagcaatacttttacgtgcaaatcatttcaaagtcaaaattcccggtggatttattcattactacaatgttgacattcagtgagttttgttgttgtttaaatgccattttaacatttttagacctgacaaatgcccaaggaaggtaaacaggtaaatacaatataaatgaacttcatttaaaagctaattttagagaaattgtgaatcggatggtggagtcgttcggtaaaatattcaacggaatcaatccagtttttgacggaaagaaaagtatgtactcgaaggatccgcttcctattggccacgacagagtcgaattggagggtaaactatttttcatctttgattatccctcatgaacaaatttcagttgtcatgcccggtgattcggcggttgataggaaattcaaagtcgctatcaaggtcatcatcattcattatggctgctctatttatttattatgcgcttgctagtattaacacttcagcttgtggcacgggtttgtctgcagactttggatgatgcgatggagggccgaattcggcaaattccgccggaatcagtgcaggcaatggatgttattttgcgtcatttgccgagtatgaaatacactccaggtgtgtcaaaatgattggcgactttttgctgtgctatttttgcaaaaaaatggaaaatattttgtgtttgcagtcgggcgttcttttttttcatctcctcgttcggcggtcggggctcagcacataaacacgggtgtcggtactttccaaacgggtgacaacaaaggatattcggcaatgggcgatggcaaaagcgatgccaaaggacactcagcgatggacagcaaattgggtggtggtcgcgaagtttggttcggattccatcagagtgttcgtccctctcagtggaaaatgatgctaaacatcgatggtttttcacgctttcattttgttcacctttcatttttaagtgtctgcgactgcattttatcgcgaaatgcccgtcatcgagtttatggccgatgtgcttgaattgcctattcaagcgctttccgaccggcgcactttgggagaccctcaacgaacgcgattcaccaaggaaatcagggggttgaaaatcgaaattacccattgtgggaatatgaaacggaaataccgcgtgagcaatgtgacgagacgccctgcgcagactcaaacgtccgtacatcggagggatttgtccctaaaaaagaatatgatttttagatttcctctccagcttgacactggacagatcatcgactgcacagtggcgaaatatttttatgataaatatcgtcttcaactcaaatacccccatttgccatgtctacaagttgggcaggagcagaaacacacgtatcttccgccggaagtttgcatgattgtttcgggccaacggtgtatcaaaaaactgactgacaaccaaacgtccacaatgatcaaggtacagacccctttttgcgtctttcgattgtccattaaggcaactgctcgatctgctccggaacgtgaaaaagaaatttccgagttagtccgacgcgccgaattcatcaatgaccccttcgctcatgagtttgggatttcaatcactccggtagtgttcatagttcgttcgttcctttaacgattcgcttcgacaggtcatgacggaagtcaaaggccgtgtgttgactgccccaaaattgctttacggaggacggaatcgggcaacggcactgcccaaccaaggggtgtgggacatgcgggccaaacagtttcacactggtatagaagtgaaaacgtgggcaatcgcttgttttgcaccgcaacaatccgtcaaagagaacgatctcaggtcagtggagagcggagactgaccatcaataagtgggtgcattgctactacaggaattttaccgtgcaactccaacgaatctccgctgatgctggcatgccgattcagggtcagccctgtttctgcaaatatgcgcttggagcggaccaagtggagccaatgctcaaatacctcaagcagaatttccccggcctccaactcgtctgcgtcattcttcccggaaagacgccggtttatggtctatagcaatttacactgccttttgattgtaccacaaatcttaaaatgcttaacttttaagccgaggttaaacgcgtgggtgacattgtactgggcattgccactcaatgcgtccaagcaaaaaatgtaaccaaaacaacgccccaaactttgtcaaatctttgtctcaaaatgaatgtaaaacttggcggcgttaacaggtggatgacaaaatatgcttcttttccttactgattcgcattaagcattcttttgccgaatattcgaccgcgtattttcaatgagcccgtcatttttcttggcgctgacataacacatccgccagccggcgattcgcggaaaccttcgatcgctgctgtcgtgggaagtatggacgcacatccatcgcgatatgctgcgacagttcgagtacaacagcacagacacgtgaggaaacggactattctctacgggaccaatcttttaggacatcatttccgaactcacatatatggtcagggaattgttgatccaattctatcgaaacacgcgcttcaaacccactcggattgtgctctaccgcgatggggtcagcgagggacaattccttaacgtaagttccctaaatgatgacccggctaaatccggctcattttcaggtcctccaaagcgaattacgttcaatgcgcgaggcttgcatgatgttggagcgtgggtatcagccggggatcactttcattgccgtacagaaacgacaccacacacggtagtattagtaataaggaattggaaaagttatactatcccttgcacttcggtccaggttgttcgctgtgaacaaacaggaccaagtggggaaagcatcaaacattcctccggggacaactgtcgatgttggcattacgcatccaaccgaattcgacttttatctctgctcacatgccggcattcaggtacattgaggcattgattctgaatctatttatgtttattatttcctactccacctggacgtagccaaatcaggatgtatccagagggtttaatggggaaatcttccacacaaaacttctaaaaa

SEQ ID NO: 11789 - DNA, 2294 bp, Heterodera glycines
  unsure (1)..(2294): unsure at all n locations
cttaggcttttcctccacaaccggcccaatnaggcttggggtttcacccaataggttttggttttcccttacccacaggctcttgacccggaccggagcacagcccttactactcattttttatttttaaaatattataaaaattattactaattatttcttatatttcaaagataaatttatttattatttaaatgttttagaatattcttaatgatttttttacttgtgtgttcgaatttttgatttaattatgtgaagtttcatttatttttgagctattcggcgattttctgtattcaccaaaatacataaataaaaaattttattaaaattttttatcaaattaaaaaaaaagataataggaaaaaagccataaaaatcaaactaataatataaaaaatgtaaaaaatctagaaaatttgaaatttagattattgagcatttaacaaaatacccattcatactaataattgccattataaattcagttatttttgtctattttaaatttattcaaaaataaaataaccaaaagaaaggcatatgcacttacacttttgatgaaaatgaggaaagataaatgcatagatgaaaaaatacaattgaatttcgagaagcatatagtcagacttccagttagaaaaaaaaaaattttttttgaggaaaaaattttgttgagaaattggaagtactggaagaaaatgtttttttttgattagaggaaatattttggaggtctgacagaactatttattaaaaagatgagggtattgttttttgagcgattgaatttggtgaataattttgtcggtgggtggcaatgatattaatgcttcataacatgcgaggattgtttggtcaaaaacatccggtggtttggaaacgtcttcactggcctcgttctggtttggtcctttagcaacatcgggtgtctggtcatttgtcgtttttgggagctgggttggaggtgccggtggagctgggttttgttgacgttttcggagacgcgcttcgtattcctctttgagttgttctttggacagcgccggacggacgaacagacggttcaggttctgttgggaacggagccgagcacgctcgcgcttccatcctccgagtaccacatgttggtgtgtgggcgttggcatgaccaccttgagcgggcgtggtgttgttcgctgcgggtcgtatcgtccgagtcgaaagacggccgttggttgggcctcaacttcaagatggtccaggatttttgtgatggcttccctgtcttcctgaacacgctccgatgggcggatggcattgctttccgggaggccaatgaagaccagggtgcgttggcgttcttgctcttcgagtgtggcagtgttttggtccaggtccagtgcaggtggcattgcacgtttggcgcgaggtggagtgatgtttgatgcgttggttcgcttcatgtcgattaattaggaaagaaaatttgttgttttttgcgatcttatttggacaattaattgtcaaattaattgtgttattcttatatttattaattaatttaaattcgaccataaattttaaacattttaagcctttattattctgtaccgttatgcaacatcaaatgacaccaaaagaaataccccaaagctacagcaggtggccatctctacaaccaagataagtgccgatgacggcaatactatagatggtacccccccccctttttgacgaaaaatttttttattctggaaagtattggaaacatgtttatgggggttttcagggtcgctgatcacgaatatgaccttcattggaccaatttcgaatcccggacccgaattcgaacaaaaagtctaaaactcaaaattttaaaaattctcactttagttcctaaattgattaaaacatgctaaatttggtcacaaaccattggaatatcaaagaatggtcattctgtacagctacgaacataaaagtgaattttcaaaattttgagttttcgactttttttcgaattcgggtccgggatcccgaattggttgaaatggatgccatattcgtaatcagcgacctcgaaaacccgaaaattttcttcaaaaaggggggtaccatctatagtattaccgaaaatgttagtaggcctatcataaaaagttcaaaatttctttaccgaatttcgttttggagtgagtcggtctacgctttttccccactgagatagaggagaaggtgtcaaaatcgatcaacacaaaaaatgactcctttctaccgtatattaagaaaaaatgaacggtaattgatca

SEQ ID NO: 11790 - DNA, 5068 bp, Heterodera glycines
tgtgctggttgttgttgctgtcctgcttcaaaagccgcgcgttcagcgtattccgtgcgctggcagctgcttgactaaaatgggaattcattaatccagggatataagccgaaccgatttaattttcaattccttccctttgaggatcggtaaactaattagtaatgctcgagagaccgagaccaaaaaacccgagacttttctcgagtggaaactcgaggccgagactctcgagaattactaatgccaatgccaaaaccatttaaagcccctagaatcctgaattcaatgtacacgtacagcagttggtccagcagttgcgggtgcagtcccagcggtgtgccgttgctgtcattcattatcggtggggaagcaacaatgccaattttggcggtttccgcgggcggcgacggcggtggcacattttgcagcacggcagcgatcagtgcgatcagttcagtgggtggtaacgcaccgccgcatggcggctgctcattgtgggcaacaacggcaccagcagcagaaggtggcacagcgtggaggggagaaagctaaaatatacgcggaaaattggggaaaaacaaaaatttgaggaaaatagaaaatttgggaaaaatggaaaatttggagaaatttctttttaaatgccgaaagaggaggctaaaaaacggggtttttatgttaatccgaaattagagagatgaagccaaaatttaagtgtatgcggaaatccgataagcagaaattctccaaatgtgcgactttttgtggcatcaaaatctcacttcgtcctcaaattgggcaaccgctgcctgcattggccatgcactgcgccgctgctcacttcggcaccgtgccaacttagcaacatgatggtgatgctgttgtgggtgatggtgccaatcggcgacaccaggcggagaccgactcgcgaaattgccaggctaaaaatggaaaatttaaaattgcaatgaattaatttaaacgtcaattttgcgtgaaaaaatggacaaattggcccaaaaatggaaattgccatcattttcaagcagtaaaagcatgtcataccattccacaaacacacctgttcctgacttaacggtcgcttctgcttctgctgctgctgcgtttgatggcaccgcggcgatgccgccacgactgtcgtcgtctgttggctgagccggcgtcgccagtgcgcacggcaccgctcctcccaacgctggtcatgcagttggagcaattcacgcgtcaatgctgtgccgacaccgccgcccgccgacggtgtcgtcgccgcagcggcgacagtcgtcgcataaggcggcgacgcagagggcacaagttgcgacggcggcagtggttgagatggtggcgctgagtcggccggcattttgccaccgccgcacggttcgccgtctgcagccgacccatttgaggactgactcttcagcagacggtgcacattctccaggcagttgatctgcaagggatttggatacattagagatacttaagaatctcggtctcgagtctagactcaaaaaaaagtcgcgggtttttttttcgtcgtctcctcgagttttaggaaattttcggtccagcagcagcaataggggacataataccacgaaaaaacttcacattgattgatcactgatttttataaaattgccccaggcttaactctctcacctcccacgacggcactcacttggttgtacgacaggtaaacttggctagtgccattgctcagttcgttgcccgtcgttgtgccattgttgttgttctggttgttggtgttgttcgccttccacttgagctgctgctgttggtggtgttgctgatccatttccacaacctctggctcctcctgtttgaccatcaccgccatttttggcatttcattttgacacacagcgacgacggcatttggcattggcggcgatggttgtgcagcaggtacatgctgaaaatatgatggtacataaaaaaattcattatcttaaagatacattaaaaaatttcttcttcttttttgtcctatgtaaaattggaaattttatttttttaatgtttacgaggccgaagcctccgaatttctcagactagaaaaaaatttttccttctttggaaaatatttttattttcccaaattgggtttttcaatttaaatacaaaatataaaactaattttgaattttttttgttgatgttttcgaggcttaaaagcttccgatttattttcccaattttaccttcataaacaattcctggagaaaggcggtgtctgctgccgattcgtccgccgattgaagaataacatttttgcccgttggcatattattaattggcttttgttgatgttgctgatgatgatgatgttgttgttgtgccgttgcgttttgcccatccgccacaaaagtgtgccgtccgacgaccatttcgacagtctgagcacagaaaaatgcaaattattatattgattaaaataatccattaaatttgatttaaaattttcaaaaatcaatcttgaattattaaaaatagaaactaaaataaattaatataattattaaaaaataaaaattcaattttttaatggaaaataaaaacattttttaattcccaccgatgtccacgggttaacaaaggcggcccattccgcgtccacggtgaccgcgtggcccgcataggcggctagccgaagtgccggcgtgcgcacaatttgaacaccgcccgtggcatggactaaaattaattaaaaataaattttaaaaagttttaaaaattaatttccatacgctgttggtgcgcgtcgcggacgcgttgcgcgtcctccggatggaccaaagcgaacaacgatttgccggtgatttcacttgggaaatggcccagcagagggatggagctgaaaaattatagtcaatttatttcaaaaaatttggcattggcacaattttagcaatttttccgctacagtattcccgtggctatgtaaattagtcttcgactaccgtaacccactcgctcgcgcactctctgcccatgtccatcaatcatttggtggatgggatgaagcagcaccaacatcacccgccaccacaccaatctctgtgtttaactagcacacacacgaaactactcaaatttctcgcaacaaataccgtaactttgcgcaaatacgcttttctctcgcttctctcattaactaacgctctctctttccgatactctctctgtctctgtgtctctctgtctgtctatctatctctcttttacacattctctctctatacattccaggggctggacgccgtgagcaagcagtacacacgccgtagcagctggcagcggctggctccaacaggcataaaactttttcatgccagccgcgtacgcccgcccgtacgcatgcatccacgcgaatgacacccgccgaggggaaaaacatgagggatgaatgaatgagaaagtaatgagtgagtgaccagcgccggcggcgcggtcgcgcgagtgaccgaccacagtaagtgccagccgccgcccgccgctgccggcgccggcgccgaactaagcgcaccgcagttacaaccagccgcagattggctggtggcgactgcgacgcgccaccctcgcgcccgccccgcagccgcctcctacaacaattccagtttccgtatgccaacacccggcacatcaatgacgcgccaagacacaataaatcacgcgccgaaaagacggacgacgccgcaggggtcatttgcacccactcactcactcattgctgacccaaatcccacaggagagggggggggggggggggggagacgggtttcactggttgttggttgtgctggtggtggtggtgccgctccccaaaattcactccctggaaaagggatcgctgcgccttggaaggcatcacaaagtgccggagggcataatttggatcggactggttttatgccaaaaaaaaaacggtgcgtaaatccgcggatgaatgcattcggaaaaagaaagtgggagcggagcggctgctttttttaatcgcgcttcaatctttggtgactttatgcatttgatgtatgggaaagtcattttgaaatggcattttgaaaaacagggttttatttagatatgagtgtcatttaaaatttaaaaaattaaaaattaaaaaaaattaaaatagaaaattaaattcgaatgaacaaataaaattcaaaaaaaaaaattgtcatttaatttatgaatttataaaattaaattcatatgaattttcgttaagcaaaacattcgtataaaaaaataaacaaataattttgaaaaattgacaattaaatttttgtatttaatttaattaacaaatgctttttaattaaacaaaaaagatttcctttaaaaaaaataaaggaaaagtttttcaaaactgctgctgctgcttttagtgggcaaatggaaatgaaataaattttccggagaatatttaaacccaattccccgccccctccccccgcccattgttttgttttgagtgtctctctctctctctctctctctgtccgtctgtctgtctgttccccgccccctcccccgggggctcagtcggtggtggtgacatcccctcgggggtaatgtgctgtggtggctagactggtctcgcttggtatcgtagaagacgatttcggaccgatcttattggtcttgctgacccaaataatagttaacggagacaaactgggcctttcttattgttacgtgagatgtgaaattcttggaccgtaacaagacagactacaatgatagcatttggcaataatgtcttcattagtcaacaacgaaagtcagaggttctaaggccatcagataccgccctagttctgaccgtaaacgatgccaactatctatccgccggcgaatttattcgccctggtggggagcttcccggaaacgaaagtcttccggttccgggggaagtatggctgcaaagctgaaacttaaaggaattgacggaagggcaccacccggagtgttacctgcggcttaattttgactcaacactgtgaaactcccc

SEQ ID NO: 11791 - DNA, 1313 bp, Heterodera glycines
  unsure (1)..(1313): unsure at all n locations
gggatggtgcgcgcaaagactttgccgatcgagtacacngtctgatggaaggatgcttcgtcacctcancatggacatgataggatcccaccgtcccaaaattgtcatnttgtcccccatcatgtaaattgttgtatctgtatgtaaatttctgtgatcatcacttcaaatgaatgtatatttaattgttgcctatgtaattgtattgttgttgtgcttaataaatgctcatatgtgcttcaattcaactgcttttgtaggaaggggggcggggtggtaaaatttggcgtctgtttggtcggagggttagctcgcgtagaactcggtctgctcactccttgtaaattcaggtcaaaatgagttttagacaaaagtggtccttcctataagtctaccagtcacacatttcgtttggaattcgaatgtcagccgcccaaatttggagataaactgaaattcagagtgtgcccttccttctgtttcaattcctgagataggtaacactggtacaaaaatgacgaaattcacaaataaggacagaactcgttcaaaaaatcacaaataacaagccggacaatcaaatctttcctttgaaaaagtcattgcttgccttttattggaaaaattggccttttttggtctgttaacaaatcagttttccgccggaccccctcccctcgcccgttcaccagaagttttatggaaaaactgcacccgcaaaaaattgttaaaaatcttattgtttgatcccgtgaaatttacgatttgcttatttcctccccaaaaatcgttaaattcgacaatcggaggcgaaaaaaataatacattattgatcgaataattttaaaaataactaatttggaggcagtttcgcaaaacaaaatctgttctgattttgaaaaattgtcgatccgagccctgggtttaacgactttttaaaattttcatttttttcgaaaatggggggaacaaggtaaaaaaaaattcagggggatgacaaaaaggataagtaccgtatgtccaacggtttctgtgatgacccgctaataggggacgaatgtttaaacgccaaaaaacttaatgccatccaaatgtctacgtcaaacagagagagggagggagggagggagaggaccaaatttcagttaataaattgacacacgcttaatgaccatcaattcaatttatttcggaacacagatggaaataaagtgataatacacagcaaatgatatatgcatacaaatgtacaatacatcaaataatacagatcacgattatgagacatcttctttatctttgcatcttctgac

SEQ ID NO: 11792 - DNA, 2380 bp, Heterodera glycines
cccaaatttggagataaacggaaattcagagtgtgccctcctttctgtttcaattctggagataggtaacactggtacaaaaatgacgaaattcacaaataaggacagaactcggtcaaaaaatcacaaataacaagccggacaatcaaatctttcctttgaaaaagtcattgcttgccttttattggaaaaattggccttttttggtctgttaacaaatcagttttccgccggaccccctcccctcgcccgttcaccagaagttttatggaaaaactgcacccgcaaaaaattgttaaaaatcttattgtttgatcccgaatgcactgaaatttacgatttgcttatttcctccccaaaaatcgttaaattcgacaatcggaggcgaaaaaataatacattattgatcgaataattttaaaaataactaatttggaggcagtttcgcaaaacaaaatctgttctgattttgaaaaattgtcgatccgagccctgggtttaacgactttttaaaattttcatttttttcgaaaatggggggaacaaggtaaaaaaaaattcagggggatgacaaaaaggataagtaccgtatgtccaacggtttctgtgatgacccgctaataggggacgaatgtttaaacgccaaaaaacttaatgccatccaaatgtctacgtcaaacagagagagggagggagggagggagaggaccaaatttcagttaataaattgacacacgcttaatgaccatcaattcaatttatttcggaacacagatggaaataaagtgataatacacagcaaatgatatatgcatacaaatgtacaatacatcaataaatacagatcacgattatgagacatcttctttatctttgcatcttctgacaggtcgctcgctcttcaggtttcgtccatccatccgccggtcgttgttgcatcttctcacatgtaggcgctctgatccggggacttctccggctgcaaaaacaaaagattagtgatgcgtttgctcccgtgtcccccttaaaccaaccgctggcggctcgtacgcgggcgaggctcccatgtaggcgctcgcgactcctgacgatggagaggcttccgcggcgccggacgacggtgcaggctcggcggggccggatcccatgtaggcgctcgcgactcctgacgatgaagaggcttccgcggcgccggacgacggtgcaggctcggcggggccggatcccatgtaggcgctcatgtcgctcatgatgaagtgatgagttgtcgcgacgaaatgtgtagatgagcttggcgcgcactggtgttgatgttgcgttgagttgaaggctggctggcactggtgaaaagtgaagaaaaccgtcgccttttatacacttttttttgctgcatgaatttttgcacccgaattttgtatataaggaggtggattttgcacattctcctcactcagcagcagcaacacttcaagcaacgctctcaacgatcacacatcaagcacccacaaagccagcccgacaacagcgacaacaacagcaatggcgcaacttccaccagaggacgtcgcaacaatgcccacgcagaaggtcgtcttcaacgccccgttcgacaacaaggccacctactacatgcgggtgcgtttggcgtggtgcacgtggcatgcggaataacccctccccctttttcaggtgatcaaccctgggacgaagcgcatcggctacgccttcaagaccaccaaaccgaagcgcatcaacatgaacccgccgaacggagtgctcggcccaaaggagtccgtcaacgtggccgtctcctgcgacgccttcgaccccggcagcgaggacaccaagggcgaccgtgtgaccgtggagtggaccaacacgccggacccagccgccaccgcgttcaagctcgagtggttccagggagacgggatggtgcgccgcaagaacttgccgatcgagtacaacgtctgatggaaggatgcttcgtcacctcaacatggacataataggatcccacccatcccaccgtcccaaaattgtcattttgtcccccatcatgtaaattgttgtacctgtatgtaaatttctgtgatcatcacttcaaatgaatgtatatttaattgttgcctatgtaattgtattgttgttgtgcttaataaatgctcatatgtgcttcaattcaatgcttttgtaggaaggggggcggggtggtaaaatttggcgtctgtttggtcggaggcttagctcgcgtagaactcggtctgctcactccttgtaaattcaggtcaaaatgagttttagacaaaagtggtccttcctataagtctaccagtcacacatttcgtttggaattcgaatgttagccgccaaaattgga

SEQ ID NO: 11793 - DNA, 4516 bp, Heterodera glycines
  unsure (1)..(4516): unsure at all n locations
ctggtccgtctaagtctgttgggctgggtaaacccgactttccccaaataaacgtcacacaggcgccttgccggttctgagcgagcctcgtttatttaattgtccttttatttcccttattaatgttttcaaaatttaaaacaagatttaacaattatttgattattaacccattcacactactctgtccacatgaactcaacaacttgcacgggctgcgaggtaattaatcattgaaaaataacaaacgcaatttggttttttggagcttattttccaattgaaaggtcagccctttcatcataagcttgggcggctttttgaaatttgtctttgatgtttccctttcaaaattgggacgagcacctttaataaggacggagaatacatatgtctgtgtagtcgttacagcttacgcaaagtatgccatgccgaaaatccttcacaaatcagtcaaaggggagggagagatttatttacgacgacacataaactccaccccctcttccacctcattcactaaaagattttgtatttttctaaccaaaaagccatgcaattgttaaaaaaattacaactgccagccgagcttatttacgaaatgactggcgcacttccctttgaccttcgctgggccgttacccgagtttcttcgtccattgattattttttaaagaaaaaacagtttaattggatcaggactaaaataattcgggtaagaaacagggaataaaatgatagtttaatccgaccattaaatgaaaacagggttcagcaatatctcactaaaggttattccttctttagaaactcgcagaacgttgcaaagagttggagacggaaattaccaaattggaacatcaaaacgtgggttttactttaaaatcttttaaaaatcatttaacttattcattagacaattgccaaattggaacatcaaaacgtaggttttactttaaaatcttttaaaaatcatttaacttattcattagacaattgccaaattggaacatcaaaacgtaggttttactttaaaatcttttaaaaatcatttaacttattcattagacaattgccaaattggaacatcaaaacgtaggttttactttaaaatcttttaaaaatcatttaactttctttcattagaccaaactggaactagaaaacgtaaagttgaaacacctggaagaaatgcgcatgtaccaagcaaagattgcaaaaatggaacaggaacgtaaacagcaccttattcccggtaaaacaaattgatgaaattttgtaattccaaattctccaggaccgtccattgtctctggcgcttctgttccgccgtttctccactgttggtggagcagaaactgattatggtagtgcgcaacagaatccacttttgatgatttcatttgaaaatgaggggaggaagggattggatggaaaatgaagcaaaacccaaataaaggattattttcgagcaaagtcacaaaaatttcgattacagaattcattttctgatatgtttgccgagttttaagttaaaacggtcccctaatgacataaccaggctcttcacttatttaaattatcaaagtaaatcgtaaaagttaaacaaatgagaaatattaatgttttgccttttacagaacatcaatttggccggcatgccgttcgcgactcttcccgaacagaaccaaccaaatttcggcggttgtgaaaacgcattcattcagcagcaacaattgacggaaaatgtattgaatcatgttgtgtccgagcaacagttaaagggaatattgatttattccaaataaataaagcacagaaaattgggaggtcaaaggacaaataataaatgcagataaattaaatgacaaatgaatggtggaaaaagcaaaggaaggggaaacaattccatatttatgggcagtaaaatgggcgggaaatgtgggcatttaaaattcaaaatatccacttaaacactacaaatcaggtagaggaaagagtagcagaattcactttcaaatgtgaaaaaaggggaagtcacagtgatcccaaaacacaataaaattttcaaaaaatgactcaaaccacgggaaacgtggcctcggataattttttgcttgtccgggaacaccccttgccgataatttattggaaaataacacttaaaacatttcttcaggccgatctttcttccattccgccaccaactccccaatcgcaccagaaattcggtagcggtagcggcggcactctctcggaaaccggcaaccaattaccgcgttccaccgggcacaagcggatcaaaaaaaccaaaccaaagggcgaagaactcgcgaagaaggctaaagaaaatgtaagtggagtttagttgctctccaagtctttttggtgttttttaaagaattataaaaaacgaaaaaatttcctataaattttttgtcacaggtgccgccgccttttggtcctccgaatcagctaccacagcagacaattggctacgttcctccggccacagaaccaaacaatttttttccaaacccgaacctcgcgtggcttcaagctttggcttacgctcggatgaaccccggtgctggcacgtcgacttcggcgtacattggaggaacgatgccaacgactgtttggcagcagatgccgtactctgctgccgacggtatgccttcatcgaccgcagcgaatcaccatccgatgacgaacattcaatcggccagcaattagcagcagacacagaaggcaatttgaaattcagacattcttccaaattttaaatgtttattttaaggaatccaacgggaacggagctggcgcacatttcgcggacaattaattatgctggttttttgatgtttgatgtttcatttaatcttaaacttttaatcgcactcaatactattttttctcacattcatttaaccatcgttaacggataccttcgggatcataatgaacgagcacttcggttgatgacaaaatttctttaatcctttgaaatgctttctgctgttcacttccccaatgccacttttcttccattctccgcaattggtttaatggctcggaaacggtagccattgcgggcacgaatttgccataataattaaccatacctaaaaaggattgaagctcctttaaattttggggcggtggcattttgcgaattgcttccagcttttcctctgaagcatgtactccgtttttgtccactcggtgtcccaaatattctatgctttcacgcataaattcgcatttgtcccgtttaactctcaggtccatttgccttgagccgctgaagcacctgcgtaattcggcaaagatgttctgcctgtgttggtgctgtgatcagtatatcgtcgagatacactgccactccttcaattccttgcaaaatttcgtccatgacctgctggaaaatcgccggtgctgacgctacgccaaaaggaagtctcgtaaattggaacaatcctttgtgcgtgcatactgccaaacacttttttgcttcatcatccaacatcagctgcagataggcgtctttcaaatccacttttgaaaatttctgaccgccatttagcacactgaataggtcgtccggtcttggtagtggatattggtgcacgtccaaccattggttgacggtcactttgtaatcacagcagagccgaatttttccgttcggttttggtacaatgaccaaaggtgtggcccaatcactgttgttcatcggctccagcactccctgctgtacccactgatccaaaatcttctccacttcggctttgagcgcaaatggtacaggacgagccttacacctttttggttgcactccaggcttgaatttcaatgaaatttgacgggtgcatcggcccaattcgtctcgaaatacttcaattttccgagaattttgtccacctctttctgatcattattcgtggatccgatttggattgcgttaatgccgaatgctttgttcaaatcaatgcgcagtccgcgaatcaaatcacgaccgcacaaattactcttatttcctttaacacataaatatccgtgttgatttacatgccattgtattccacatttacattggccatgccgaggacgccttctatcggtatgcccccagaagccattaatccttggcattgcttcaattcgggctttccaatgtggctccaatcttggctgctgatgattgatacatctgcaccactgtccaattcaaaatcggcatttccttcatgcactttgagttggatgaagctcggcggaacagtcacagttttggccgacttctgctccaaactcgaaattgctagtggcttagcaccgcactgcagctgtatttgcttcaccctgttgctacctttccatggtcgactttccgtcttgacgaatttttgttgcctccatttgtcctgcacacgatcgcccaatgtccgactcttccgcatttgctgcattntatcgnttttgccgggacaantatttagcccaatgtccgctt

SEQ ID NO: 11794 - DNA, 1039 bp, Heterodera glycines
  unsure (1)..(1039): unsure at all n locations
ttatnntggctggggccgcaaatggtcggggccgcaaatggtggcgctccgtttttagcacctaaaaatcgtatccctagttatagtgctgtttgaaaaggccaatacttttgcatttgactgtataaaaggtcaaatctgataaattcatccgaattttacatattattttggtaatgagttttctgctggcaaattgaataagcgcccattatttccaattccgtttcttcaatgctttcaactaaaattgcggtgtccagacatttgtgcccggacatttgcgccctcagtgaaaataagacatttgcgcccctcagtgaaaatcggacatttgggcactcaaaaaaaaatcggaaatttacaccaccagtgaaaatcggatatttgtgcctctgacatttgcgccctcagtgaaaatcggacatttgctcccctcgacatttgggcacccaacgaaaattcggcataaactttagcgaaaatgtccgattttcactgagagcgcaaatgtccgggcgcaacagtccgaaaatgatcctcaagaattggggcgcaaatgtccaggcacaaatgtcgggcgcagaagtacgggcgcaaacgtacccgcgcgtgattttgcgggatctcactccagaaccccataatttctggaattgcggaattttgcgaaataatcccgcgggatcccacatcacaaaagttttgcttcctatcccgcagcggaatccgcaaatttgaattttcgggcttactttttaaagttatacatacatgaaaattgcgaaaaagtcgaaattttgaaattttttcttaataaatttctgaagccaaaaaaccttttgctttttgtaaggctaatagagcatgtgaaagctttcgaatgataccgagaacctgagactaaccaatgtcatttaccgtgtattacgctaatgccaatgtgaatgcttaaaacattctcaattcttccgcttgttttcccgaaactatgagtagagaggtaaattatgaattcttgaaaataaatctataaagt

SEQ ID NO: 11795 - DNA, 2505 bp, Heterodera glycines
  unsure (1)..(2505): unsure at all n locations
aggtcatgggacataaaatantggacaaaatgccaacatatggaaaaatatggaaatatggacataaatcgcgaaatatggaaaaatatggaaaatatggatatagaaatccatcctagaagcttcaaaccaagctaaaaacatgtttttcgtgcgtttcaggcctcccacagatcggacatttacactaccagtgaaaatcgaatatttgtgcctctgacatttgcgcccccaatgaaaatcggacattttggtccccaacaaaaatcggacatttgcgcccccaatgaaaattggaaatttgggcccccaacaaaaatcggacatttgcgcccccaatgaaaattggaaatttgggcccccaacgaaaatcgggcatttgcgcctcatctttaaaatttaatttataaatttagcgcaaatgtccgattttcactgggaactcaaatgtcttttgcgcaactgtccaaaaatagtcatcaagaattgtggcgcaaatgtttataaatgtaaaataaaaaagatcaaattttggttatattaggtatgaagcttttcaactcaatctgacgtttgtgcaacaattagtacaaaaactgcgccgaatgaaaagtatcctgaccgaaaagtgttggaaagctcaagaatttaaattggaagataagtggcgaatttagagaaaatgtcaaggttgttggcacttttcaaagccaaatggaaatgagtcgctaattaaattttgacgcaaattcgcacgagccatcgttttcgaaatgtcctttctgatcatcggataatccaaaatgaattcgcatccaaagtgattgctgcttcgtgaaaaaacggagatggacgaaaaaatgacgaacattcaaaaaatgtgatttccaatccgtttttatttttatttttaaatttttgccataaaagttttgtgttgaattattttttaatcttaagactcaacataaacgtactctctgtgataaattgatcatttgtgaaaaagctgttaacaaattgatcaaaattcttccgccggcattttttgcaccgccagccagccaatttttaaaaacattccattcgttctcactaacatttctcggctgatattatgatatgaatttgggcactcactgataattcattcaacgtacatccatatgcaattttcatttttcacaagcttttatttttcgtgccatgagctctttggtccatttttctcgtctcaacctaatgcttttgcaatttgcgattgaaaacggcacgccgattccccacataatggcataatatgggcatctaatgctgtacatttgtggtgtcatattctctaatttttgaattatttcaacattgtggggtgtgggtcgaactattggaggggaggaggggggggggggggggtccgcaattgcgggttgctcgcaatcaaatccgatcgcaccaccctccattgggtgtccaatccaaggtgataggaaaatttgaaaacttgctgaagggatttcacttgatgtcgatttctgaaggatgggctgaaaatagtgaaaattttttatttaaaaaagtatttcttatgcttctgttgttctgttgtaaccaccgacatttgcgcccccagccaaaaaatgatattttcggcccgtcatttgcgccccggacatttgcgtcacatttcttaagggccattttgggattttgaggccccctgccaaaaacaacacttgcgaccccaaccaaatataaaccgggataaaaaaaaagatatgtggaagtgacagagcgattaaaaatcaatgttatttttgaagggattggatcattttaggacacctcagcagtcaaattaaaatcagatcagtgatcagattaaatgactaatcaaatgcacgttcaaattaaaaccattcatcatttcagagacatgatgatcatcagatcatatgaagggtaatcatatgataatttgtaatgtcgagcgtatcggattagccatcacataatgaattttgttcaaattatttttggcttatattactttcatcataccacttaatgcattgatggaacaagtttggccaaaatttgaacagaaaaagaggaattttgattaaaaaaaaattggataagtgcaatattttgaataacttaaaattattgggtaattggttggaaattatatttaaaaattggattaattttcatttttgttcaagtgtttcctattttggttgagcctgcaaaaaaggggcctcaaatgtccgaaaattgtcctaagaaatgagcagcaaatatttctccttcccactccctcttttgctccaaaaatcgaaaatccgttgcggtgcaccattctttgcaagtgaaagaataaatgcgtaatgtgccgtccgcatttcgttgctgccgtgtcggtacagacagtgctgaaatttaatttaaatttcgtgccgttcgatgttctctttttttttgccttggttccacaactctcga

SEQ ID NO: 11796 - DNA, 1381 bp, Heterodera glycines
  unsure (1)..(1381): unsure at all n locations
tttgaagttttctttaagtgttagtattctcttgttttctcaaattattaactaacttattcagtctttgggctttcgaatgatactaaaaagatagggtttgttcgaacatgaacaaacttattgttttaaacctggtatgtttaattaaatggactcataagtgcattagagcccaaatttctatttccatttggcaatttcttcattctctgccccttttccccaattttcatttatttcttttttcagaacttttggtggtcggcaccgaatcggtccttcacatcatcggattgcccgcttttcagagggacggggcgacacgcaaagtgcagcggggactgatggaaatttggtttgcgcaggggacgccaacgccgggacactttttgacaggtaaaaaatggaggagaaaagcaaccgctaactgttacccttttcagtcaatttccaagcaaatcaactccaaattctgaacactcgcggcgaattaacgcacgccgtcccctttgaaaaggccaagcaaatctcggctattgtttacgtactgtttatttgaacttttatccaatctcggcatttcaaatggcttacaattagggcactcaattcgtcgccattggcaattcccacggtgtcatttcgttgctcacttcgcccgccctccaatccctttacagcatcgaaggtgttcagccaagtcggaaatggtcgtattgttgttctttcccgttcagcccattcgatgaaagtgcgctgcttaacttttctcactgaccattgcaaattgctgagcggttccgacgacaaaaccatcaaactctttgcgttgggcgaaacgcgtgcacagcttttgcgcattttctgtggccacaaaggcattgtcacggggttggccgtctgcgaagcatccgaaagcgaacggtttgcgagttgcgggacggacaattgcgcaattgtatgggacacggagagcggagagcaaagacatgtgttttccgaatgcacgggaatggccaacgacgtggtgagttttttcgcgcggggaggggggggggctgaaaaagaaattatctagcatatgtggtttttgaattatgagtttatatttgttaaaacattcctaacccaagtttttggttattctgtagcttaattaattaaagttatttttaaaattatacgaaaaaattaattttttggtttttgtttaaattaatttggttttcagcgactccgaaaacctctaggacttacaaaatatanagggggggggggttgcaagcaaaaaaaaaaaggtcgtcaatttacatggctggaccatttcgcaaaaatttgggttgaccacccccccccccccccatattttgcaggggac

SEQ ID NO: 11797 - DNA, 1309 bp, Heterodera glycines
aaatttaaaaaaaaaatttttttttttactttaaaattttttcaaaaaaaaaatttttaaaaattttttaataaaaaaatttcaagaaacaaattttagaaaaacttttcagcgatttttttcaaatttaatgaaaatttttaaagttttttgaaaaaattttctaaaaaaaaattttcaaatatttttcaggaaaatttttttactacgataagaaattcctaaaaatttttatgaaaaatttttaattttttgaaattttctgcggcgatattttgtctcggcgatattttggggtgtacccattttgtatgctctgggatatttaaatattaaattctattaattttcagtttgtttaacgaccaataacacttccttaaaatttaagaagcgattataaactccgtatcggagcaggaaaaaacgtctttcgagaccatatttttaggggctgcagttgcaccgaccccgtttacccgggtgcacccccccccccccccctccgttgggttccaacattcattaaataagtacttataaaagggccattcgtgaccattttctcattctcgttgtccctcttcagccccgttgtgtcgcatttactcccaacggtcgatttttggttgccggttccgaggaggcgagcattttggcctttcgcgtcccgcaacccaaaaattatgtggaacaattgtcattgtggacagaggaacaacagagggaatcggttggagaggcaaacggcgaaggaatggccgacgaatgggcggaagagagaagtgagcgaacggaatgacacaaacaaatacatttcaaatgttgtcatagaaaatttttaaaacattgtcctgcgggacaaaagaatctccgattggtgcctttatgcctcttttccctttaaagtgtcgccatttgccgaattcgactcgccgcatgcaaattcgaagcaaaaccgacaaaaagggagaatgggcgccacttcttccggtggagagacgccgaacgatgcggcggaatttggggatgacaatggaggggacgacaatcggcaaacggaagaggcggcggcgatggacgtggaagagatggaaagacgcgagttggaaatgcaattgggcatcgactgacaatgagcaaactttctcactttcaaacattttcataattatttaaaaaacatttactaattcatcataataaatgtttctacaaaacaaattttcctttggcacgacttttgactaatggtcaattgaggctttcacagctcatttttgtctaaggcattttgaatgctatgtgt

SEQ ID NO: 11798 - DNA, 1017 bp, Heterodera glycines
gtacattggctttcaatgcgttgagaacattcgattaaattggcaaaaccaaatattatttttcaatacaaaatcaggacagaaaggagggcgagaagatgctgaccatcagataagcttgagtgagaatggccggcgaaagcattacgggcgaaaagatggcaccaccgagcgtttggggggaaacgatgtcgggcgcgagcactgacaaagggtaattagccaaatgagaggggactattgcctcacagaggggactgaaaatgacgggcgacagcgcgaaagggttcaaaatgctcggaccgatggccttggagggaaattaagcttttagcactggcttagccagaaatttgtcggaaggaatcactcgcgtcgtccccccccccccaaatgactaatttgggcctattaaaagggaaaattagcagcagcagaaagcccattttgttgaaacagagaaaaagcaaaccaaccactgggctgaggatgaacggagtgagaatggtctgtttttgttgggatgtaaaacaattagagtcccattgattaccggattcagaataagcgaacccaacacaccgggactaaacgccaatcaaatgaagggattaagcaacaatgccgagttcaaattggattttgtacctcaatatgtacggctgggccataagtggggacaaaatgatagggcccaaactgaacgaaagcattttgactaataaatgaaaaaaggaataaataaaaaaagcttctcacagagagggactgagaatttgtgccctgaaaagaaaaaacaaagtgagaaatttgaagaaattaaagtgggaaagatgtggaaatcacctgaagagatttggcgaaagaacatgcggagagaggctaaaaggggcggaaaagttttcgcaaatgttttttgattctcacgaacaccgtcggggacaaaatgctgggactgaaaaggcaaggacaaaatggcgggggggaggcagaagaaggacctgaacgcgttggggg

SEQ ID NO: 11799 - DNA, 3132 bp, Heterodera glycines
aaaaattttataccatatgaaaatttcaattacacgtatttttgcagtcaataagtcatttgtataatggatttattttgtaagatgcaattaatccatgtaaaatacgcttgttaggccttaagataatcacgttcttttgcgcgactgaagaagcatgtttttttataagtaaaattctgtttaattaatcttattataaaaatgatttttttatattaattttttataaggttaacataaaattgcatttattttttttaaacgaacgaattatttttaaaattaattttgtttttatcaattctttttgatgtcttttatttatgatgctacattcttcgcgccacgggttgatcgttcattctcgttttcattatatattttcagatataataaccgaaaaataaatttcatttatattaattttttttttttggtcgcataaggtgcactattcataattgctttatattttattttatatactaatttagaatatactttttcaattcattaaatatcaaaaaaaaaattttgttaaatttatgacttttaacttaccggcttctatattttatttgattatataaaagtgttgttttttattttaattttatgagtttttagtcattatgcatgtttgcttacaatttccttcgaagtttcggtcttggacatattaattttaacttaattagaaaaaaaagtaggtacataatttttaattttaattaattttattttatctattatatttaatgaagtttttaattcaatcagtaacttcagttttttatacctttattttcaaatcaataaaaaaattattaattttcataaataattttgttttagaataaacaagtaatgattatttttaattattattcacaattaattaaatattaaccaacgatttatttgataattccatttaacaattaaaaatgcactagcattttggttttaaggtttcattaatttcactaattttttttgtgtttactcaaatattttccagttatcaattttgtgtaagtgcgcagcttaattgtagattatcacttgctgtcttttttatatataggaaaaatttcatttttatctttgttattttaaagtgttaataatatatttaataattttcttataaaaatttagtttatttttagaaatctaaaattaaaattcattgaaactaacacttttcgatatttgtcgaaaagtggataaaaccgtgcgaataccattttactaagcttgtggagccgagtctaatggtaccaaaaatccacaattctgttcagttttcgacaaattccaatagtgtctatttttttttgaaaaaatcagttttcgatggcaaaaagtgaattttttttagggtttttgttattttttaaggttttagtcccaaaaaggagcctccaatttctaagaatttttgcctaaaaaccatattccgttttttgttgtaaaagtgcccgttttttagggttattttcttaacttttcagtagggttcggaccccgcccccgcccccgtccccgggggcgggacaggtttttggggctcacccccgcccccgcccccgtgactttgacccccgcatcccccgcccccgcgaccttcgcccctgcgggggcacgggggtgaaaatacacccctaagaatggcatattcgtgggaaataaggcaaaaaatttagcaattttgaattttttttaactatcgagaaatttttatgaaataaaataaattttacttgtttttattttatttgtggattggtggatagtgcttcaatactaaacagtacttttgtcatgagttcgattccggctaacgttttcctttaatttatttattttttctgattaatacagggtttctttatgttcttgtttctaagaaatgttctgatttgggggtaatgccttattttcatctaaaagaagaaaatttctgaaaaatttggctaagttctaacaaaattcatataaattcttaaaattttccccggttgcgcctatcggcaccgccggcccccaaaattcctatattttttcttaaaaattatcccaagctcgcgaattttgctcattttttgtacaaaatttgttaacaaattgcattcaaattttcaaaaaattttcccggcggcgcctatcggcaccgccggaactctcccctcgcacattcatcaagttttttttttttttggaaaaatgtgccacaagaaaatatgttacaaatctgagttccaattttgcttgagtaaatcatgataatttaatatattaaaaaacaaaaatttatcgtaaaaatcttatttttttttgtaaacatctattagaaatcgagcttaaatttcaaaataggcgatacattgactaaaggaatgtggagccatcacatcattcataaaaaattaattttttgtaaaattttttggagttaattcaaatcaaacccccgcccccgtccccgcgggggcgaaattttcgtgcccccgtccccgcccccgcgactctgacccccgccatcccccgcccccgcgaaaagccacccccgcccacggggtccgaaccctacttttcagcaaacgcgcaacaatgtttggatggacattttcccttttttgccgtcctcaactcggcctcaaattggcacttctttcgccacgtttcgaacttttggtggacaaacatttcgatggcaaaaaaagttgtcgcggaatggacaaaaaatcactggaaaggaaatctttccctctaagggaattctttcctttccctgtccgacggggacagtgttgaaaaaatgcaagtgatgatttcagtgcccaaatgtggacactgaaactgagagtcctctttaaccctcttaatgacccaacgggggtcaatttaatggtctgcatgaaagggctcctgaatgtcccctttacagattgagagaagagcttttctcttactctttattcgattaaacaaatataattcggtgctgggcagaagaagtcgaagaagtgaagagaatgaaaatggggcgggcttgtataccctcacaaatcaatggggcggaggaaatcacgaaagaaatgtacatacaaaaaatcgatcgat

SEQ ID NO: 11800 - DNA, 1028 bp, Heterodera glycines
aaaatttcaagcatttttttgtaattttttaatattatttttgtacaagaaatttaacttcacaaattacgaatttaaatttaaatttttcatttacgtaaatgccttttttttgctgacattttggtttctgccaatttctgttctattttctgtcaatttgttcagcttcccgccaaatttgctgtcattttcgtgccaaattcttcctttctcccttttcgctattcccttggggtgaataacacaatttggccataattaatgcgtttcttccaaatttgatggatattttaatattgtgatgcacagcacacagtatccgcctgctgactcagtacattttttgaaattatcaatcaatcataatgccaaaatttaatcaaataacccattgacaaagtgcaaagaattcggaattaaaatacccaaataaaattgtagattaattcaatttgtttttgagttttaattttttataatatttcattaaagaaaataatttttaaaattgataaaataattttttaaatttattgtctcttgtcaaatgcaaaaattgacaagactttgaattaacgcttaaccgaatgcgttccccacggatttgtgaaaaattttcgctaatttgccaataatttccatttttcttcgctgtccattagaggtgagtgtatatgtgtcagtccaatatttattgaattgtgggctttaaatggaacataaattatgcaaattctttttttgttactccaatgtgggcattggcattttgaatacattactcaaatgacaattacaatttttataaatttagttaaactttggcaaaattttaaactaaaccgtacatttgattgttgcccatgaatcccacgcagccaaacatttccgagcaaatggctccccccgacaactcgggccaagagtaccatttgctcgtgttgccattcatcgtgctgttcggcctctgcggcaatacgctgtcattggtcgccattttccattctcgactgagaaaggtgcca

SEQ ID NO: 11801 - DNA, 4663 bp, Heterodera glycines
  unsure (1)..(4663): unsure at all n locations
tgttggctgccgctgccttttctgctcatttggtccatttcgtgacgctaacgcccaacccatccaatgaaccaaacgattgcaagtgcggcatcagcgacggcggacgattgcaggttggcacttttaacggtctcgagcactcattcccgaagtgtgctggtcaataaagtgtccacttaccatgattaaattggacttgcaaaaacagggttccaagaaaaaaaataatactaccaatctgcaaaatttcataaaatttcatacatccaggtttttttaaatccgtctgtttttaaaactagaaaaaacaattcacgacaatcatgaatttttcaagttttgaaaatacaaaaatttccgaaaaaattcttgaatccatgaaattttatgaaatttttgcagacaagtagcccttttgccaaaatattttcctgcaaaattccaaatcattccgaccataatgaacaatggttaacaacaaatcacctttttcaaactccgtgaggttcttcgtcactaaattgccagtcctaaataatcatagctttttcttactgtattttctgtccatcttacagtattcccctttttaagatgatcactgagttcgctgacgtgctgttgtgctatttgttcccgtgctgtgtggtggttgtgctcaattcggtgattgcttccaaagtgcgccgttctgagaaatgctttcacatcggtccgtcgccgactccgtccgccaccaaaaagtcctactgtacgctgcccacctcggccagcactggttcaacgacggcggcggcagcggtcgcctcggcttccgccattgcaccgccgcgtcgccagcactacgcgtcgccgaaagcgatgacgacggtggtgggcggaggggcgtcgccatctgcggacgcagacgagcggccggcaatgcgtaaactgtccacgcgcaccgcacccggcaacgtgccagtcggcgcccgaacagccggcggtgagtggactaattgattaggctattaattaatagagatgagatatttgggcacaaaaatgggccaagaaaaataaatttagagaattaattttttgagaaattatgtattcattttatagtagattttttgaaattttggaaaggccaaacaatcccttttttattttattgaatttttaaaatcctaaaaatagtcgcaaaaatggctaaaagtattacacaaagtgatttcacattctttttaataattatgctttatttccattgccacattaaatgatcaattcgttttatatttaattgattttaaaataattattttttaaaatgtatttcttattttttaaatggagttttaggctcctcctctggaaatccggcgggaacaacgcgcattctgttggttgtaccggtggtgtacattctgctcaacactccgttctacatgtttcgcattttggatacggtggcgttgaacgtgttcaactccacgatgtttcagtacgacggactgaaccgtaaccccgtgctggcatggtgttacaatgtcgcacactatttgtactacgtgaactttgcctgtgacgtgattgtctacgcattttccaggtagaaaagcacgtgtttgaatttgggagggtttaattgggagaattttttgtaattagctccaaattatttgaaattttgacaaataaattttaacttttcttactcaaaattccatgcttattcataaaattaaaataaaagcaattanattgaattaattaaccccaagttttcaaaaagtttttgaaaagcgcaccactaaaattgtcaaattttttaggttaaaattgagcctcggaattcgatttctgaaaattttggggcctgggatgccttgtataaaatgccaaattggacgcacgtttactggcgccaacgaatgaattggatcagatgattaaagtgaaaaaaggaagatttcgagcatttaaagagaaaatttggtctttttttgttaaaaaagtttgttgatcactactcaatcggggtccccgacccccgaagaggagaggggcatgggatggcatttttggagaggagaggagcatgggatggcatttttggagaggagaggagcatgggatggcatttttggagaggagaggagcatgggatggcatttttggagaggagaggagcatgggatggcagttttgggaatggggaggagagggacatggaattgcatttttgtggtatgggaagacggaggagggaccaatcaatttgatttattaatttttacttaatttcccataaattgcaatggagtaattccagttaaatcagggctcggatcgggcacctccctttccaaggacgggtataccatttccaaggacataagagaaaagttccattaaattcaaggacatttaaaaattttatcatatgcaatgaaaatgattaaatttccaaatggtttatatttttcgcgaaaagaaatttttaccaatatttttttgtttctttttgtaattttcctcatttcaccgcatatgcacttttttgcggcgcgttttttacaaaaaatttccgaggaacaaggcgccgccggggaaacatttgaaaattagagtgtaatttgctaacagattttcaccaagtaaattcgggttttaatactatggcgatgaccattttttattttcgcaacacttcttgcggctgctttttccgaaagactttttgggaatgggggggggggcggcgggaaattgttaataggtttttccaaaattggtcatttttaacgctttttgggtgtcttaataagttaataaaaatttggtatagaaggtcaaatgctcattttcaaggacttcttgaattcaaggatactttcaaattttaaagtgagagggtccaatttccaggacgtccttgccattcaaggacgaatccgagccctgagttaaatggaatgggctgattaatatgtgtttttatttctgtactttcaccaatttctaaactcagctgggacagttgtggctgtgagtctggcattgtcttacgcgactcagctgagcgcgatgatgcgtcgcgcaacgtcgacttgctcgaggctgcatttggtggaggagagttggcaatcaagccgaaaacgatgacacgcgagggaggacagcaccccgcggggacgacaccggtgcaaaggcaaggcatagccaaagtaaagcaatattaagccaaattcaattagcattcaaccaaagtctttcagtcgagagaataaacgagggccaagcgaagaagggttttgtctacggggaccaattagcaaatagcagagaaagacgacaaagtccccggggcaaattgggggggggggagccatggcggcaggtcctttgacgtctttggtcagttacacacacaaaacatattaataattcccctgaggagacggttagaatttagagaagttttggctgtccaactgaaaaattaatgtgccggaaggagacgacataaatggaaagggaaggaatggcctaggcaagcaaaggaaggagaaggcaatgttgcggaagattggcaaactccgctaacggcacaattctttcagcaaaaatgcctttccgacacactttcgttcaatgcccatcgatttctcggcactgcgcaactcggagcttttgttgagtgatcctttgcccgggggggacgatgtgccgactccgatcggctctcagagggagtccggtcgcggggccattctaatggatgcgcatttggcacgaagccaaaacagccatcagtcgcaacaaacagagggggctgatcaccacgggtctcaccaaggggcattccgccgcgtgctgcgccgaactcgacggaattccaacgggggaagttcggtgccttcggtcgctgcccgaacgatttcaccacaactgagtgttggccttggcgaaaagcgtcgctgggggaatacactcaacgccgaacaacagcaacaattgtcacgaatggaactgtcggcacttccgatcgcggcacgcactcgcggcagtctgatgggaggcgcagctcaaacaggtgaaaagggaagggaaaaggagagaaagacgcgacgatgagcacaattggtcaactgataaaagcttattcattcagcgacttttcacagcatttgctgcgcaattttctgaataattaaatcttaagggtttttggtcataacttaaatttagctttttgggttttggaactaggcaccgccgaaataacttttagaacctttaatgaaattgttgaggaaagtcaaaatttaagtctttctctatctctcccccccccccctctctctcgtgttcgttttcgtctcgctctttccatctcatctcatcttatttatgcagaacacctccttcatatttccgtgaagtcctccccctagtgacaataacgcaagaatctccgtatctttttcgcctgtacagtgacaatctttggaccgatctttcccggatttatctcttccttgacctttcaatagaaaaaccggatgtggaccggaaactgggtgtcaatcgcagctacccgaagctcaagtcagccaccattcagggaattgggcaaacatttgttcaacaactaaaaagctcagttgga

SEQ ID NO: 11802 - DNA, 2003 bp, Heterodera glycines
  unsure (1)..(2003): unsure at all n locations
ttttntatcgtgttcacattggttaaaaaattgaaaatgatctcatcttgcatggattcaacaaaagtatgttggcttatagaagtgaaacggaaaaatgttcgaatatgagcagaacattaaagacttggtgaatcccggtaacaaaatctcaatttagctagggaagcacgcacagaagtgattacttgaaaacaggatgcatatccttggcaacttgttaggagattctggcaataaattaagaaacaacaaaacagaaagaaatattcaaaagtgagcactttttttcgaatgggcctgattcttctgaacattttatttttcttaattttctttgctaaaaattatgacattattgcaaaactaattcacggcccttttttgattagagacaaattaatatatgcgaaattttttaaaaacgtgcttagggaaagtcttcttatttaggatatttccttggcaacgatagcgtagattctagcaataaatttaataactagaaaagtgaaacaaaggctaaaatgtgagtgatttttttaaaaaaggccgcacagctttctcgcggaagcgtttttctgaacctttttctcagaaaaaaatagtcgtattataaaattaattttcacccattattttggttgttaaacaatattaatatcttacgcgttaggtaaagcgctggcaatatcgcttttttaaattggtgttacaacaagaaccttaaacgatatgtagcggcaccgaataataaaaataaattttttatcgtgttcacattgttaaaaaattgaaaatgatctcatcttgcatggattcaacaaaagtatgttggcttatagaagtgaaacggaaaaatgttcgaatatgagcagaacattaaagacttggtgaatcccggtaacaaaatctcaatttagctagggaagcacgcacagaagtgattacttgaaaacaggatgcatatccttggcaacttgttaggagattctggcaataaattaagaaacaacaaaacagaaagaaatattcaaaagtgagcactttttttcgaatgggccggattcttctgaacattttatttttcttaattttctttgctaaaaattatgacattattgcaaaactaattcacggcccttttttgattagagacaaatgaatatatgcgaaattttttaaaaacgtgcttagggaaagtcttcttatttaggatatttccttggcaacgatagcgtagattctagcaataaatttaataactagaaaagtgaaacaaaggctaaaatgtgagtgatttttttaaaaaaggccgcacagctttctcgcggaagcgtttttctgaacctttttctcagaaaaaaatagtcgtattataaaattaattttcacccattattttggttgttaaacaatattaatatcttacgcgttaggtaaagcgctggcaatatcgcttttttaaattggtgttacaacaagaaccttaaacgatatgtagcggcaccgaataataaaaataaattttttatcgtgttcacattgttaaaaaattgaaaatgatctcatcttgcatggattcaacaaaagtatgttggcttatagaagtgaaacggaaaaatgttcgaatatgagcagaacattaaagacttggtgaatcccggtaacaaaatctcaatttagctagggaagcatgcacagaagtgattacttgaaaaaaggatgcatatccttggcaacttattaggagattctggcaataaattaagaaacaacaaaacagaaagaaatattcaaaagtgagcaatttttttcgaatgggccggattcttctgaacattttatttttcttaattttctttgctaaaaattatgacattattgcaaaactaattcacggcccttttttgattagagacagatgaatatatgcgaaattttttaaaaacgtgcttaggaaaggtcttcttatttaggatatttccttggcaacgatagcg

SEQ ID NO: 11803 - DNA, 1224 bp, Heterodera glycines
ttttgcaccaaaaagaaatcaaattaatgttgttaaaatgtaaatttccgccgcttttcagagcatcgaattggagaccattgtggtggaggcggtgaccggccgcggcgttcactctccgcacgttttctgcttctgctacgactgcagccaaaagccgaacaattacatcattcggattgggctgaacgagtgagtttttcaactctctcttcttttccatccaaattatcgaaacaaaaccatttttttaaattggttttaattttattgcaccaatcccaaaatgtcctaatcgtttatatatcactaatagaaagattgctgttttaagaaatggaatgataggggtacggcagtgccgaaatgattcaattagttcatcgtaaatactgaaccaagtatttcctggactgaaaacgacagtttcgtttcaccgaattaagcctaaatcaaaaaatctgtaattttatgtagtaaagcttcagactgataacctaaagataacacgtaatctgagaaacatgacccgaattgttgaaaagagcccgatcgcttaatgtgcatcaatcatttcattgcagttttttgggacaatagtctcccttttttgtcccctttttagggtcgacgaattgcccacccccgggcaatgggttcgcgttgtgatgaagcaggaagtgcacgggaagcgggtggactacagcttgtgggaggcgcagaacatgagcaaggccaagcacgagacggactttaccattgacaacggaatccgtaccgttttggtgggttcaatcgaagacaatcccatccaacttttcctaactcaaaaacatttttcccgcttctcaggtccgtgttcccctgaaagtgtccggcgatggcttctacaaccaattcttgggcccagtttcggacatcaaacgaaggtcacgacatcccctcccctctttctaattttatttggatttttaaaaatttcaaaatttagacttaaaatcccaaccggcaaagaacgccgatttgtcagcgcgtggtgccgcaaagtgatgccgttgagcatatgcacaatggatgggtgagaagggggactttttacgatattttaatatattattattgttaatcttttgccttttcagtctttgccattggggaattgcgccgcttccctgaggagaatgggggagtgatcagtcaatttataaattattcataaattaa

SEQ ID NO: 11804 - DNA, 2888 bp, Heterodera glycines
  unsure (1)..(2888): unsure at all n locations
gttccatagaatcactgataattgctttctccctcttttcagcatgatgaacccccgattgagctgccgcacgagagcaaaacgaccttcaaaatccccgtatgttttctctcttcttttcctnttctcccaatcgatcgaaattcgagtttaaataatcccacatttaacggagcgcaacactgtgccgtttgaaattaatttctaatcggaatgctaacaataagcattttactaatgttgtttttaatggtatccgttatccattcctctaagcatacatatgtatatgtatttgtttttaaatttaatttaattttttattttactttattttcgtttaactgtaaatttattgcattaatttattttattttttgtttgtttattcaacgaatgctttcgaatgaatcaaagttcgttgtgcataaataatttccctttcccacccgccgcttaagcgcacaccaaacacaacgcaattcgttcccccccgcccccacttgtccttccatcgtccttcccttccttcaccaaacacccctcccctccccctctctttttttttgcttcaaaagaaatcatcaaaaagcacaacgcccaccacacgcacacattcccttttttaaaatagaatttaatacaaaaaagcaattggtcgggcggtgtttaagcgcataaaaatttgttttatttttacaattatttgccatttttaatttaattcggcctaaatttgaagtcccttttcgccctttctgtttaatggaattacaacattcgtatttcctcttctgctttattcccgacaaaattgctctgcattctgtacattgtagtatgctcctcatactgtcagtgtaaatactacagtacgcattggggcgtgtcccatcccataattattatttgtctgccccccgatatgaatgttttcttcacccgtccgtttcaccatctccatcacccatttccctgttcttttacagtttgtgggttctcgttatcgatcgcagccaacgacgaccgagggacaattagcgaagggaacgacgccgccaatgccccaaacgtcacaacagcagcaaatacagcaggtggagggggtgaggaaagacaagaatggaacgaagtgggcaatgcttaaattcgtttcccacccttttagccaatgaccatcagcaaaccgaaccagcatcacaacgccaacaccggtggacaccgtgccaacgccagcttgtcgccggcgctgggatcctccggtttcggctcgtccgcctccagcaacgcttccgcccaggtcgagcgcgacctgatcgacctcttcgacgagaagtgttcgattgggccgccgctcaaatggacgccttcccctcctccgcttcaacagcaccaggtgtttatcagattataaagatgacaacatgacgtcaaagatatttgacgacaagaaaaatgctttgaccttttgctttattttaattctcatacttttttatatttgtttcgtttggaatgttttatttgtttcatatgataatccaaacctattagcataatgagtataaaattaaaattgcgagagggattgacaaaataaataaataaattacaattcccattcactcccgttttctgtcagcttatcatttttgtaatgttgcaacttgcaatctgttccagttctccggtgtgatgtacccacacaccggcgtaatagcctccatggacctcaaatccagaggctactacgtctacagcaacgagttcgacaacgaactctacctgttaacggaggagttgctggagaagggaagctggattaaatttaacatcctgtaagatagggaatttgggaaacaaaaaatgcaaaatttccctcgattcagcgacgattattaccgcttgacgattggacagtacgccctgctcaaaaaatcccccttcgacgtaagagtcgaaagaaacacaatttatgtgggttttttcactgggtcttgggttaagtttgtcttgatatattgatttttccagatgtgtgtcagcgcgtacattacccccgaggcactgacgcaacgtacaatcgacacttcctacgtcaaaaatgtaaaaaaaaatcgattttttttaaatgtaatgaaatgatttttaaggtctacgacagatgccgcttgcttcagcatgcgcatgttgggaaggagctgaagctggaggtgaagcgcggcaaagtggacggattttgctgggccatcagcagaattatgaaaattgggaattaaaaagagtgaccattagcgaaaagcgataaaaacccttaaatttgtgcctttttgtacagatatttttgtggacaaattttcattatcctttttaacaagcccagatataaaaggctttttacttattccttgacatttatttcataaataaacttgtgatcttttttgtttttactaatttgttcaaaatgaaattggtttgatcggcctggcaaaataaaataaaagtgattgaaagtttttttttgaaaaaaaacaagacactcaaatctggttctaagggttttcggggctgctgaattcgaatttgacatttgttttgaccaatttcgagtccttgacccggattcgaaccaaaagtcaaaatattcgaatttcgcacatttattttaaaattaattaaatcacgcgaatgtcctttgcaaacaattgtaacattaaaaatgggttataaataaaagtgaatttgaaaaattggattttgacttttttgtttgggtccgggtcagggttggacgaaatttcgtttcgtcctacaaatcacattttgagttttgtccacccaccactttcacccctttccattcattttgcccgcccattgtgagt

SEQ ID NO: 11805 - DNA, 869 bp, Heterodera glycines
  unsure (1)..(869): unsure at all n locations
agcgaaggttttctcgtgggcggatggatgggccacaaaaaacaaaaatcannncagggtacactcattaattaaacaatttggagtatttggcaggtgccgccaacaacgaaattttccaccgtcttccgccgattccgtcgtccctccgccgtccgcgccgcctccgccgtacagtgcgtacgctgtcactgctgcgacggacgcgcgccgaatgcgccaaaacgtgtcgccacattcaaattgtccttccgtcgtctcggccctctcctcgtcaatgattccgcaacatttcgttaggtgggttaaagctcgaattagttgcagaatcccgaattctttttttgtccctaaattgattattaaaatcgcattttcagaccccctggcggtggtcccatggcggaccctccggcactgtcgcgtgaccgtccgcgcagcgtagtctctaacattgagcacggcgtcgtgttgcaccaccgccttccccacgcgacgaacacagcgggggtaaaagcatcgccaaagattgtgctaattttagaaatttgataaatgttcaccatttgtcctattccagcagccttctccactccatcatgctcaagcagtcgctgcaacaccaccaccgccgtcgtcgtcggcggtagcgtcggcgttgttccaccaccatcggtcgccacaaaatgttaccagcagcaacagtgcatcttcactgatgacaatggcggcgatgatgcaccaccagcaacaacgacaacaacagcaacagaacagcgggtgaacgagttcacctccttccctccccccttcgcccatctctttcaaaattgtattttcaatcccatgagaaaaagccaaaaggagaa

SEQ ID NO: 11806 - DNA, 2337 bp, Heterodera glycines
  unsure (1)..(2337): unsure at all n locations
tttttttgataaaaattttaggtgtaaaacttttcttattcgaaaaagcaatattaataatcatttaaatgaccaaaaatgaattttttgattaagttttacgtgttttgctccctataaatcattaataaaaaaaatttaaatgcctattttcatgcctttttcgtgattttcgtgccttttaatgcctttttttcaaatttttggtgcctattatagtgcctttttcgcatttttggtgactttttagtcgtgctctacttattattgtatttaactcacaattatccaaattattattacagtcgattgtgtgcccattcgctcatatcttttggccaaaaaggttgaacgtattcgttcaaatgcaattgcaaaatgaaaacatgggtaagcgatggagtacaattttggcggtcccaaaaacatcggaaccatccaaacggggctcagaaagtcacaaggatgtttatacgtgaacatttgaatctgaataagcatttaaaaattaaaattatttttaaaatccctgcatttttaataagcattcatttaaatttttaaaaaagctttgggattacccgatatcgtaaaaagaagacaatccaaaccagtgaattaataatgtaaagaatgatggtgttgacaagtagaagcttaaaaaataattatgtatttaaatattcaaaaatttgggttaaaaacaatttttcatgaaaaatttcaaacatttttttttgcatctttcgatagccattaatgttaatctttcattgctttttcaaaaaaaattgatcttgtttcaaaaaagataaagacgaaatttttttttacaatttttggtcatctttttttttgaaacatgagaaaattgacgatttttttgtcgaataacagtacgagttgggttttaccgtataatccatagaaataaaagaaactttcacctttaaattcttatgaattgggatgcaatttttgttgtatttgtggatcaatgaacaaattgcaattagcacaacgccaagcaaaaacagttgaatatgaatgacaaggtaattagaaccgaacaaagctgtctcaatatcaatacaacttttgtcggcgggcggtaaaggagatgataatgatgagttattagccattaattgttcacttgaaataatcaaaatggaagtattaataataaattaatactaaaaaattatttaacttttatatatttgaaatttcaaataatttactaaaaaaagatgaacaaaaattcatcaaccaactgcacagaaaggggattccgtaatgtgttgtaattaagtagagcacatagtaattactggctcatttataattaacgctctataattatggacttactttacttttaccacattatgatgaagagaaagtgccaaatgcaagtgtgcaatttgggcaaaaatgtacaaattctcttacgtaaacaaggctattagtgcttacattcttttttatcaaatttaatttgcacttccgttgtcccacgaattgtccggcaaggcggcaaaaagcgcggaaactttggcagcgaaagaaagcaattgtgcacatggatggatatatgagaaaattggaattgattttgtgcgaatatttctcatccatttttcttagtgaattaatcttaattaaaagtttgagttttattaataaacaattaattgaaatgtaaatgaagattttttatttttctctacagtttttggcttgcgcttttctcaaaaaatttgaattaggattttggagttctgcagtgccgaaaaacgcggtttgggtccacaaaacgcggcaaatgtgctccgagtttttatctcttacaaacaaaatagttttaaatcatttattattttatccaaaaaatgttcaaaaacaaattttggatttttgaatattgttttattttttcagtttgtaatttccatatgtgctaattgtttaatccattgttatttggaggatggttctgaatttcgggcgtttcttcgtttccaataagcttctttaaccaagcaaattctttgcaaattgcgcgccgataatcttcactaaaaatttcaattttagtgaatttaaaaatatttataattcatcttaattaaaatacatatttgaataattattttaaacaatttatttttattgccttgtcatgtacagaattggaccaatagacgcggaagatatattggataaaatggccaaaatttggcgcgtgaaccataagactattggtgaagcaatatgtggcccaataaaactgcaaagaatgtttagagtaaaataaccgccgantattgacac

SEQ ID NO: 11807 - DNA, 1802 bp, Heterodera glycines
  unsure (1)..(1802): unsure at all n locations
gtttttaattgcacaccacaaaattgtttgtcactttacaggtgttaaatgtaattactacggagtaaaaatggtacccaagaataatttaatttaaaattatgaagcatggaaaaaagaaaattgaacaactcaattaccaaacaaagcaaaaatataatcactttttttacaattgacgttacaaacctgggcaagcttaaagcaattgaaataatggattcttgagttttgtccatgttggcttttgtaaatctgttctgattccgatctctagtccagaggtggtaccgttttccaaagtgccgtttccgtctcggccattgtcgattgtcatggccatcgtactgaagaggagcgccacaaggcaaaacagtaaaacgatcatttgtcaaatagttgaaattcaaaaatgatttaatcttagtatggattttgaaaaagaatttaatattcatttgataataaagtaaataaataaaatatttttatatttttttattgaaattgcttttcatataatgaatgaaatgacagttgataaattgggaacagtcaacagaaagagataaaaataataatttattcattattacatattagcattttattataatgcatttgctgacagaaccgatgaaaacaccaaccgtcgatgctataggagatttgatctaataaaatataaaaatacataaataaatgctaaatcaatgcagcacaaataaaagaagaaattaaaatcagaaaaaatattttttatttaattttaacataaatttccgtactatattttttgcaaagaaatttttttttctacatccaacagaaaataatgtctcaaaatcaagtggaaaagaaaatgtaattaaaataaagcaaagttaggaactattgtaaaaataaactaagaaaaaatttaaaaaaatcaatttttttaacatagtcggatcttgtccaattaatatgtaaatattttaatttcattaaacaaaacaataggcatataatgactgataatttcttctttttttattttctaatgctgcctatgtaatatttctataaattatgaattgcaattacttaattgtcttgtaatgacataacttttgctttccaaatcacattcatcatcattagcatcattcatgaacgcacaaatgagttgtttttttaagaaagttttttttttgtttggaaatcggagcgagtaactgatcggacaaatgtcatttcgcgcacccaaataagcgttaaaaaacggttccacatcgactttttatacacagaaaaacggtttatgctttaatgagagcaaattaaatttaaaaaataaatatatggcaataattagcaaattttttttcatcattttgttccatataaaagcggagtaatcacaacgaaacaccataactctacatattttcctcattaacgtcaataaattttccacaaaatgtacatttcgatttttttattcaaaattgtatccaaccaaaaagcattttaaatttgaaaattttaattctaaattgaaaatccgcaaaatttagcgcttaatatgcaagagactcacattgttctcggcattgcctcgctttgctctctgctggcgattattgtcaccgtagtcactttgccatcgctgtactcggagatgagccaactgaacaacaaagtgcgcgacggcgttcaagtaaaaacaattttaaaaaataccgtaatttattaccgtattccccaggncttccgcgtcaacaccgactcggcttggactgacctgatggacgtgcaag

SEQ ID NO: 11808 - DNA, 1947 bp, Heterodera glycines
gttccttcccccccccccctccttccgccccaccaatttttctcggcatttcgcgccttctcaaaatgtttcgattaattcctcttatccctcctctgccccaactcttaatttgagtttcttctcaaagtgcaagaaatgggcactccaagttacgcaattgttccaacaaaatttgtttggggtgagtaatggcaatggaaaaggcaatggcactggtaatgatctgtctaatgatggcccaccattccattaattgtaagccatcccattaatgcggaagacaaacatttgctactcaataaataaattgaagaagataaaggtggaaaaatcaaagacagaacaatgctacaagaaaaaaaaggaaaaagaaaattagaaaaagaaaattagaggtttgtttccctctccaacaaaactaaatgttctgccaaaacgcaaaatgcaaaaccttttcaaattattgtgccattctgccgtactttgcttcttttaccttatgtgtgatcagagtgttcgatcggctgaatgttttgtcgcaaatgtcacatcgatatttcttcgcgttggatgaccgcgtgttgcgattgccatttgtcgcgtgcctttgctgttgccgtgccgttgtgctcgacctgcgtccgattttgttttcatttttgttgtttgttaagctgtaagtgccaaaatttgcctttccatttgcatttttttaatggcactgactttgcctcgttggcacttacgctgtttctgctccattggtgccgtggttttgtgccgatgccgctgctgccgctcgaaatgcgccgatggtggccaacacggcactggcgggcccaccgttgaaaaagttcggcatcgtccattccgacgagtaattggtgctgtccatttgtgcagaattcatacccgatgtgcccgatgttccgtttatattttggctattcggtgctttgatgcgacattttactgatgttgccattgaagtggttggcattaaatgacgccacggatttgaaggagaataaaagcattttggcatccgattgttggaaggatttgtgggaagagaaaaggatgaagcagggaaaagagggagtcggaaaaagctaaatgaataactaaataatggttgatggttaaatgactgacgagtgatactttgtcggaatgggcgagtgaccggggggcacaaatggccacggcacagaagcagcagcggaggaagccaattgttgttggaaaagatgaagcttgtacaggaactcagccgcttggcccttttcctacagtttttgaatgtttcgcttttcgcccttttgtccttcgcttttttcaccgtctcgctcccctcgccgctctctctcccttccgcactctctcccgctcctctatcgggttggcgttccgtttcttgcgctccctgtcgcactgccacgggcactaatttgttcaatgcttccaacaatgctttgctgtgatggtcgttgccaattccggccgggcccactcgctgatcagtccggtcagttctgccacttgtgttcgtctctttctcctcctcaaaagtgggcagcacttcttcgcttacggtttcttctccctctgttccgtcgttttttgtcccaatgatcggccctttgtcttccaaattcaactccggcattgtcttaatttgatggcgctttccacccaattggctttgcttctcacttgcctctttgccaatttcttccctttccctttttggctcttccggcggattaaatgcattagtgccatattttgctgccactgtcgcggccaaccttttctgacgttcttcaagcaaagaatcgatgaggaagcagcgcctttgagaagcgactgatcggaccgaacacgacgaagtgaacgacggacgcattggggattaagcaaaagtaagcgcaattggtggaa

SEQ ID NO: 11809 - DNA, 1786 bp, Heterodera glycines
ggtaattaattatgttgatttggtcattgattagtcacttcaattttcaattggcgcgcagtttcaatcagtcgccgaatgttcggaattaccaccttttgagcatgttcgtggaattgcccactgaacgggtgcttttccatcacataattttggacgtccaccaccaaaatggccattttatgggccaaaagcggacggacgcggccatttgggaaaatgtcacagggccgaggacgacaatccatgcaaaagtctaaatggtgataaataacaattaattgcatttacttattatttatttgggtggaacgggggaaaggggcgaaaagggaaggaaaagcgatcgataaaatgcaaagaatcgccgaaaaaaataaacaaaataaaatgggagaaatgtaaattattatatttattttttgttttcactagcgttcagtttgatctggtagttttcatgctattttttggcaacttgaattcgaataaaagaatgtgtggagggatgagacaaaaagataagggatggcagtgggttaggagaagacgggacaaaaataaatatattatttttacaatattttttaaaaattgattgttatttcaattaaaatgagaaaaaccatttaaaatattaagcaaatatttattttatatttcagtaagaaataaatatgaaacacatattcaatttaatttattaaactgaataaaaaaatatatttatgtaaacaaatttattttgaaaactaaaaatataaattaatggtcatttttcatttttaaaaatttaacatttttcataaatgcaaaaagataatgatggattagttggctttgtacttttcatctgtaggtttctattttgttattaatttttaaatacattttttttgtctatttattttgatttcatgaaaatatgaaacatgagaaacggaaaggtgttttttattcacacaaaatattttccaagaaaatgtatttaaatttaaatttgttttacgaattcttctgatttgaattttctgctgcgtatttgcgattcttcgagctcaatgtttcaacgagcaactgatttcattattaaacaataataaaataaaaatgaattaacattcaattgcttagcattttataatatgaatgctttattatctaaattggtttttgttaaatgattttgtcaataaaataaagtgccaaaagtggcaaaagtgccgccgtgcccatcagcaacttttttcccctcaaagtgttctctccacccgcccgcataatgccaacggccgccgacttttcggctgccaattcgctccaataattgcaaacattgcaaaaatcgctgtccgcacaaatgcccaataaatattcgatgtctttccacaaactgaaaaagaaatcacttccattatatgtttaattgacttgcatctttcggcattcgttcagcgaagtgaacggcttcaactcgttgttgtaccgaatctgcggggattcactgccgaaacagccgcgacggagcaaaaagtgaccactgttagtcacattttgaagtcgaactggcgaaaagtgaacaaaacaatagataatgggcaaatatttggctaattattacgaatgtagcaaaaggaaccctcgcaaatgtcccaaccgaaggcacaggcaaaagcatccgaacattccttacgatggcaaagcaatgccaaggcaactaaataaagaagcatgcttaaggcgaattaaagggagaatttaaatgattttaccgactctgaaaaag

SEQ ID NO: 11810 - DNA, 3771 bp, Heterodera glycines
acgcaacacgcgctacttccgccttcgactcaaacagatgggcttcattgtgtacgggtcgaacgattcgccggtcattccgataatgatttaccaccctaccaaatgcgggtccgttttataccgaaattttgaaatgaaagggatagaagagacctgacaatgcatcgggacttgagcacttgtaggagacggactgagacttttagtacatgactaacgtgtcatttgccgggattcctagtcccggtctttcctcttgataagtcccgtctggctcgcgtcatgtctttagtccgtcaggctgctcttttggtacactttattccattttgtccattccccattttcagactttgggggcgtcttttgctggagcgcaaaatcagcgcggtttgtgtttccatttcccaaaaattattgcattttccatttggtaggtggtcgtctcttttcccgccactgcaatgacagaaagtcgttgtcgcatttgtatcagtgcggcacatgacaaagagatgctggacagagtgttggatgccatcgacgaagttggcgacatcagtgccaccaaacattcgcacagaacgcaccgttaccgccaattggacgtgaaatggtgaacaaagaaaggggagaacggacacacgagaagagaagagacaatgacgggaaataaacaaaaggaccgacttttgccttattttatgttttttgttagatcatccgttgagttttgctacgcatttctttcacgcgaacttttgccattgccttttcttgccgaccctttcctccctaattttgctcatcactttgcttcttctaatgccctccctccccctttcgtctgctgattgtttccctccgccgttcttcgccctcgctttttcccactcgtcgaccttttttaattgattaattgcttagaaaataaaggagatgaaagcaaaaataaataaatttgttagtccttcggatgaacgaacatatggcacttttggtgctctttgggcgggagcgtggaaccgattcattcctgatcactttgacaaaataaaatgcgcctcctccgtttcgctgttctgttgatcctttccctccaaattgcggagatcattgccaaaaagcccaaatattgtggtgaacgctttgccaaaatgcgggataaggtgggcgacacggcacaaaaggggagacgtacactttttgccttcccccacttttcgctaggtttgtcgctggcccggcgaacagcagccgtgtcttcaactgcaccacagcatcagtaaaacattttacgcacagcaattcttccccccccccctaaaaacactaatggaattcccctttttcgagccttggaaatgctagtgaatttcgtcttttcgggggcacaaatgcctttattaaccaaaatcagcttaaaatccccgcgacagaagagcgtgttcgtacgaagtgctgtgcggagggctgctccctggaggaaatgaaggaggaaatgtgctgcatgacggacgcatgcctacggaggtgctacccgggaaaaggctaccgactgggctccgtttactgaatttggcacaaagggccaacagataaaatgacaaagatgaaattcacggcactatccagaaatcatttcttaacaagaaaggctatatccaaaagagaacatgtgctggtgaagtgagatccaaagggaacaaaacaaagtgaggggaaggaagggaaaacaaccaaaggttaaggggtgaacaatcaaaaaaaaaatattgcttcatattttccttccattacatcggtcatcggatcactcgtcctttcgcttcatcaccatgacttttggcttgtaagagtaagcgggcacttgcagtttattgagcggagaccaattgagccaattggggagagtcggcttcttccaaaattgctaaaaatcaattgattaaacataaaaaccaattgcattttttggaccttatgaaatgccttgacaatgaaatgtttcgtgtgtgtttcattcaaattgttttttgtcatctcagcacgaagacgaccatcgtaattgccgaccaaaatgtaatcgaatcgaccaaactcctcttgcgccaaattctcagttttgttgtatctgataatgagatttgattgtaaagaagtttgctaattatcggcaataaagatcaatagcgaagccagggaatcaaaggtacgccttgaacgagacatttagacaatacactcactcccacgcgtcatagaggtgcaaaaagcgactgatcccagtctcagccgaaaattggtcgatgtgaacggcgattggcttgtcccgaaggaagcggtgcttatgctgaacaatacgtaaatgcacaccgaatcttttaaacgggcgccccgggatggtcccaaaaattggccgggcgccagaagggcgcggcctttttggaatgctgacttaaattaaaaacattgcgtatgcttggaattaattgtttaaaataatgagtgatcgggaaaatgcttcataagtaaatctttgttgaaattggagaattcacctgcaatttgagcagtgcaactccgcccgggtagttttgtgcgctcgcataaacaaaactgacggagaaaatggcattgacgagcaaatgcaacgcaaccaaaaaggcacagaagcggaagaaccacgagtcgcgagcctttttccatctttaaatgcaattaatgcaaaaacatcaaaatcaaaacaaaataacccatagcaaatcaaaattttttagatttttgatgaaatctgctaaagatggctcaaaattacaaaatttggtcattttttggacaaaatctgttaacaaaccgcatttaaaaccgcaaaaaatttccctggcggcgcctatcggcaccaccggaccccctgtcccccaaaagtttttggaaaaaccgccgcaaaaaagtgggtgtgaaacaaaaaggtcgtcgcccggggggaggcactcgcccccaagccgaaatcctgggaccgtccctgccccctcccattttttacatccaagcgcaaaaaacagcaacggaagtgttgaacaatgggacagcgtagagaatgaaacggagttccttgtgcggcaaaaaggagaagagaagcacaaaaagaaaggcgggaagacacagcgaaaccaaagcgaattggacacgttgatggatgagaaggccaaaagggaccaaaaagacggagagaaacatggcacgaggcaaagcggagaaaaagtaccaccaaaagggcaacacctgaggagacgaaagggagggacaaatgggaaaatttgaatattttaacagaatttgttgagggatttcttccagtgtatccctcataaaacaataaacgagtaagagcaggagggggaaagtccccccattggtgcatttttcaaaaattgtctacgccaccccccccccctttttgaatttatgggccaatttgtgaaactcacgccgtactcgctgctacgattgtgccacacattaaagtgaatcacttccccctcaggccaaacccaacgacgccacatgagagagtcgagaagcacagacaaaactgccaatgataagagaatgaagaaaagaaagaaatcaaaataaataaaaaacaaactcaagacgataatcagcgaacaaaatccaacgagcaaagttttgagcaccgaaatgtgacgccaataaacgacaaaaacgaaaagaaaggccgggccgaagagaaggagaagttca

SEQ ID NO: 11811 - DNA, 1509 bp, Heterodera glycines
atttccctatagaactttttttgttgccattcgatgcttcttattctcagccgacggcgatgtccgacattgagcaccaccggccgctgtttccccacagtttttgtaggattggccgacgacgacacattcttctcattttccgcaaaataagattttatcttttcaatgagattcattttttaaaaaagggagaaaaaacacacacggatcaacagaagcagcatttttccttctcatatttattcatcgcctattgcttacacaaaaacgatcagaacacaaaccaaaaaatgttgcgaacagaattttgttgtcatggcagtcttaagatagagtttcgaatagttttttttaattaaaaggctagaatcgttctcaaaaatcataatgaaattctctagaaaaataaaattgtgaaactctgtggtatgaatgccattgactcgaaatttagttgcctcccgagggctcggggctcggctaactctaatccatttatgccaatttccttggacgaatttcaaactaataaatccttccttcatgtgctttaccctttatctcaatgtgttatttttcagaaattttttgttgaacttttcaaaaatacaacgaacgcaccatgatgaatcagcaagtaagttatttgataaaatcgaatattcttatcatttgggagggtcacgaagaaagctgcgataaaatattatcaaattcattataaaaaataagtttttgccctttctcctcaaaattattattattttaaaatttggctgccaaataaggatgggtcaaaagaaaaagtgccattgtcttcccactgagcttgtccatgagttggtttcggcattgccgtttaaccaacgctgggcaactgagcgggtttcatggttatttgaccactttattttgtcaattcaaattgaatggatcaaacaaattttgtcttcggtagaaaattaaattaaaaatctgattgtgtattttaattgtgcataattaattgaggtgcatgccttaattgcggcaaaagacgcgttgttggtacgtgtgaagcacagtgcgggcgctgaccttcgtattttgtttcagagtgggtaaaactccaaaaactgtgctaataaagaaaattttaaaaatttttaaatccctctcaatatcataaatttgttgccaattttaggtcttgctttgcatttcgaagtgccagaaaatctcggaattgaggaatggctggaggagaacgatgtgggcaattacagcatcgaccaattccgcgcacaagtgcatacgctttacttggagattgttcgaactggcaattctgatctgatccgggctgcgacggcgtgtttgttttttcggggtatcaattaacacaacatgggccagatggtgtgaccggaaaatgtgacagtgataatttaatatttgtttgaaaacgagatgcaaatttagttttgttaaggttgggttgaaaagggaaccaaatttcatttttag

SEQ ID NO: 11812 - DNA, 2903 bp, Heterodera glycines
  unsure (1)..(2903): unsure at all n locations
ctttttatatacctaacacaaaatacanntttacggcaaacctcttttatcattgttaaaatgctattgcatgaattgaattttatttgaaagaatttttattaaatcctagtccaaattggataggtaattattttgaaactcatgcacaacaaaaatttgacaaattcaaaatccaattcatacagcaaattcgatcagcacctatttttttgaagtatgttttgtttttaatctattgtataaccaaataaaccattttttcctcaaactggctaaaatgttaggatattgctagaaaaatttgccatttgaccaagagctcttcccttttttttgtatttggaattcggaggtgatatttccaaaattaataatccctttttatttgatttgtcaaaaaatgtattattttcactatttattcaacaatcaaaactaaaattctaaaaaagcattgaagatttttcaattccattttccagattttcgaatttctttggctttggtttaagttctattgctcgtgatattaattttttaccgtatatcaatgaaaaacatggaatatttctaaaaaatatagttattttagcaaattcgcatatttttacaaaaaatgccgtcatagttaaagagattatgtatttaaaagatttttcaaaattttcaagtttaatgttaatcggtgaggtgcccttcttgaccatgcacaggaaacaatggtgtgaactaaaaaattaaaaactaagtttgttttatttgcttatcttgatccgtattttgaaaaaataccctctcgatacataaaattaattttattggattacttttgtcaaaaattaaatcattaaaaaattaattgctttaccattttggttagaagacacatttgattagctttcgctcacaaaacggctggtcactgaagtgtccaaattgtcaaaattaattactggcattccgtccagcaggtcacgtggcctagcccaaagaatcaatggacattattttattttgaactaattaaatgacgaggcttattttatgaaaataagtgccaaaaattttatatgccaatttggataatgtcatacgtgttaaaccggtatttctttaaaatacggtttagaataatcaggcactaaaattcgggaaaaataagattttgattaagtatttatcatttcttttattagcaaatggcaagatttcgtcaattaagcattttcataaaaaaacaaaattaattctaatggaaataatatagttaaaaatgtcttgaggagggtacgtaccccgcgtatgccctcccccctcccctctggctggggccgtccttgtccttggcctgagacaacctctgtttatggatgatttaaaaatttctattttaaaaaaaatattttttctgaaaaggattgatgaatacgaatttccaaaattttttcgtaaatatgagtgaacgcccatttaaaaaacgggttttatttttattttttaaaaaatgtcatttaaatattggacgtttttaattttttaaagtatttgcttaatgattaaattaattaatcataattgaaaaataacgcttttatattgaaaaacttaaataatttgttgtactattaaattaaatcaattcgttaattaaatttataaaattcgccttttataaaaaatggtaaacaaacaacaatcaaaatgcttgagaatagagttggccgagtccgggtatttgggcaaaaatcgggtccagaaaagcggggtccgagtccaagtttttcaactgggtatccgggtatgggaccaggtcaggtacccgaacccggccaacccttgtattttaacaagaaatttgctttctgctgcacaaaaatgcaatttccacaacgcaaaactgagtctgagtccgtcgatgtcgggctggtgttgacggaagctctgagcaacggtgcggaaccgttcaaggtgcgtataaactaggaatggcataaacccatctcatcataaccatacccaacttagccattgtccaaatttgtggccggaggagtgactgcaattgcgcctaaggctgtggatggaggagtgagtactattgcgtctaagttaattgatttgacttataaatgcatttaggtgccaattgtgccgttctatgcgctccgtgacaccaagcctggcgaggaagaattgtctatggactacggtacatacaatatattggggtcccagggacgtagttccgaagaacgaaattggaagtcggaaacggaaacgacccaaaattatcggaagattgagaattaaggaatttcttttttccagtgcaataatgctagctagacttctgaaatttatttttaaaattttgtataactgaattgcgaattctagatggaggagtgattgcgcccaaatctgtggacggaggatcgataatactgttaccagtggtcgccataaaaacggtggagggataaagcgataaatttgatgggctattagctatgattgctatctaatttgttccttttgtcattttctggtggaacatccaataaaaccatttgatgttttatcattttaaaattgattattgcatttccatttttgatagttcacgttaaatggactcgttataagttatttaaattcggggttcgaaattgggcaaacccgagttcggattcgtgatcgccaccctcgaaaactgatttttataccaaaaatgtgtagcgataaacagttacctgaacagaaatcgaaaaaaatatgagtaaattaatttcaggaatgtatggcctatttattgcgatacaaaaggttggggatgtatgaagtattgacaaatcggcacaaaaatattgttttcattgtatagttcaaggantgtcatt

SEQ ID NO: 11813 - DNA, 878 bp, Heterodera glycines
catgaaaacggtggaggaataaagcgatcaatttgatgggctaattagctatgattgctacctaatttgttccttttgtcatttttttgtggaacattcaatgaaataatttgatgttttatcatttttaaattagttattgctttccatttttgatagtccaagttaaatggactcattataagttttttttaatttaattttcaacgctaaaagaaaaaataacaaaaaataatatggaaagcgtttttatttatatttaaaccagtgttcattaaatattcctctgagttccggggttcggaattggacagaccgagttcagaaccctcgaaactgatttttagaccaaaaatgtgtagcgataaacagttacctgaacataaatcgaaaaaatacgagtatattattcaggcaatgtatggtatatttattgataatataaaaggttagggatgtatgaagtattttttattataagaagtaaaaaggttaattgaaaatttaatcaaaagttttttgaccctaccctttttaataaaatttacgtactaagtatatagcttggattttgatttatttaaactttattgcttacctatcagttcgtcactgagacataatttttaaaaaatattgacaaatttcaataaaattgtcccataaaattataattggtttaaaattctctaaaaattattcctgggtaagagtactaccagtagtagccctttttcgaacattttttttgagattttaaaaaatcgaaaaatgagtttatacggttttcaaggtcgctgctgatcatcgaatttgatgttgtactaaatgatattgctctgagatatcgatggagattttatgcaagagctttctgc

SEQ ID NO: 11814 - DNA, 4199 bp, Heterodera glycines
  unsure (1)..(4199): unsure at all n locations
tgcataatgaacctacgcctaaaatttttttcggagaacgggaaatgaaatacccgaggcctaaaaaatccaaaagtgatatcactaaagttgagcgcctttaaacgaacttctattatttcttccattttacacttatttttaattctcaaacttttttgtggcgaacccctggcatttaaattttcaaaatttttcactggcgcctgtgaaaatatttaaaagctaatatttattgaaaaaaatttacaaaaaatatttgcatagtaaattaaaattaatttttatttaagaaaatgatcatgcttagcttattactgatcacttttatttttaaagtggggccctactcactttcctcaatttatcctgcacatgattcagcagatccttttttctactgcatatcctaataataatatctgatcactatcaaaaatggatgctccgccatcatccacattaaataattttgacgctttaccatcacatcattattttttaattatccttcatgcgtataaatttgcaccacaaaactccacataaatgtttgaaactgcgaccagtataattatttaagcattatgataatgatgatgacggagctgatcattttcagatcgcaaattctctcccataaattttttaaacaaattaaaacaattttcgcccattttctttcctctttcttctcgtccccgccacttaatttggatcattttttgcaaagagtttataaaaaattttgcgatcaaaattttgcgggctgatgtgatgaatgatgatcacgaacaaaaataaaagaaagagtgatcggcagtctttagtttttataataaatgtatttattactaatttgtttcaccttcataacgtcattttgtctttttcgtcaaactcaaactttgatcacaaaaaaagatgatcagagtggtacataggcatattaaactgatcagagagaagcagtgaattaaattttattattttgctgatattattgtagtgatcaaagtgatcagatttcgggaaatacatagaaacagagattgaatggtgccagttgagagagagagagagagaaagagatgatacaaatgatttacataaagagagtgcaactgatcagtgttcttctattgtttgctggatgagtgatcagcgttttggagggtgggtgacagagtgcgcactgatcactttccgattaatgctgcctgccgaaaatttagcacatccattttttttttgctgggaggatggtagcaactaacatatcagacgacacataacgccagtcgctccctttatcccccatccgctaattagatcaatcaatttaagagcgccagaatggttgataggaattcagtttgcttccttctgatcaaaatccatatcctgcccgttttttggagcgatcactggagtgtatttaattagttttaatttacacagtttaagctaatcaccaatctcaatgatcggtcgaagcattcaactggctggcctaactgatcagatgattttcttgatctggtgggtagcattgccaacaaaagcgcgtctaatcatgtttcagggtgttaatgtacagatgagagagaagagagagcgagagaaagtgagaagccgacgaaatagcgtattcgtcagtgataaaaaagaccatttactttagcccccggcgccggctgagttgcgggggaatccccccacccaccctcccgcatcatcaccgccagcaaaagcagcaaaatcgttttgctgtatgtgcagttcaccccgacggcaaaaaaaagcagcccgcctccgacgcgcccacactttattagcgcgttagtcaaacaaaaaatctcattagcccccctcattagcggtcccccgactgatcagtcaccacacttccacaccacaactcatcgtcatttttacttgttggtgctcttatacacctctcaaaacattgatgaggcgaccggcgccactttaaaaaaaattttttttttttttggttggtaatacatatgttgaaaaaacaatgttttaaatgctataaattaataaataaaaatataatgcttccccgctttttgaattttctaccaatttctctaattttttcttttttttaaatctctctctctctcttttgtctctcaccttctttttttcttccttttctatcacattcatttcgttttttatcatcgtcttatgcctatgataaaacactttactctcaccttcattctctctcccccacccatctaaatgtccctaaatcacttccccgcacctctctctctctctctttctctcactctcttttttctttcttgtatatctcattcattttctttctctctctctctctcctcaccccctctctcttatccctaagtcacttcccctcccctctctctctttctctcaccctcttttttcttccttctctctctctctctcgtctctctccttctctctctctctgctaatctccaccttttccacacactttctgccctcttcccttggctttctgcttttggcgccgaatgttcaaaagttttcttttttttgtttgtttttcccaatgcttgttgttgtttggcccgctttgcacacggtaaatctttttcatgctttttctttctcaaaatttttgtggaaaattcgagtggtgtcatgaatggtaaagctaagtttgtaataatccatacgtgagattcttgagaaacaaacattttttgtaaactacttaaatggcgtacaaaatttttgtttgttttttgaactccccaaaaaatgaatttttatatgattactctttggcatactgtaataaaacaacaaaacaaaaaatgtttatttggcatactgtattaagttaaacagaattatcgtcaatatttagaaaatttacgaaaattttatttttgatttcctttttcgaatacttaagaaaatgttaaattataaaaattaaaacaattttcgagggccaatgcattcttcagatgaacaaaaacattatttactataataatattaatccaaacaaaaataaatctgcaatttgatccatctccttgcattttaatagaaaaaaaaacgatttttgtttattttatggcattatgactcctcctgcttttagctggttgaatttcacaatgtgtagcagcagaaaatagacacagaaaatttgctcaaaatcgtcaaattatttactattattattattattattattttcccatttcccgggaatcccgcaaaatttgngccaatttgtcctcccatccccaattgaaaccccggggggctgntcctctccccgntgccgggcccaaattgaccaaacatcaacgcttaattgggactgatttggatggcttcccccaataccaaaattttttttaaatgcccataaatttgaaggagaattatgaaggggtttgggggggtttatccaggggatccccccggaaattttgcttcgaaacgaaaaaatttatttgccccaatttcccccccccctgggggggggaatttttcctccaaaatgggccaaattttcccccccctcggagggggggccccttttttaatttgccccaaatttttttgggggaattttcccctttgggggaaaaaaaattccccccctctttttttttttctttttttttttacaccccccccccccccccccccttaatgggggggggggggggccccccacaaaaaaaaaaaaaaaaaaaaaaaaaaaaaaaaaaacccccccccccccccccccccctttttttttttttttttttttttttttatttctttttccccccccccccccctcccccccctctccttttttttttttttatataattaaaaaaaaaaaaaaagaaaaaatttttttttttttttttttttttacaaaaaactcttttttttttttttttttttttttttttttggtgggggggaaaaaaaaaaaaaaaaaaaataaaaattttttttttttttttttttttaaccaccccccacccacccaccaccactcccttttctttttttttttttttttttttttttaataaaaaaaaaaaaaaccctttttttataaaaaaaaataaaaagaccccccaccccccccccccccccccccctcaaaaaaaaaaaaaaaaaaaaaa

SEQ ID NO: 11815 - DNA, 2652 bp, Heterodera glycines
cccaaaatcccccgaggggagggacatttttcggcggtgggatttcacgggtggcagatccatcggattcgaactgtcgtggtgcactttctcccccccccccctccataattcattcatgcgcaaatcggggagcattatttaagcaaaaaatttaccaaattttctacatttgtctgcctctcgccgctggggttgttttcccattaattttttttctgtttggccctgctttttggttcgaaaaagcatttcccaagcgctctattagtcagccctacacaaaaaagcacaatgcttttccagaaaataataataaattttaatgacacccaaaattgttgggtttgacagaacaaaatattacagtaaaataatttcaacaaaaattcaaatttttgcttcaaaaactcatgtagcttctagccttgttcagtttgtttttaggttctaaaaaattaaaccgaaatcagtattgaaatatttaattttaaaatcgcaaattcttgttaaaaaataaataaattttggagatgaatttttaaaaatgttacattcttagggtgtattttttggaaatttttggggtcgattctcaagcgtgtattttttgtttttattgcaattttctgttttggatcttttagaacaatttcaaatttacaaaaaaagcggctttactaagccggcggagagttactggcttttccaacctcggaagatttccaaaaaaatgagaaattaaattcggcaaatgatgcccccaggcgggcacaaagccgcttctcctcctgcacacacttttgagggaggagagcgggcggattatgtaaaatcgctcgccgctggacattttcatcaatcgctgctgtccacgcaaaagcctggcgccagcccacagcaattgattgatcaatggcggtggcgccgctgaggaggaaaagccgctttcaaaaaacggcgacggcgccccaggcgatttacccacctaattccacgcggctggcgagccactggcaacaaaacgccgatcgcgggcgcgcgcgccagcgccgctttttctctcggcgcggtgatcggagacacacatttattttatcctctgccaccattcaacaacatagctctgatctgatcagaatagggtgggggcttcaaatagcggtggctgggcgactgatgatcgactgaccaccgaaccgatcgcatttctcgcgccccgttattacatatattcttgctgcttttcctctccgatagctcttcatcttccttcccctctcgtcccctttcgtcccaccctacccactcctaattcgatcggttggcttatgtttttcctctcatatgctttccctcataatttgatcagtcccacacccactatccctgggttgccattgttcggttggttactgaaacttttcccctcatttgctttatcctcccctaatttgatcggtccccacccctctccccgggtcccatcccttatttagccttcctaatttgattgcccccactcccgctcttcccgggtcccccgcccaccgcctctcaatcatattcacatagctttaacacccattgaggcttcctctgcctgcctgcctgcctttatcgcataacaaaacaacaattatcaaatgatggccgccgctgatcgccgggcgagtggacaacgacaacagcaagcagcatcgcggccatcatcagcatcatgctcattgtcagcatcgtcggttctactgatcaatcgatgccagtgcttaccgccaggcaaagtggtggtgatcagtggcagtaaaagtgccgagatcccgagccgaaataattttgttggtagtgaacagtgccgtcatcgctgttgtgtgcgacaatggcacgccggccggggccccaactgccggctcttcccaccgctgctgcaatcggttggcacccgtcgtcaacagcacatggcgcagcaaccgcttatttcgctgctgcttctttgcttgctcacaatcagtcagtgctttgattctaaagtcctgactgagacaaacaattgatttgggttaaagtgatctgttgcgaccggtaataaaagtgatgcaatgccaactgttgatcagtcagattaatcaataatcagaaacttgctaagctctagatgtcttttaaagtgatcattaatgctttatttgtcggtaaaagtgatcatttataattttggtctaaatgctttctttagcactgaaattatctttgattggtctctgatcagcgcagattgaccacagaatgggttttaatttttttaaattcaacgaaattgccaagcattgtcaaaataaaattttgtacaggtgccaccgtttgtccatcgttggcccaaatgccaccatttccaatgccatcgatgcccttaccggcggctgcgacaaatgcttttgtgccagccgtcgatgcaaatgataataatgacgcatcagtggcggccattgtcgacgctcagccggtggaagttgtgccagccgaactgacggtggacggggccacagatgacgaccaatcgacaacaaatggttgcactgaaatttgagtagagaactcgggtcagagattcgttgaaaatgggatataagatgggccagttcttacaatgaa

SEQ ID NO: 11816 - DNA, 2347 bp, Heterodera glycines
ggcaaaaaataacagtttgtaattttaaattttcaaatttggacaacaaaaaaaaaaaccatttttaaattgttaaagaaaaacttaattttaaaataaaaatttttatatgaaatttaattatgggaattagagctgattttgaaaaaacccgggataccggactggccaggctgggataggattatcgggattcaaattatgtttgccgggctttgaaccccgattctcggccttggtgtttacttgataatttctgagcattataactatcctcgttatctcgagactctcgaccctggctttgatcaaaattaaagaattttctgtgtcatttatactttattaatatattctggaaccacccaaaaaatgtctatcccatccagcgctacgcattggcggcgtccgtgcaaatgccataatgagcgaagcagtgccgttgttgccgccttctgccgttgcggcggcacgcgcgtggaccaaacgatttcaatacgcgtctgccggtgccgccgtcacccacttggccagccctcctgggactgtgcctttgatgattggcggtggtcttcctacgaaggcatttggaggccccgccggtggcggcacggaacggcgccgaaagccgccaacaatcggtgccgcaggcgatgaaatgccaaaggagcaaaagcaacggcacggagcgaaaacgacggaagaaggggcggcggatgacgaggtgtgagtgaggggaggaagaagtgatcggacaaatccaatggaatgaatcgatttcaaaaattttgcgaaaatttttgaaaaattttcccaacggcacctcggcatttttgccacccgtttgttgaaatttttcaaaatttaaatcaaaagtcctcaaaaagttcgacaatggcctgctaggccccgatcaaatgagggtaattaacggattgatgacgatcggttatcgattgaccaaactgattgaactcacacacagtccgacaccagtgaggcggtgggcactgcccgtctggtggccatggaggacgttgatcgggacgaactcagcgcagctgcttcacaaactggtgctgctgatcaacatgcttcgacagcagtgacaggtgattttttgaataagtttgggtttacaataattaatcccttctgatcaatcactaataaaatgatcatctgatcagtcctttgaaatatgcattcaaaaaagagtaacatgagtccattaaaaatgtatgccttgatcacttcctaccaaaattgagtcctctgataatcagtcccctcaaaggcgagcccctgatcagtcccttcaaaaatacatcccctattcaatcccctcaaaaatcaatccctccgatcaatcagattactcatccacccacgatgatcatctgttgactgcgtcctccgcttcgcccactatttccaccgcttcttccgtgccggaagatgataatgatagtggtgctgataatgttcctcctccgccacctccgattcatccatctgctgcttctccactggatgatgatcactcgccgccgttgttgtcctccttgtccggctctcagttagccccatcgcctatttcaccgccacccatcgtcattctgtcaccatccgaaggcaccgtcgaattggttggtggctgatgggctggcctagagtcgaaattttccgagactcttgagaccccaaaaaaccgcgaaattaattgagcccgagagtcgagaccgagaagctcgagcagccctagtgggtgaagacggtgtttgttggattacacaacgctctctcacttcctaccacaattgcccataatcatcaataaatagatgtagcaaaaaaatgatcaaaaatgctttttcaccaggaaaatccgactaccgtcgtgccgcaaccgtcgtactccgttggcactacggccgcaacggcggcaacaaccgctgatgctgccgccggggacaattcgtcgtcgtcgccattctcgccagttgctgttgagttgacggcatcacaacctaaattgccagaggcggcggaaccatttccaagcagtagcagtgacaatgcgccgcgagtcgcggcggctgcgcaacggtcgccgagtgccgcggcggcggacagcgacggcaacatcaacatgaacaacgaggcgaagaacacgcacgcggtgggcgagctggacctgaagtcggaccgcgaattggccaagctgatgcgacgcacaacgtatgtgctgtgtttgttataccgtgttgttgctagcgattaataaattgtgccagggattaccgggattaagcagggatggtcccaggatttctgtttgtagagg

SEQ ID NO: 11817 - DNA, 1645 bp, Heterodera glycines
tcccatcaaagaccgtgggaatccctttcttccgtttctttttgttgcttaccctcgggcgccatccaagcgggcgacttaatcggccgacctcctggaaggagaactttgtgtcggccatggaaattttggcggacaaatcctcgtcgatgagcacgtgctttgagctcagataatatcgcaggacgggctggtccaaggagtgcaggaaggacatgccacgggcgaggtccagcgcaaaacgaatggcctggtggtggtcgatgaccacagctgaattttgcaaaaatttgtcttattaattagttcaaattgcaaaagatctatcaatttacatatatttgcttaagtttttgctcacatgactgctcatgtagcacattgtaaagcgagccgaaaggcatgaattggctgatgacaatcagttggggcggttggttgaccacggccaacacggggttgacgaaggcactggcgaatattcttaacaaaaaacaatacccccatttaaaaaggagaaaatgggaaattcaaaaaagttgataattgtaagtatatttccaatccaataaaaaaaatttaaaaggcaaaaattgggcatttttttaaaattaggattttgaaagacacattcggaatgtggcataaatttctttaaaatgaatgaaagggcctctctcatcgtgccaagcttcaagaattttcatttccgaactcgccttagttgcaaaaattcggtggcaaaatcgcgcgatattcgctccgtcacattcggcacattgagcacccgtgccacaatgtcgttgttctgccatttgccgcggtacaaaatgccggaatgcgactgcgcaatttgtttggtcagcgccaacgattggaggtcaacgccggtgtatctgtgggaaaatgatgacaatggatcatcaattgggaaagcggaagaagggacacagaaaggtgccattcaaaaaacgccggaatttgctccctgttttttccccttgaacataccgtgaccacgtcgcgtcgcgtgaacgaaatgtttttgtgttttgccacgcgtcgccgctgtattggatcttctgctgcggattctgtccattgctcaacgcaatctctgaaagcagtgatttctaattggccacatgagaaataaagaaagaaaattcatttaatttttttttttgctgggaaggtttttcctaaaaagctctcacctttttttaattcaaaaagaaattttcagaaaatcagcccccccaaaaaaaaagaaaaaacgtgccatagacggactgtcggacttgtggttggcacacatccaacggggtgagcccgcgcttgttgcacattgtggtaagcgcaccggaacggatcaaatcctaacaagtgggggaaaagcaatgaaaacagcacaaggcatagcaaaagcaaaggcacggcttaaaaacacacctcacaaatttgttcgtagccccaaaagcaggcgtagtgcagcggggtcatcccatgctcattctgcacgttcacctccgcttttcgcaatagcagcttctgaagtaaatttttaatggtgggttcattaggtgtcatcgccggacgaatttttggatttattttctgacagctaattgtaagtttaaaattc

SEQ ID NO: 11818 - DNA, 1950 bp, Heterodera glycines
  unsure (1)..(1950): unsure at all n locations
cgtgatttggcatgcgtaatacttataatacatttttcgtttttgtgcggaagaactttaaaggactggacattttcgtttaaatcgcgtttaagatttaaaaaataaaaccaaaacggaaacaaactccacaaataacaaaaactcagccaaatttgttattcaagtttaaaaaaatggtaaattttttagatttactaaattctttaacgtgtcaaaaaaggttaaatgtgtttttggatcgaaaattccgtccaccgccccttcacattacccaacattcaaatcgtgctcagagtcgtccaaccaaacgcgcacttggaacgaatttccctcgcgaacccagccaaaaatgtcctgaaaatgtccaccactttttaatttggaaagggctcaatttatttgatttgcaaatgttatgaatgaatgtccaacctccatgagaatgggcacatttggcttgtgcactttgtaagtgggcgctattgacatggcaacaaaatttacaacaaaaaaagacgaaatgaaatgttaacaaaagaaacaggaaagccctaaacaatgaaaatggttgaaaaagggaaaactgaaaaaaaactcataaaattgggtcctttccaaaggaaacgaaacaaacaccgcaaggccaaaatatgcaaaagcagtggctgatcgatattcttcaaataaacacattttggcacaaatctgaggccttctgcttcggccgatggacgaaaatccaccaaaattggggtatttgttttatgtgtgaccgtggtcagcagagtatgttaggcttacatttgtcgcatttgctcgagaattagtcctttataattttgtaaaaaatgtcagcttactgcacaatataactttcccacacatataaagctaacaacaattgagtctcacaaagtgtaaaagccgtttcattcaatcgattttgttttattgaatataccctcgggcccgtacgctttggatgaatcgcaacgcatttgttgctgatcggtccacccacacacccagccaaacaactgttggccgatccgccaaacatacacacacaattaccccccccccgccccaggggtttatatcccccggatgatccatcccaaaatatgtggtcggatgggcggggtgattctttgttgttttgtccacagcaaaaacaattcgacggcggcgtgaaaggaatttagccaaagcggcggagctgcaaaaatatgtgcgaaagagaggggcaaaacaaaagcggagggatttgatttagtcaccattttagccaagagattttggggggaggggtaggtgaccgatggaattccagcgtattaagcggctttaccgacttcgccagaaagtgtcgttgacccatgaaaacgaatgcttacaattcagacggaagtgtttaataataaagagtgtatctgcacaaactcatgaaatatttaattcctcaaaatttgttgctgtacaattttggtcaaaatttctttgttttattgcctcacaacactttttgtgaacgccccaatcaaatcgttggcattcgacggaacagtaaaatgtctgaaaatgaaaaaatgcataaaagttaagaaaaaccatggaatttttactttacaatctttgcaacgctttttggccgatggcactgcgcacgttctgcaaaagtgtgccgtttggacaaaacgagcgccgagcaaagtttgacagagcaaaacgaaggcggacggaggctcaccgaatggaaccgtggaaatgttacggcccaatgtctgccaaagcatctgacaatcagaaaggacaattaggcttataaagattgacggggcccggcgacttattgttagactcccccccccccccccttcgcccgcaaaaggtcgaaacttgnggatggggacctcttcgcagcaaagggaggccggtgtaaaagag

SEQ ID NO: 11819 - DNA, 1125 bp, Heterodera glycines
cggacgcatcgaatgccaatttgaccgggtgaaaggcgtgggtccgcgtcaactgttggatgaatttggccaactcgggcgggtaaaggacggcactgtccgccccttggggatgcagaatcgcgtccacgtcgcgcaaactgatgtaattggagatgatgctcacgcattcgtgttgcccttaaagggtttttgggatatttttcagttttacaaaaaaaaaataagtttattgtcaggtaaattattttaaaaaatcccaaaatttctcgaggaagatagacaaaccggaatatttccgactgaaatttgaaaggatatgaaatcgaaaataaaatgactttggaattaatcggtttaaaaagttccgacctacaaaagctgcgagttcggctgctgttttaccaatgttgttctgcgcatgcgcatttgccccagcatccaacaatagttgacatattcggccgttaccttcagcaattaatgattggcattatatttatatggattatagattaagaaggttcaagaataaatggacagttcttaaaatggatcggttttagggtaagtgcttaaatgctccataattttgtttgaaaatttaaaatttttttgtgttttaaatgtatcccatagggaaattttgaaagtaaaatgacccaaaccaaatgcttattaatagcttgtggccacacctgcgagtgctgcgaacatcagtgccgtgtatccgtccgagtgcgctcggttgtccgagtccgacccattttcaagcaaaaactcgaccaacgcttcgttgcccttgaaacacgcgtggtccaacgcgttcatcccgctgttgtccagcgaattcacacgcactttgccactcttaaccaattcctcggtttcctcaattttgtctataaaacgaaaacaaacaaataaaaaatacataaactattcaggagcaaaaaccttcattgatgagctgaaaaagctgtttctcttcatctgtctgatttttaagctccttcaatgtgaaattgtccttttggtttagcattttgtccaacaacttaaaatttaagaggttttatgtcggaatgtgatgaaaattaaatttcgcgcgcaaattttggacat

SEQ ID NO: 11820 - DNA, 1117 bp, Heterodera glycines
  unsure (1)..(1117): unsure at all n locations
ttctctattgacactcgagttttgccgagactctagcctactagccgagactctcgagctttcccaacaatcatcgagccttaaccgctaattagaaaaatgaatgaatgtgccaataaatgagtatcgatgacagcctaattaatgccgttttttgcccacccttggcaatgttgtgcttcccccattttgccaattcatttgttcatgttcatgctcatgccgttgctggtgttgcagttgatgatacatggactggcgctgcaactgctgctgttgttgctgattcgctttgctgccgccgtttgttggccccggcgtttttgagcgttggatgaacagcggcttaaatgcaattaaaataaaatttaattaaataaattaattaaatttaaaatgcgaaaaaatccatgcccaacacactctgtgctgttgttgtgcctgctgttgcctttgtccgcttacgccagcagttgtggtgccattcagcggttggcctcctcccacaccgtcgccgccattaccgtatccgtaccggaaaccggcggtcggtgtacgagaccttgaacaaataccaagtaaaaactggtcgagattctattgcgttttctcaattccggaaatatgttaaatttaatcatgcatactgtacagaagactggactactactgtagtatgtagtagattacggtaccaattttctgcttcacctttgtttgggcgctcgccggtggaccaacattttgcagcggctgccaatcgggaagtcgtgcagcatttggacgagttgcgcatggggcagggcacgcacattgtgaccgttcacctgtgttaccgtagtaatacatacagtacgaaacaggttttaacctcacccccatttacagtacctccaaaatggtgtcaccttcgagcaaattcgggcactggtccggatgcaaaatgctcttcacgcgttggccttcaaaaatggaatcacattacttaaatttttgacaatttgccgcatgaataattatttnaattgggtatttccccgcaggacttctcagtcgcgaatcaaaaaaatggatcaagactcgtttncagaattgtgccnnatttaaacatgtgcca

SEQ ID NO: 11821 - DNA, 4450 bp, Heterodera glycines
aataatttttaaattaaatgaatttaatttataattattaaaaaataattgaataaaaatataaaataaatttaagtataagtacaatattttaaatatctaaatttttgttattattaattaaataatttaaatttacgcattaatatttaatattacttttattgtttttgaattctataattttctctatttacaaatcaaattctaaaatattgttctaatacagggatgggaatcgtacttgaattgcaagtacgtacttgaaaatcggccctaatgcaggaaaatatgaaatttgcttattttcaagattgtacttgaaaaagagaattcaaaaaaaaaatacattcaaaaatttattattttttgaaatttacaccaatttttttattaatgccaaaaaataaatttaccaaaaaatgtgtcggaaacaaaaaagaaaatgttggataaactttttttttaaagcgtgccgaaaaaagtgcacatgcagcgaaatgggattggaaaaaccccattctggcgcaaaacacaaacaaccatctgaataaacagttacccctttttcacatgttattttttgcgtacttgaattttatgaaattttccagttgtgtacttggaaatcagtatgaccgtacttgagaagagtgtttggacgatcccaaccagggctgtgcgaaaatcacaaaaaaattttttcgtatacgaaagcgaaacgaaaagctcattcgatacgaaaatgaaacacgaaacgaaaaataaaattttgaaaaccgaaaacgaaacgaaaaaattttggcggacgaaaacgaaacacgaaaacgaaactcaaaaagtgctgaaaatgtaggacgaaacgaaaacgaaacgaaatttcgtccatccctgatccccgcctcttgggcagtaccgtacccaccgaatgcgtcatcgtacaccgtaaagccaaatcccttttggcccttgcacagctcgaccacgtgttgctcacggaaacggtggtgattctgatggttgttgtattgctgctgctggttactgttgctacagttttgctgctgttggacggaggaagcggcggcgtaaacattttcagtgaaaatctttaaaattcaaatttttaattttttttttaaaatttaaatcaattgcaaaaaaaatgccgttgtgtgttttaccctgtttgtcgggtccatttgaaggggatagccacggcacacttggattcggacaaattcaccaacctaaagcgagtaagtaccgtttatttccaagcgtattacggtattctacagtgaccacacaagaccgtacaattaaatatttagttctctagtgattttttttcacaaaggtctcattcccgaatactgtaggccttatggacagtgtactgtaacgtactgttaataaggtacaaaaggatatacttttgtattagattagaatttcgaaaatatgaaagaatttttttttaattgatgccaaacaaaatatgcccattgagtgtaatttatgggtcaggggcaatcaatcaatcaattagcagcactaattaatgcctaattaccccccctcaaaaaaaatgtgcccgcccgcccgcacattgatggcacggaacacttggcacgcgtcgtcctggctggcgccgagcatgcaccggtcgttgaccatcaccagcacgtcgcccgagcgcagtgtgccctccgcagcggccggcccattggcaatgattgttttgatccaaaataatttggcaatttgaaccgacataattaattgattaattacaatacaacactaatggcaattgaatgccgcacactcaaccattttcaaaaagtttctgggacatttatcaatttttggtttatgcaagtcttaaaacaaattcataaatttttgagaggcggcttaaaacattaataaaaggaagggtaattaaacggatttgtggctcttcaaaaaggagaagcgggtcatttgtccatgaaaggaagggcacttcaccacccggtccttaattgcctatgtgagtttaaagtgtttgaaaaggactgacaattcaataaacggatttgtggccctacaaataaggataattggccttctgtccttgaaaggaaggacacgcccaccccgtccttaatttgttgtaatgcaataaaaccagcttctcccaccacacctggatgaactcgtcgtgcaaatttgtgccatcgttgccgatcagtgtgaagccgagccctttgggccccttttggacacgggcatttaaaatgtcgcctttttttggggtggggattaaaacacttcgccaaaaattcccgcgctttttgaactgaccacaaagttcgccgggatttcgcgtgaaatgaattcgctgctgctgctgacgctgataaccaagcccagcaccaccgccactatcataatgatcctgctgatgaggctgataataattggcggcgccggtgccgttgttgtgaaaaacggcggtgccataaattcctgccaatgtaaaaaaaaagtaaataaatatattaggaaaaaatctcaagtctcgagtaaaaaaataccaattcttgagcaatcggttggcattttggaaaaaaacatgatggacaatacaatggctggtcaaatggctttcatatttagcctaagacaaacccaggcccattgaaatcgagtcaatggcaactcgtacaaaagacaattcatacaattaaaaaatttacaaataaagcctaagcctagcctaaagcttaggccaagcctaaagctacgacaccaaaaaatccgggtaaattctcaaacccagaatatctgtccgagtccatctcggaatttcgtgacccctaatccggctcgggttttttgaaaattccagactctactacccaggtccaggtcaaatatctatctatctctacaaatgtgcatttatgtaataattggcatgtgctctaccattattggcaccactgttcaatggaatgccgccacctgccgtcgatgccatggacaccaatcgctcgtggtggttgtggtggagattcggcggcggcggcgccgtggaggtggttgccgtctgctgttggtgctggtacggctcgtagatgggctgcttggtggacggcaccatgaccagcgaagttggccgctcatactgagtccgcttgttgatgtggctggagaaaaagcaattatgcaattttataaattagatacagtatgccgctgttttcagttagatacagtaatgccttcagaactggggagagcagcccgtccccctccgccctcgcccaccctccgacatgaattgccaaaaaattaaaaacaaaatttttataactttcaaagaatttccgaaaaaaaaaaatctttgtctgattcctggtcttttactgcacgaatttaaaagttctctcgggaattgcctgctttctaagcaatttgaataccaacattttaaaatttccaacgctctttggcgttcccttcagtgtcttccacttttaaaattggatttttttttaattcgaggcaaaaccctctctctctcccttcactaactctaattggtgatttccagggatttgtgagtcccgtctaagtctcaggggttaaatctcggtctcgagtcttgctcaacccgagaaaaactcgtgtgtttttttggatctcgaatcttgaaaaattttcggtcactcgagaaactaattcaaaaattttcgacaattcaattctcgactttgtaccctttgagtcttacacattgtaagaagtttgacatttcttttaggttagcaaatgccttccttacaaatagaccacttggtcaagcagttcgctgccgtttctgaatgatgccgtgctggaggagcgggggcacccgcactggccacagatgggccggccggggaacataatttttcaaatcaaaaaatgcataattttttaaagcgattttctgtgacggaaaaaaacaatttttttttaattttcagacaataaaaatgaataaattttcgagaattaattcgctgttcaaacattggttttttctttccctttttttggggtcttcggagcgtgggaaaaattgacgaagaatttttttttcacctttttgaatgatgacggaataatatatgaattgaataatggttgaaaaaataaaattaaaaataggaataaaaataaataaaatttataatgtttaaaaactttgccaggaaatttttcgaaatttccaaaaaattcgtttaagaaaaaaccttaaaaacaaaaatggcaataaaataaatttaaaatgttaaaaattatgccaggaaattttttcggaatttccaaaaaattattttcgaaacccccaagttttactgcttctcccccggtggtgatctgcgccggcagctactttcgaggcgcaaaa

SEQ ID NO: 11822 - DNA, 3161 bp, Heterodera glycines
  unsure (1)..(3161): unsure at all n locations
atatgtgaagatatgcaaaaaaataacaagaatatataaaataagtttaccaaaagccaatcattcaaataacaatggaatttttttcagttttcgacccttggaaatntaggcgaatctttgaaaattccaactcgcttcaaagtgaataagttacggtgaataaagctctaaaaatataaaaaacataattttctatcttcaaaaagaaagttgttattacataaactttgaaaaatttgttatttagaaaaattactattcagaaaaggtgtataaccgaaatttttcttggtgtaacaatgattttgttttataattattatcctaattaagcaataatttagtgaaaggtacttaattgcttttgtgggttttattttccacattttatttaaactttaatttttttaaatttaaattaccaaaagcgtttcgatgcaatccctccgggtacggaatttcaggattggaatgcttaaccgaattgtcacgggccttgtttcggttgagttatatgggccatttccaaagtcgtcggtggtgctggccacttccacagggaaagaccattgacaatactaaattgttttcattaaattttagaaaaaagataaataaattattcacaaacattaatttaattattagagaccgcattttgaggcaaatgcctttttttatgcgcactagtttcgatatattaagcataaataacgcattctccacttggtttgaggcttctacgttgacttttattatgcctttttttgcctttttcgggattttcgtgccttaaatgccttttttggcattttgccgttttggtgcctttttggctttttttccgatttggtgtttttttgccgttttctttcgaaaaagtccataaaaaatacaataaaatcgggaaaattcacccctaagaattgaaaaattttcagaaaatagacccataagaatttaaaattttctcaaaaattgttcgccaaaatttcatcttttttctttaaaaatttttggttttcaaatttgttcttttcgaaaaacattataaaaatctttaaaaatgaccaaaattaagttatttggttagctttacgtgttttgctcactaaaaaccttagaaaatttttttaaatgcctttttcgggattttcgtgccttttcatgcctttttttcaattttttggtgcctattatagtacctttttcgcgatttttggtgcctttttttgcggtctctattaattatgcaaaatataatttggcaaataaaattaatttacatgtccccgacattccagtgcaattcggaatgcctttcgaattcctatcggtgaaagcgcaccatgcgcttcgtcgcggatgtcaacagaagaaagatggcactttatttcaaattggccattattcaaagtgttggggtaacgctttttggtgtcagttcgttgttggaaaaatgttgaaaattggtcaattttaaagcaaatttttgtatcagggttaaatgcttccatttctacaaaaacacactaaattaatgcattagaaataagaaagactataggaaatagtgataaggtagattaaccgaatagcagttttcttatttatcattttattagagataattattatttattttgatttgttatccatttcaaatgaaatgtaaaatcaaggaaataataataaaacaagaaaaaattaacatgaaagttcaaaaaaatcttataaaatacaaaaataagaaaagaaaatggtggagcatacggtaaattaatcctaattgtttttgcattttgagcctatttagagtaatattatttatttaaataattaaaattgtttaaaatggaattaaaaaattaaaaaaacacataaaaatgggaaataataaccatgaaaaataaataaaaatctgatgaaaatgcaaggaaagatgaaggatacggtaggtcgatcgattattcattttctttttaacattttattaccgttaatttattattttggattattaattatcggattaaaaagtccaaaaaaatcatataaaaataaaaaacatgaaaattcaatgactaaaatgcaaaaaaaggaaggaaatattaaataaaggaaaaaatgtaagatatggtcgattaaagattagacattaaaaccactaagaatctttaggatatggtggacgagaaatatgaaatcgaataaaagttatattttaaaaaaagaaattaatacccatacaaaaaaataaaaaatactataattaagagaaatggtggggagtttacggtaggacagtttatttgaaatggacaaactaataataaattaaaaataaagaggaaaataaaggttgcaggaggatacggtagatcatttgacttaaatgggttgaataaaagttattaattataaaaaataatattcgcaaataaaaacaaaaaataaaattaggaagaggaaacagagtccttctgtatcgatactgtaatgcgtttaaatgatgaatcaaactcggtatttttcggtttgtggcagaacatttatgttttaaaatgtcaacgaaaaacccactgatattcaaaacagcgcttcagttattttcgcaaataaaaatgaaaataaaatttatgagaggaaaataaaggaaagaggaggataaggtagatcatttaatttaaattgttaatgctctgataaatctaaaaattatgtaacttgtttcgaagtacaagtgctgctaaacttatcgttagagaaaaacatatttgaatttgtgacgtgatatttgctctcttatgtgcccatactaagtgaaatttgggtgaagccgtaaatgtcgggccgcaaatgtccgaaaatggcccttaagaatgagccgcaaatgtacgggacgacaaatgtctattattaaaaaaatggtgaaagatattgtagatcgaccgatttgtcattgtctaatttattattttatttcaatttattttgattattaatccatttaaaattaaatgaaaaaatcaaaaaatattcattaaaaaaataactaagaaaattcaatgatgaaaatgcaaaaaaatagggaaatattaaatanaggagatgatgaatttttacnatgcttctttttttagaaaaatgtataaaaa

SEQ ID NO: 11823 - DNA, 1059 bp, Heterodera glycines
  unsure (1)..(1059): unsure at all n locations
ttttggaaaattctttaacaaaaatgcaataaaaccaacttttacacccctaagaatcgacctaaaaattttttcaaaaaatacacccctaagaatcgacaaaaaaaatttcaaaaagcactcctaagaaatgaaaaaaaatttctcaaaaaggtattttcgtggcaagaattttaattttaaaaattatttttttatgtacctattttgtttttttgcccttaaaaatcccagccctactcatttgcaatgcaatcagtgaataaaaattatttttgcttaatttttggctgaaaattatgtcactattcgtcactatttcggactttttgacactattttgtcactattttggcatttttactcactattttagttaactatttcgggatttttcgtcactaaaagttgctaccctataaatcaccatctgtcgacgccacagaaaaatattgaaagaaattccttcttcagacaattcatgtggtgaaacgaacgctgcccatatgcgaatagacagaccaatgaataaacaagatggaatttgtgcatttttcatttaaatttgaattgcaaaaaaaacagagagtggaaggaatcatattattttttcgcatcttgtttatttgcgattcttatcttctgaccattaaccgattacctaattgttatttcaagaccaaattctacctgaagcatttatgctaaaatgtatttgaaatattatttggacgagcaaggcaaccgcgtatacacacttaaggcaagtcgtgaatcccttaatattttgtataaatctgttgggtttggtaatttgtcttggtgaactccaaaattcgttgaaagtttagaaacaggacccagtcggacacaacactttctccgctcatccagcccgtttttcacccgaagacaaatattccaagtaccgtttaatcgtcaaaaagcgcttcggtcttttgccaactcaacagccgccgcagaaatattaatttcgcaccgattgngttcaccgtttgttaggtaaacaccgtttgtccttaatggatattcatcttt

SEQ ID NO: 11824 - DNA, 3900 bp, Heterodera glycines
tatattttgttttcaggcgttgaggttcaggttcattttgaatgggattttctttctgatcggttggtccgttctcggttggaaggtcttctcttccctgattatagtaagttcttttatccattataatgtgtcatttattctttccctgttaaagttggacgaagagaccggtgaagagaaagtgtcaattgtttatcatctccaggagaggcaagccaaacaaatgaactcgatgaacatcatcgaatatatgacggggagggagttgactccgcgcagacccccagttgaaataaccaaaacggaattccctgccgatgagttcaattgatccacatcgcaattttttgttgctcgcgtcctcaaacaaaaaagccgtagctgggaaaaagctactcacaatacgaagatttagtaatttttagacaaatgatctttcttacaattagttattctgtaactaccctgcccaagatacattcatattcttttcctcagttacggctttgccctgtctagaccaaactatccgcctcagcccgcccaacccatttgttgttgtgtttcatccgttgtttcaataaattggaaaacattatttttgcatttattaatagtaagattcgttatgaaaataaggttcagtgtgcttttttcgattcaacatcatttgattcagtgccagtccacgagtctctaaagcctctgaaaaggaaataaattttttagtcaaaaagtattgtaacgcacagtaagtccctgtccaaaaaggggtcctttgcatatttgcgaaacaaattcagaaattgtaatgctgccgaatgtaagtcccaagtcacttcaatgccgggcactttgtatgagttggacatacagtttctcagtttagaaacagcgatgagcacttgtttgatgtcgtcggatggctctctgattcttagaaagtcgacgtaggaaaagtcgcgatatcttaagaaaatttaaagcaaaggttgtattgatagacaaaaaagaaaaatagtcgaacttattcataaaatagagtaaataatcggccacgaaattgggccgtgtggtcgtatccaacaccaaattgcaaatggccaatttcatcgccgcgtcaatgttgttagccccgaaaaatgtttggggatgtttaaatggtataatgtcataattaccatgggttaagcactcctggggtgtccatcagataggtgggcggacgatcgctgggaaagccaaattaaaggttaatccctattgtttttcttgctcacagaattcgaacacggttttgcacccgaatggtcacgccgggcctcgcgccctctttcacagcttttccaaagtccaaattcacattgcgtaatgcgtttatcaacgaggatttgcctgtctaaaaacaaaatataattcaatctttttgaaggttttgccaaacaagttggacaatttttctaaacaattataaaaaagttacgaatttaaaattatataaaaatcaatcttataaaaaaaaaatttggaaaatttttctctagctatctaagacagaaaagttttgtagagcaaagtaaattgtgacattttttgttcggacggggtgaaggacaactcaaagcccccccccccgtttcacttacattcggaataccaacaaccatcactgggtattccgtcttcactgtttctgttgaagcgatgttcatttcgcaacaaatccaacattttgtccatcaaattttgaactgcgttttgtttgtcaaattcttgcaatttgtccagcaaatattggtaatgttctgctcattccggtagtactcttcgatgggttcccttaaatgcgaaaaacgtcgaataatcaccggtaaacaaagcctcgaaaaagacaatactggcctttacaaattttaattttctcgatcatgttgttatactaaactaaaaccaattttggtgcctcacttgtagcgtttcatgttgattaaatccatcttgttaaagacgagaatgtgcggtcgcactgaatataatttggcaccgaacgaaggattccttccggtcagggcaacccgggctgaaattccgtattaaaattatattttgttacactaaatttaatttcttctgaccgtcatgcacttcaatgaccaaatcgacggttcgaagttttccctccattactttcagttgaacgcccatgtgttttgggaacatgaaaaagaaaggtcaccagcaaatacaaaaagaataaatagctaattgactcaccagtcttgcttttcatatgtggaagagagagtaaatttctgacgagaaacaaagtgggggaagcgaattgaagatgccaacggtggtgaagaaccttccaatcggggagcactgccatcagagggtgaggagaaacacgcggaaaaattgagcaaatttggtcgaattcttggagaacgaagcaaactgttcctagggaaagtcattggcacttattaacaaattttacaaaattaatagccttataaaaaataaaataaaataggtattcatgcaagaaaacaagaaaattattgacaattaaacatttacaaagtaattttatcaaaaaataaatctgagatcaaaccaaaacatctttttgaacacttgaatttcattatcaaaatggctgccactcagactcgtcagcgggcttcaaatgaccaaaaagcagcaagaaaatatcaactaaccaccaaacacctgcaaaaacaaacttttgaaggaaaaattatacaatattaagcattttgggagaaaaattgaaagatcaaaacaaaggaagttccggaaaatattttcgttttgaaatgacattgctgataaatgataacttacccaatcctcccaatgtcatcaatttgcccaccgcaatcgccgaataacccaaatagaagcgatcaaccgcaaaaggtccaaggaaaatggaataaagaagtgccgagagaaagtaatgaccagtatacctagaaatggatggataattgaaagagttccccatttttttggcaatcatggagtttactggtcccgtttttttttctttaaaaatcatggaaaaatttttctagggctattttactgagctgagcacgaatccgaccttatttttgaccgattctgaaccccgaacccggattctaacatttttcaaaaaaaatttttaaagagattttcttacatctatgtgtgggttgagcataagcaacaaactgatatgaattaatataagaaaaacctatgcatacgcgacccccccccccaggaataagaagttaggatcaacaatgtggtatcgagccgtaaaattgctcatggagtggaactcggcttattttaaacaaacttttctactgattgaaaccatcccggagcagcagatgttcgctttgaaaatgagcacaaaatttattaacaattaataaataattaggggaaaaacaacaaaatgatgattaattgttggtcaaaattggaatcattttttaaattaaaaatttgttgaaattgcttataatgaccccattgatccattgattcggctttcaactcaatcaaagtcatcctcttcaaaaaaaaaagttaaagcaaaccgacaaaaaattaatcggcttcttcccatcaaaaggaccgaaagtgcaaacagaagcaaaaagacagtcagtgcacggaaagcgaggagcgactgatcagcagaccccgggggacactttgaaggaatgggaggagaaagcaaatgcaaaagcgtaactgctcaaagttggaccccccggtggtttggcattggcacacaacggaaaatgccatccgaacaaaatgcccgaattttgattttcataatatatagaaattttttgaaaa

SEQ ID NO: 11825 - DNA, 2791 bp, Heterodera glycines
  unsure (1)..(2791): unsure at all n locations
gaagcgatgcttggcgtcggtggtgaaaggatgattggttggacgttttctcctcctcccgctgctgttgctgcggttggcaattgttggctgagtttgagctgctgcatttggccatcgtcttcccattttgcgagggaggaggaattgagtcgatccgtttccacaatgttcagcacttcgatctcattcctctctccgtaggcatcgtcgtcaatgtacatcctcagtccgccactgcccccacaattgccgttacggcagagtctgaacggcaaaatgggggtcaattagtaaaggaaataggggcatccttaaaaaattgaaaaatcaattagtgaaaaaagtgcttacgacaatgggaccactccgtacacataggctaacatgaccggcacaccaacacctgaaaaatgcagaagaaatattcatccaaccaatcaaaaacttggattggtggtccaattgatgaactaattaatggcactcaccaacggacagaacggcgagcaccggcgaaacaatgagcgaaccgaacacggccaacgcagtgacaaaacgccgccgcattttggacagattttcaaagcgttggtagactttcctgcgggtggaaaaaaagcaattgcagttttgtagataaaaaatgggaaaccttccgacaaaaatgggcactccgcaaattattcctgcaaaaaacgaaaaaatgatgggttaaccaatccaattgcataccgggcacggccaatccggcgatcaatgcgatgcccaacggtgcaccgatcagtgtcccgatctgccagagcaacttctttttgcgagtccatggctttttgccccaaaatgtgcaaccggttggactgaaaagaagcattttaaattgttggaatggaggaatgaaacgacctgagataatgcaattcgttgatctgtttcagacaaagccaacaaaactcggcatggcacagaacgcattgcatgtgattgcaggagccgtcattcatctgaggttttcatgattagcaaattcacggacaggcagagggggtaataacacaatgaaaggacggactatcattggtttaaaagttttattctcttttgggaatggagacccaatttccgatttggtgtaaaaacagatttgtcaattttcaatgttaagcaaacttttaagctgaatttttaaacatatttgaatgcattggtcattttcgcctagatttctaaaatgatcatcaaccaaccttcatgatttggacaccgcaccgcggacacgctttggtcacgtcgcctgcacctgatccggacaaaaagaaacattaaaaatgaatattaattcaaaagtcggctctttgctattttccccatttcactcactgcttgcgctgtccgtcataagtgccgtcgcttgggcagcaaagccacgcagtccgccggtcagtttggctcgggcctggtcacacgtttgcttgggatgccaattgtttttgcaatggctaaagagattggggtagaaaacaactaaacgcctaacggcaccgctagatcccaattttcttatatatttgtcaaaaatttgtctcaaaatttctttctgattacgggcccgttgacaacaattttaatgtccagaaacatgtaatattccaaagatgggaaatatccgcatattaaatgtttgtaaagtcactcactagcagaacattgtgtcacaccgttcgcatttaagctggggacaggcggcgcacgaataagcgatcacggcataactaaacaaacaaaatgagcacattaaaaccaaaaagcacttttacattatttaatttattttttacactattttatttcatttcgcggtgtcagtgtatacgaatcaatttattttaattgaaaattcaaataaaatacgctacgtgcagtcgggcgccggacaccaacgcgcgtccgggtcagtgctgagcgcacggcgcaatgagaacatttcatagcggtccaacagctcaggctggtggtcaagcagtgcataaatgtcactggcgtggagaagagcggaacaatttggacaacttcaacaaaaaagggtaaattgaaaagttattatttaaaaattcaagagacaacgtacgaaatgttagtccgactctccatgatttcgaggttcaaatactgaaaacgaaacaatgattaagaaaaagatggatattaaatagctcgattttcctgatgtcttcgattttgctttgagaaaatgaaacaataaatatttttgatttttccccaatatttaaacacctcacacaatttttgcccctcttaaattgctgacaaaaaggcaccttgacgagacaggctttgcacgtcaaatgcgagcaggtttggagcttgtggaaattggtggggtgctgtcgaatgtaacaaacggggcattcccgggccttcatctgtttgcccaccctcaaattgcactgggactcggaatgggnntgnccgccctgnnnncngcgncnntnncctttnccttctcngnntgggtngcgnttttcttngcnnttctctntcgttttntnnggnggccttnggccgtcgnnncctcnnnntcttntncntnctcgncccnnctntgtctttttngnccnnccctnntncnnnnntgccgntntttctnnnnggcntcgcntnnnccgtgnnnnttgngtnntgncntgncncgcgnnnntncccnccgnngncgnngtgctgctgccccctatggtgatggacagacggtcagccaccatcacattgccaa

SEQ ID NO: 11826 - DNA, 1250 bp, Heterodera glycines
caggctttgcacgtcaaatgcgagcaggtttggagcttgtggaaattggtggggtgctgtcgaatgtaacagacggggcattcccgggccttcatctgtttgcccacactcaaattgcactgggactcggaatgggaatgaccgccctgaaaacagcgacaataacatttacattctcagaatgggtagcgattttcttagcaattctctatcgttttataaggaggcattaggcagtcgaaacctcaaaatcttatacatactcgaccaaactatgtctttttagacaaaaccctaatacaaaaatgccgatatttctaaaaggcatcgcataaacagtgaaaattgagtaatgacataagacacccaaaaataccaaccgaagacgaagtgctgctggccccacttttgatggacagacggtcagccaccatcacattgccaacgcagccattggccttgccaattgacgccatgccgccaccaccacaacaacccgtgccactactgctgctatcgcctttctcgatatttaccgcgcaatacgacgtggtgccatggtcacggtcggcaccaccaccaccgcccccatctgtgccatcggtgtgcgcatggcgcaactcatccgccgctttgccgcaaaggcttttcgtcagccgatggccactggcggagcatccgccgccgtccttttcagtcccactgtccgtcagcggcaccattttctgcttgtccgactccatttggctgtgctccgcggatgttgacgatggcgtatgcgaatggtgcggctgtttttgttgttgaacagacgaagcactcacactcaaactgcgccgccaacttttgctgaaaatgtttggaaataaatttttaaatctaaaaatacagtcgaaagaataattatgaagttgggaccggcacttggcaaaggaatttgatcattcaaaaaggccaaccattagcatatccaatctattctcgtcaaattttttaaatttaaaacctaacttaattaattttcaaatgatagtcattttatttacaaatgtcgtattttctacaagttgtctcttttcgaggttctgttggttggccccctgacggtcaatggtattaatcgtaaaccgttgcccatcaaaaacccatccaatttcccaaattaaacacaaaacgaacccgccgccgccgccgtctgtccgcgtcgccggcgctgtgatgttgttcaggaaagtgatcacactgagccg

SEQ ID NO: 11827 - DNA, 948 bp, Heterodera glycines
cccccccccccctccttccctctccacaccaatcatttcgcatcaaaatttgatcaatcaattcatttccccatttctccctcaccattttgagcattgtcgtcgacggttgtgcatgttgcgcttgggcactgtccgttcgatttggctgttgctgttcagcagatgatgatgatgtcccttcaccgtccggaatgccatcagcagcagaaacggaagtgatggttgtggtgttgttggggttgtcttgaagcagtgcctggccttcgtccgcactttccattacaatgtccaaatttttcaagcattttgagccaccagcgccaacactgctgttgctggaggaaatcatagctaaggcctaaggaaacgggaaatatgggaattgaaatggaaaaattatgaaaattttatgtaatgaaaaagaatgcttcatatatttgccaaccaaacatggaaagagttgggaaacaaatacgaataaacaaaaatggcatagcgaatatccaaatgtggggctgttggttatccgataccaaatgaatgaacagcaaaaaattacaataaatgaatgggcttgtgctgctgcaattgatataaataatgaaagtgttaatgacgatgatgctgatgatgacgaagtgtggtgggtggaattgataaatggaataaatgaacgaaagcccattcattgaggtgggaggaaaacaaatcgacgaatcgatgaaataaatgaacgaaggaaagaaagggagaaagagagagaaagaaagagagaaaatagaaacggaagcacagagagaaagaaagagaagaaggcacagacagcgcacagcccccgggggaagaaagggagaaaagcgagtggcaaacgaaacacatcaaaagggtgggcgagggaggaaagacctcgaggagaaaccgcgccgcgctcaaacagcaaaagaa

SEQ ID NO: 11828 - DNA, 2819 bp, Heterodera glycines
ttttatgcatagcgtaaatgtgaatattttatgaatagagcaaatgaatgcactttttaggcatatgtatgcctctcatatatgaatatttatgaatatagcaagcaatatattgaaggtcggatttgttgaatctgctttttacgatttagcatatatacatgtagcatcatcaaaccagtgatatttagttgagtcatcaggtttttggcttaaggctgacttcgtttaattgtacggttattttgcttttcccctgggggcattccccttggctttatcccagggctgccaaatgtgatgatgatttttccttttgaaatgaagattttgcaaaatcgtaaattgacataaaatggtcaattttcagtgaaaattaaaaaaattggctcaaattcgaacattttgtctttttttggcgccgcaaaagaaaaaaacatttttttttgatttgaaataaattttttcaaaattacgatctttgaccccaaatgctgattttttgatgacaaaatgatggttttgaattttttcatctggcagccatgctttatcccatccaatataaacaatgttcacaatacatattatgttcattcaccgtcaaaaatgcttcccatcgcttgaatgcaacgcattgtgacgacgaaacaaacgaagcggacacaattggctaattagtgtgcaattagcacagcaattacataattaattgttcaatgttcacttcactaaacagtgctttcattttttattgttgttggttcctgtcattttgatccatctttgatcattgttttttgaaaaaaagaattggatagaatttaatttaattagatcataaataggctaatacatctataaagaatagggggactcccagtgattggaatgtcaatgaattgagtccaaatgattgaaaattgcagaagatctaattttattttatagattgagagaaaagacgagaaaactgctaagaaataatgtaccataagaaaatgccaatagaagagtgcgaggccgcgaagcagccgagtcacagtaggttttatcattcataattttattaaaaaaatcgcactgcctagcttgggatgcgccgaaggcgctaaatgaggacaaatcttcaatttcggagcttatatgtttctactttaaagaattttttgcattaactaatagaataaaataactaacgtgacggaagcggtcgcgacagtgcttcaacttccacattagtgtgccgtggccggcttcgtgccccgagactcgcgctcggccttgttcttcttgccctgtttgtagaacggccgctttaaattctcttctttttaccagaaattctttgcaactttttaattgctaaaattacttccgagcaattggatagtattagaggtcaatttggtcggattttttcgcgttttctattagaatatttatccaaaaaaccggtcgaagaatttttcgattttttggtgtttttcgactttcttaccagacataaaataaattcacattagactagtaattttttttattgcaaatgaccatatttccacatttcaaacaatttatatatgtacatattaccattttttgataatgcttgtttttcaaattttttcttttttcacaaattttctttattatttcgtcttaatacacatccaaaaaatgccaaagaattcgttgagattgtccccaacttataagcgatggcatttccaaccattgggaccaagccgggtcaaatgccgaaaccagcacagtttttaattattttttgatgcagaaattcggtgaaaattctggggcaacgaaactcaagaataattttttttcaaaaatatctgcaacaaaatactatgcaatttagaattcgttcagcaagaaccagccaaggaatcagaatcgatttgacttatttagaattcgttcagcaagaaccagccaaggaatcagaatcgatttgacttaaatttattatttacaaaaccgtgacaataattttttttcagaaatatctgcaaaaaaatatcatgcaatttagaattcgttcagcaatgagaaccagccaaggaatcagaatcgatttcactgaaatttattatttataaaaccgtggcaataattttttttcaaaaatatctgcaacaaaatattatgcaatttagaattcgttcagcaatgagaaccagccaaggaatcagaatagatttgacttaaatttattatttataaaaccgtggcaataattttttttcagaaatatctgcaacaaatactatgcaatttagaattcgttcagcaatgagaaccagccaaggaatcagaatcgatttgactgaaatttattatttataaaaccgtgacaataattttttttcagaaatatctgcaaaaaaataccatgcaatttagaattcgttcagcaatgagaaccagccaaggaatcagaatcgatttcactgaaatttattatttataaaaccgtggcaataattttttttcaaaaatatctgcaacaaaatactatgcaatttagaatccgttcagcaatgagaaccagccaaggaatcagaatagatttgacttaaatttattatttataaaaccgtgacaataattttttttcagaaatatctgcaaaaaaataccatgcaatttagaattcgttcagcaatgagaaccagccaaggaatcagaatcgatttgactgaaatttattatttataaaaccgtgacaataattttttttcagaaatatctgcaaaaaaataccatgcaatttagaattcgttcagcaatgagaa

SEQ ID NO: 11829 - DNA, 1855 bp, Heterodera glycines
gctcattaagcatcattaacattcattaattatgtaattgctggcaaccgcccgccgaacggagcagcacattaaagccaatcattcattcatcattcgactaatttattatgatgaacataaaagggcgcaacagaatgccaattcattaaaatttttgacaaaaaattaatttttggattttcgtgaaagtcaaatttggatttcattttttaaataaattcagaaaattgtgttattttttatttttaaattttttgctatgcaaaagagcatcttcccaccaaaatttccaattgaaaacccgtttttcaacaagtttttgcatttgaaaatgttgtttttccaccatcccctccccccccccaaatgagtgccaatttgtaagacgaccccgcccatgaaaagagaaggtgcgatcggtggtcatttttaattggcgctggagcaaagcactcctcactcactgcccaacaaaagttcattcgccaagtgccgaaaacttccattgggggtggttcaaattcaaatgaaaccccaaaattttcaaaaaattcgatttttttttaatcgctatccttcaaatttcaattttttccaaaaaaatgccaaagttgaatttataaaaaaggaaaattgatattccgctgctagaaaattcgatagtttttcgacaaaagttggaaataatttttgaatataaacccgagagtctcgaacacatttctaacaaattttaaacaatctatgatttatttagccaaaatttattaaaaatgaaaattgtgggagaagcattaattttttcacattggaagtgccatttttgggcaatggcactattatgcctttcattgcttggccaactgtgttccgaaacagaagctgctgatgacagtgccaaaagtgagttttttaaaaaaatttcgcgcttttccatgtccaaaaatttcaaaaaaaattcctaaatttctcctagccccaaaattatttttttgtgacaattttatggtttttctgagcttaaaagtccattctctaacaatagaccctttctcccatgggtggccattccgtcacaaattagcagctaaatgatgctaatttgattagcgtattatgtgcattattttatttatcggcgatcgaacggtccattgatcacacgcattaattaatgatcgcaaattaataaaaatagaaaagaaaaaataatagaaattgtgcaaataatagaaaatattttataattgtgaaaatatataaaatcttattaaaaaattaattaatattttccatttaatttttaaatttcatccaaaaatgtaatttttaaatattttcaatattattttattttttacatatattatacctacataattaaaatcaaaacaatttttcaaatttgttagtgccatttgcgcaatcagttcggcgccattttcacccaattggtagtggacgtccgacaattattcaacatggccacaacaattttcgtgatgaaacggtggaataaaaataattaatttataaaaaatttaaaaattttggaatttttaaaatatttaacaagaaaaaaatagaatgttgttgccgcttctccgattcaagctcctcatcagcagcagcagagttttgcggtagccgcgcctcaggcaaaaaaaaaataatagaaattttaaattgaaaaatgtagaaagatttaaactgagaaataaacgatattttggcataaataaggggtgggggcaaaatccggaaattcgaaatttaaaaaatttatgacccctcattcgtaggcttctcctcatgtggcgttcgattatggggcgacaaagcttgctgcagc

SEQ ID NO: 11830 - DNA, 3266 bp, Heterodera glycines
  unsure (1)..(3266): unsure at all n locations
ttccccaattttgagatttttaggtagccgtagtgtcgtaatcaaggaggctgtagccatgcggaacattaattttgtttagtttaggtattagctttcgccctcagcccctcacaccaacaacaggaccgtctctggtcctaattttgcaggagtattgacggaaaagataaaaagaaggtcatggaagagtgaaaagaaagaggatgggagaaaaagtaaatgcgtgtgaaaaggtaagagagaaaaatactaagtgcaattagaacgtggaagaataaattcattgccaagaaaattaagagaaactgagaaatggtagacaggaaagaagagcgtgaaaacggagaagaaaggccctgtctccaattatcccccccccctttctgaggaggttgaaaaaatcccccgtctctatttatcctcccgggggttaaatggaatttatattaaaagaaacaagggacctatttcctgtttttgtttgtagttttgggcccataacttttttacaaaagccgaatcaaaaagtgtccgatgttcggattttaattgaagtgttatctaaaattcaaaaaaattccgggcctctacctataataggaagggctgcagaaattggcaacttttcagtaccaactttgtccaattcagtccccgtcgaataacttatcaggctttgatctgagtggagggtggccagcggacttattagaactcaatgagctcgattttttcagatttaaaaatttcgaaaattttcaaaatttttcgagttaggctccctaggaggttttagggtttttgaattttaggattttttaacgaattttcaaggaaaacggataccacttccaaacatagttttttgagttctatcgactggtattttttcggaaaaaatttcgattttttcccggaaatagaaaaatttttggcataagcgggacatttgagtcccgggtccataactcgtcaggggttgtttttagccaaaaagtgtcttagagcaaaattgtagagctttttaagctccatcgaatggtgtgtcatatgctgtgaaattttcaaaaattttcgagctaggcccactagtatccgtcattaacagggctgcaaaaaatatgcaaatgcatattttttcctggcttctccatgctctaaatagcaggaaaacactttcttttttgtgtttgcttataaaagtctggacttttatttgcatatttttgcatatttcgaggtttttgtgcatatttgcatattttggctttttctgcatatttcgtgcatattttgccattttctggaaaatttgttaacaaaaatgcaataaaaacggaaaatacacccctaagaatcggccctaaaaattcagaaaaatacacccctaaaaatcgaccgaaaatttttaaaaaacacaccactaagaattggaaaattttctcaaaaattcttcccccaaattttttttttcttgacaaaatttttgatttaaaaatgtcaatatttgctaagagaattttataaaagaactgtagctcattgtcaagtgtactaatgaaaaaaaatttttaaattaatttgcacccctaattttcaagtttttttgtgcatattttgcgatttttgtgcatacatatttgatgcatatttcacgagtttatttgcatatttatgcgcatattttgtccatttttcgtgcatattttttgcagccctgttaataaataatacaaaaacaaaaaatgaatttaaataaaagaaaaaaacttaattctttaaatctgtaattagatgaaatttatttatttatttatttatttatttattcgtgaataaaaagtcatcagaagggcaaaaaaccacttactctgacgactgttcagatagtatgtcgtagagtaagtgatataatatatatggatgatcaaaaaataaaatcaaaatatatgaataaaatgaggtcaaagtcaattgagatcgataacacaaatgtaaaatcacttaaaaaattaattctgtttttgcttttccggttattaccctaatgaatttttaagttttgttttaaattgatttaaagaatttgtttttattagttctttatcaagttgattccataattttgttaccctcccggcaaagggaatgaattttttgcctattttatattttgtgttaaatctgtaaaaggggatgttaaagcgtgtcgatggattaaaaattgaaaatagtttcagatctgttcggccataaacaattttatgcgccatgaacagatcaaatagctttcgcctattctcaagtgtcggcagttgcaggtattttaatcgattttggtatggaattggcggaaggctgcatttaaaaaatacccgtttggtgaaatatttttgacacttttctatttttttaatatttttttgaagagacggattccaaacctccggagcgtattccaataaaggcctaatataagttttatataacgtaatccaaatcttagatgatttggatttaattattcgaaacaaggaacgcatacgtaaatacgcattccttgttattttgtttacatgatcggaaaattgtaatttattatcaatgtttactcctaaatccctaattgtatccacagcatttattgtatttccatcaaatttatatgtttcttttgggttttttgaacccaaatataatacaaaagttttttgaactgaaacttttatttgccatttatttgcccattctgataaattatgcaatgctttatgcataatttctgtatctgctcttgctttatagcatatatacaatttaacatcatcagcatataattttattttcactcctgatggcaaagcatcaggaagatcgttaatataaatcaaaaatagtaaagggcccaggacagagccctgggggacaccagagccaacttttttatttgaggataaagcatccccaattttaacacgaaaagtcctattactcaaaaagctttttatccacattaaaagtttgccccgtataccaattttttccaatttgtataaaagtaagttatggggcactgagtcaaaagctttctgaaaatcaatataaatacagtccgcattttttccattaataattgcatcataccaatcttccacaactgttattagttgacttgtcgtagacctatttctaacaaaaccaaattggtattccganaattttaagagttttaggagaaagttgtaaatattttggctaagaat

SEQ ID NO: 11831 - DNA, 893 bp, Heterodera glycines
ggggaaaaacatccaatgcatttcaaaaaaaaacaatttcataatgatcgatcatttctcaaatctcccaagcattgctgggcccggggtttcgatgacatttcttcgttgctttgtcccaccgctggtgcagtcaatggcctaaatcatgttcaatttgattcggtgaaaattaacaatgttaagtgccaatcgctcgttgctcacccaagaaaattggcaccatttatttggcccatcatttgcaatctctggggtcacacaatgcgagaatattgcactcaggttcagatcgaagagaattgttggcgaaatttcacgacataaattgtccagaggtgatcaccaccatcttcgatgtacaaaaggcggactttggtcgtcgtaaaaataggcaaaatttcacgggcaaaaacgcgccaaatcgggattatggtgcccttggacgaattaagatgaatgtgcaaattgacccctttgtccaagagacgtttgttggaacggagaaaagcaatgacggagtaattgatgtaactgaaaaaatgatgctttacgcgttgaaatgaatttaaaaaatcggatttacttaatccgaaggtctttaaagcaaattttgtcgggcagcggacggtccgaagacggaaattcaacgtgacggcaattgatggacagttttgcctttggtccttccttgtaaatgctaatgtctcgccaaattgtcaattccgttttgccatcgaaatgcgtgtccaccagcgaatcgtaacgagaacaaagcagcgcaatattgagaccgagttgaggaagacggaaaaacgggagaatgttgatccaaacatcgttacaaatccagctgaaatgcgtaaaaactgattgaatgactgccaatgcaa

SEQ ID NO: 11832 - DNA, 1239 bp, Heterodera glycines
cgctctgctcgtactccagcacgcggaataccctcgtgacgatgtagccctcgtccagcgccgcgttgagctcaatcgaagtgcatgtgctgacccaacctcgttgtctgtcattgtgcgcgcagtggtagtcgggattcacgccaccagtcggatgctctttggcacaagtgatgcagagcggaaaacaaagccgctctccaactttaacaggcagaacgggcacgtcgacgcgacgggggggggcacaacccacactttgagtcacgccaagggatagcgattgtctgctgcgctgcgccactcaacttgccggctcagcacatgcacttttggatgaccaatggggtagcgagtgacgaaactaaagttcaaaatttttgaaaaaactaccatcaccacacatacttaatatacgggtacaaggacgtgaagtcgtagtaggagatcttctctcctggtcccgctttgcgcagcagcttcagcggtcccgtccgccctcccatgaacgcgtcccggatcaccagcggaccatcatccacatagtccgaaaacgacttgcgcatttctctgctctgctccagcatccgatggatttcgcactcccagtagacgtccactcggttcacttgccgcagcaggaagtccaggcgtttggcgtcccgctcgcgcacctccccctctgtcttcccactggggagcagcatgttgtcgttgggatagcaccttttgcacccgtgccaagtgcagcctaaaattatacgcataaaatttttttttaaatatataaattaggcaccgttgacttcaatggcgcacccctccgcctcaatccatccatccagcgaatacgctccgattctcttctctcctccggctgagtgggcagtttgcacttccactccgtgctgctccgcgtaccagtggaagaagcgtaaggcgagcaggctttggttctgcgcgttgtcatagccgcgctcagggacaatggccagatgcgcgtcgggcatttggtttgtgcggaagtgacgcatgcatgcgcccgcgatggtcatgcattctcgcagaacatcgattccgtcgtggttctccttgtcgtcaatcccatcaacgtattcttggcgccgcgaaatgtcgaagaattcccggcgaaacgcgacgagagcgggcatcaagatttccacatcattggtgcaatagctgagagaggcaaaatgagaagactttggcaacattttt

SEQ ID NO: 11833 - DNA, 2983 bp, Heterodera glycines
  unsure (1)..(2983): unsure at all n locations
tggtgcaatagctgagagagccaaaatgagaggacttggcaacatttttttttgaaacgccaccttgctaatgcctcatccagctgnaagtggtggtgacggttctcggcgtaccacgcatcgaattgccgccttttgctgggcatcataccgctggccaggtagtcgtcgggcgtcggatggatttccctgccgtagttttccggtcgattggccatgtgggggaagaacggcttgtcctcaacctccagcccatatgaagggacgagcgcggccagtgagcaaggcattaggttgaaggagtcccggaagacgacgttggggttgcgcttcttctgcttacgcactttcatctcatacattttgttgccctaaagatttgaaattatatcaccataaaaaatgttttgcttttactcgtctcagcatctctgggttaaagccaattctgaagagctcgcgaaaaacgagcaccatgtcgaaccgtccgccaaagtgtgagtaggcgtatgtgtcgtagctcatcggcagttcgaagacgagccaatgcacaaatgccaccaatggattgtcggccaccaccacctgatggttcacgtgcgtgtccacaaagcggcgttgacaaaaggcaacagttcgatgcggcccacaaattcgacagcctgctgttgttctgctgcgccaggttgggttggatgaagcacccccgctcgggattgtgaaaagtgttgcacaattgacagaaggattcaaagcacttatggccctaaaaacgttaagaaattgcgttttcaaccatttttttgacctttcgcccatttcgattgttgtctcgcacattccaaattaccccgcattctttgcactgcttcgatttggcacaaaaatgtgatgccaaatggtgttggtggcatcacacacggcacacaaatctccgcatcatatgcattcagtcctgcccgtacacgaatttgctgcatcagttgtaaagcatcccgctgcagacatccctgctgtcccctccgactgtgcaaatagtcgtagaatttccaacgaggccaaccacgcgttttggccaccatcgttgcctgctacgcgtagaacaggcaatgcccgtccgggttgcaaatcttaaaacaaattgtcatcgaatagtcttgatttgatggcgcgacacgaccttaatcaaacaattttccgtcactcggtgatgcacgggtgctaggcttcgtcgagcaccgcccttcagggttctccgagcgggaagattggagcgatcgactgtcgtcactacaacagtgaagggctcgcccccaaagcgtgacgttttgctgctgtttgctctgcgccactttggtgaactgattcagtattgtgtcaacggtgttatcggtaatctgtcgaaccgggatggggatgtccccgccggtgagcaacggactgctgatcatgcagccgagatgagtgggttcaattccacgtccacgactctcctccatcgctgcgtcaaggcagtactggaagatgccggccaggagtccctcaggatttgctgctggcacatcctcaatgctgaaccgcgacttaattttactgtactggaagcggggcacatgctcaacggtgctgtccaacttttttacgtagtcctttgcagactttgatgatgatgagctgctgccgccgccctcttgaagcacctctccaagcaattcattaatgaggaaaccgcgacgcggctttttgcttggggctgatagaatttgatcaatggaaaacagagagggatgcttgggaggctgattttgcattatctaattttatagggaaaaataatgaaaagaatgcatgaaaatgaacaatcttgacatttgccaatatttatggggcatggaaattgccgttgtgaatgcaaattaatggataataataattttaaaaatttttaaccaattatgccctgaagagcagcacactgccacccatgaaacacaagacgacagggcacctaaacggctcgggtaattagtaaaggtcacgcgtaaaaccccaagccctaaaagacacacaagtgctgccaggataaacggatcccaataattggagcaaccgccctggttaacagcaataaattaactatttaaaatattattattattaaagtgagtaaagatatgaacagatgtgaatgaaatgtgatttagactgggtatttatgaagattggagagggggggggggcggggtgtcccaatccgaatgccaattaattttctcgaactctccttcgttgtgtcggcaaattcaaatttcctttgaagtcatcttcttcactattgtcgcaaattcaaatgtactattgaataattaatgagcccatgaggaccgggcacaaaaatattttaattcactcttcattcattcattcattcaaattttatgaccaatatgatacccaagcgattaccagccgagctcctcttcgaaattatctactcacttcccataatgtatttgtttggcggggtaacacccaagccaggtggaaaaaaaaatcatatttcaaatttttcgcaaaatttaaggccgtccaccatccggtatcgcagtggtcaatcggattatcgagatatttcgggcgaagcgtcacccaaacttcacccaaattgtaataataatttaatttaattttgtttatttttaatttgtcaattaagaaacggcttgctctcaactttgacatgatcagtgcaaaaggatggatgtcagacggacagctctacctgcattttcgtttcacaacaatgagctgtgttacccggctttttcaatgagttcgcccgatatatttgcttcggcaatctgggcgcattttctgctcccgaaattttggtcgactcgcacaattcgctcgtaaaatttttgaactatttttgctttttccattttatgggaaaaaagttaaagggaaaatgttgcacttt

SEQ ID NO: 11834 - DNA, 1378 bp, Heterodera glycines
  unsure (1)..(1378): unsure at all n locations
tgacgaccatcctgttgttttctgcttaaaatacagtacttttctcgcactccctataccgtaattccttggtgttactgtgtaactcatttaaaatttttttcaaaatttccacaaatatatagggtttcaccgacccaacatacagagcgcggcgcaaatattttgccgacattgcagcaaactacagacatggcgaaaaaattccacgcgtcgagtacaccgcggaagagattggcacatggcggacaatttacaacgaggtgaggctgggaaggggggccgcatggaaaaaaaaattgaaaaattcaatagaaaaaccaaggtccaaggcccgtagtcccaggggtttgggaatttcgcttccccgtgaaacgaaaaaatcggaaattttttcattcagttttcaaaaaaattcattaaaaatttccaaaaagggctaaattttcaaatttgacaattccggcgagggggcggggattttttgggtggcgggggagggggggagggaagaatggaaaacctcaccaagaaagtttcgagaaatttatttttgtaaaaaattagaaaaccggaaaaccataaaaaaatttctattataattttaattaacttacaactttaaaaatttttttaattagaattataattaatttaaaataaaaaatttattttggaacaaaaaaggtattccttaacggtgaacttaattaaaccatttaaaaaaggcaaaaaaaaaaaagaaaaagaaaataaattaaaaaaacaaaacaaaaaataatttaagaaaataatcaatatgaaataaaactaattatttaataaaaaaaaatactttttggtcaaaatgtttcaaaatttgctaaacgttttttcatttttaactttagatttggaaaaaaaaataccaaaaaaaaagcgcagcgtttttgggaacacaaaaaaaatatatgaaaattaaagcctaaaaaatatatttaaaaaattaataaattagttaactctccattaaaatttcaaaaaagtttttataataaatataaatttttgtatcgatgtgccgttgttttccccccattcagctgatcaatttgtatcccatccacgcgtgccgtgagttcaactacattttcccgctgcttcagcagaactgcggttatgcgcctgatcggattccgcagctgcaagtgagtgccatctttttttggcattatttaatggaataattagaattaattttaggatgtttccgacttcctcaaaggtaattttgngggcagcattttttcaaaaatcccggcaccggcttgaaaatcttgcattttttatgcccacaaaaagtgtcaatttgaagattctaggcattaaaaattttttt

SEQ ID NO: 11835 - DNA, 1149 bp, Heterodera glycines
gaaaaattagtaatgaaacttagagtcaaaagaaaaaaaaattaatatattctttaaaagtaacactgcaaagtgtgaaatggcctagtggctagtccccttcactttcccttcttctttcccctggttcaatccctctacagaaattaaattcgtttgaattttctttttgtatacgcgcgggtttcctatagagaaaatatgattactcatagttttttttaaattgatacatattttatcattttttaaatgaaaatcctaccaatataaaaatttaattttgtattattttcagttgaaaaaaaattaaaatttgaatttttaaaaaaatttttgaatttttttgaatttttaaaaattcccggttggtcccggttcccggtcccggtgccgaaaaaaatcgaggtcccggtcccggtctcggcttctcaggtcccggcaagtgccggtcccggttttgctcaaaattcccggtcccgtggcactctagcaatgacaattaaagagcggaaaattgaaatggattttgtcagggattttcacatttttcccgatcgggtaattttttgaaaaaaaggatccggatcacgaagaaacaggatttgaaaatcctgaaacaggcccggggttgagagcgccccgaattccctgatccttaggcggaatttttaaatttcggcctcttctgacgactaacggccacccgtgaaattaaaattcaaattcaatcgagtcggttttcacagactgtaccggcttcacacttcgaccggtggccggccttctaagttcccgcgattttctggccgggctggcattcagggtaagaagggcacggtttctaaggaaaattctatcaaacaaaaaaagtgctcattaacgataataaatatttaaatttgatttaattataatttagctcaatcttaatcaaattaaatattttatttgtattgagcaaatagaacgtcctaaatttgttgtatcaaaaacattaatttttaacaatttctattatccaaataaaattttatgacatttcagctaattttaagcattattttttttattattctacaaacagaaattaaaataatatttaattggagaggtattacaatcaaattagataaattttattaatcc

SEQ ID NO: 11836 - DNA, 2253 bp, Heterodera glycines
aagaatttggactcgcatcgcttggcgccttcgatgaaatggtggagaaattggctacggtaaatactcgctgccccacggtgggagtgtactgtattttttagtagtaatatgagggaggcgcttttcctaaaagactaaaaaaagtttctcagagtttctcggttacttcaaaatgcttctctggacagatttctaccataacaaaatacagtagaccaaactgctaccgtaatcattgatttgccgactgtttttgtgccccttttttagctctattggttcaccgtggagttcggcatttgcattcaaaatggggcaaaaaaggcgtacggtgcgggactgttgagctcatttggcgaattggaatatgcgctcagcggacaggtgaataaaagacaatttaattttccatttttgtacggatttagtaaatcccggtttatataaatttttccactaacactgatttatctcctctctctattatctgcccccaatttgtagcccgaattggctgcgttcaacccgccggagacgtgccaaaccaaatacccgatcactagctaccaacccaaatattttgtggccgaatcgttcgcggatgccaaaaacaaactcgcgtactgtatttgtcgcgctcgcgttttgagcatttttaaccctccccgctcccgcagtacatggtcaacgagcataccaagacagttccaagtcaactacaacccatacacacaacgcatcgaaatgttggacaatgagagtgcagcaaacaagcttgtccgggatgtgaaaagtgagtcacaaccgtggtgagtcgaagtgacaaaagtgcgaatgagtggtgatcagaaggggcgggtcttttcagtacggaataaattattttaataattaaataacataattatttgataaggaattaacaatctaataataataaatatatttgtcctctatatcagtttacacgaccacaaaaattgacatgacaatataataatttgacaaatttaaggcaccgtaacttttacaagaagcatccaaattaaaccttcttggtaccatttggtagccctaagtgtcctctatttgcctataaaatttcaaaaaatttcgttgagtttctaagaagttgtggtcaaaaaggtttaccaaatcaatttgtgaagtttacaagccacaacttttttgaaacacaaccaaattttaaaagcaaatagaggacacttagcgctatcaaatgataccaagaatgcttaatttggatgcttctagaaaaagttatgacgccgatcaaaaatttataatttttatggtgatcacttattcaatcaagtataactttctattagagagcgggaaaaaaatttttccgggaacgggaaaacaaaaatgaacggtgacgggaaaaatttcttttcgaaaaaatattgatttttttctaaaattttaatttaattattttttaaagttcaaatattatattttaacaattaaaaaaatttatttctgtttaaatgattaaatattgcttttattaatgaacaaaaatttaataaaatttaattttttgaattgatttgttttaaaaataagtcggtaacaatattttcgaggtaccggcaaaaactggtaattttctgagttctaaaattctagaaaattttttatagtgcaataattttcgttaaaattgtatattattttttaaaattccaaaatattcttatagaatttttctgtgttttcaacttattgacaaaatcttttttttttgttttgattaaaacgttttttttcggcgcacctttaccaaaaattgaaaaaataagaaaatccaaaatgttaaccactcggctacacatatgttaaatagttaatttgaaatcaatttaatttaattttctcaaaaaattctcttttcccaccaatttccttcaaaatttttcactcagaccctcattcttaccagtgtatttttgtagaagcatccaaattaaacattctttgtatcatttagcagcctaaagtgtcctaagttatggctttgatcataaattgatcattttatggtgatcaattattcaatcaagtatagctttctatgtacaaatcttagactaaccattccaaaagcaattcggtagcaaattttgtgctcttgccagtggacttgcccattttttctagaaaaaatttcccaacccttctagggatttcgaaaatttccccgattttcagtgtatttta

SEQ ID NO: 11837 - DNA, 2236 bp, Heterodera glycines
  unsure (1)..(2236): unsure at all n locations
actaaataaaatattttaaattattaaaaactaaatcaactttctatttattattaactaagagtatttttaagcaagttcgagagtctcggttataaatatttacaaatttctaataaaaataaataattgctaaataaatcaattatttattgcttcttacatgataattacaaacaaatactattaataagaaagagtttattaaaaaaactaaatttttatgtagaatgaatgattaggacataaataaaacctacaagataataattgcaacaaattttaatatttaaacaaataaaaaatcaccccaaagatggtttttttgttgacttttgcacaagaaatatgagcatgaattttaaaataaatttaaatttctttttaaattaattaaagaatatttatcaattataataaaaatataatattttaaaagataatattaatgtttttcggtaaatgaaagtaagtttaaatggtaaagaaagaaaaaatattattatgttgctaataaataatatttattataaaaatatagtttatttatatttttaaatactttataaataaaaaaaaattttgtataaaaattgcttaggcgcacgccttagaataaaataagaaaagttaattttaaataatacacaaacagataaaatacatttattaataaaaatggcaactatacatacgaagtgtcagagaggcgccttgtcatggaaataaatttcatcataatgaaggggttcgacaattttgaataaaaaaattattatgagtaaaataaaatttttattaatgtttcgaaattagaaaaaaaagtaaaaagataataaatattaaatataaaaatttaaaaaacatattcaaaaatcaaaaaaaaaaaaaaagattttaagaaaaatgaaattaaaaaaaagatcgacgaataaattttatgagtaaaataaaattttgtattaatgtttcgaaattatagtaagggataattgaataatttgtattaatatgaaagaattttttgtgttcataattatatattttttaaaataaatataaaaataagaaaaaaattttattaccaaaaatatcagtcgtataaaaatattatagcattaatcgcaatataaattataaataatttcgacaaaaatcggcgcaaaatatgaaattataaaatattttaatatcatctttatctctgctatgaactgcaccaaaaaaaactacatcatgagattaaaagaaaaaagatattaaagataggattatgaaagttatcaaaaagtagaaaataaagaaattaaaagaaatttgttgagaaaaacaaagcaaaaagaaaatattaaagtctggtaaaaaaattttttttactaaaagttgattttttataaaattgaatttgaaaactgatttttggtttaaaaaataatccgctaccaataatgtaccggaaaaattggtaattttctgaattgtaaaatttaagtgaacttttttaatttgacaattttcgttactttttgtggcgtattttcttaatttaatttttgggaaattatgggtggagaggtcaggcagtgccgatgagcgccgccggttaaaaaattaaattaaatttggagaattataaagaataattgttctataatgagtaattcttggaaaatataaaataaaaattcactaaaattaaaaacaaataaaataataaaaaaactatcaagtaaggcgctcttaatgtaaagtaaaaataactcttaataaaaatacaaataactagatttttagcagaatcaggacaaacaaaattgataataaattattgtaattttaagaaaaaccgttaaaatatgatatcacaaataatattatttcgatttgtttagcttatatacaaatttacgctagaaaaattcatttaaatgattttttattatcttattatgtancacaggaatagaaaataaagaataatgtcaagcgtttgcagttcgcataaccaaaagtaaaaaaattatgatttaaaaaatgtactcactctataaatgattggagaattaaaaaaaaggatttgtgcattgtgtaaataaaaaagtttataataaacaaaaattggtttttattttattttttttcctcaataacattataaagcaataaaattaaaaataaataaataaagattggaaacaataagtgataaaaatggacagaaattaaatttcgaaaa

SEQ ID NO: 11838 - DNA, 1381 bp, Heterodera glycines
  unsure (1)..(1381): unsure at all n locations
aaaacaaaattttcaattattagtttcttaaacaaatataanaataagaaataattcatgcaatagcagccaatgatatttttcaatgtttgagcaccggtgtaaaaataggaaattattaataatttaattataataattctcatgacaaatgatcgcagcagcattaagaatatttttaggggcaaaaaattatatatttttcttttcataaaaataatcaaaaatataaattatttaatatagggtaatttcgcatttaaatttataattaatgtctttataatataaaaaattttaaatttttgatgcctacaattaaaatgacataatgaaaacttaaaaactaatctaattataaaaaaaggaatcattgaccttttaaacatataagttgttaaatgaggataataaaaaatttattttatgaactattcaacaattttctataaccgattagatggaataatgaatattttatgatattaaatatgtacattcaaaaaatataataaaataaaaaaaataggtacatatttcaaataattctaaaacaaaattatataaacatatcaatattataataaaaggtagaaaattgaacaaatagtctaaaatataattaagcaatttatataattatttatgaactgctcctcaactttgcttggcacgcaattgtcttacagtacaatgcggcaaagaacaagaaaatttatttttatcttacctaaatattcaattcagataataaatacattcaaaaataaaatataataaaaattaaaaaatgcaagtaaagtaatttttaaacaaaaaatataattaaaatagaatactttcagaaaaaaaaagacttgaggcaaaagattaaactgaataatttaaaatctaattcttctttcttatggccaaaaggttgtaaaaatctttatttttaaatatgaatacggagaaaaattttatttaagctaaatttatgtgatggatatataaagataaaaatttaattatatgtttcaaacctcaacaatagaagcaataccagaaattttaaaataaatataatttataagtagggttcgaagttgtatgcactaaaaaatgtcaaatatgcgcataaaatatgcactaaaaatcccccaaatatgccctaaaaaccggaaaaatgcccaaatatgcactaaaatatgccttaaaaattacccaaaatggcttttaaccctcaaaaaatgccaaaaattgtgtataaagaaaagaccaaaacaagggctaaggaacattttttagacaattgcaaaaatattgaatttctaaatttttattatatgctaaaacaaaattacattttttatataaataattttttcctaaagttctt

SEQ ID NO: 11839 - DNA, 1098 bp, Heterodera glycines
aaaatatattataaggttttcattaattaataataataaaaataatttgatttataatggcagaaaaaaataaagtaacctaaaaaataaaatttcaaattttttgaaaaaaactcagcgaatcttccaacatgacaaacattaattatattaacaataccagtttatatgttattccaaaggtaaattcgcccatgtaaatagcgcatggaacttggtatggcctccgcatcgatggtcaattcactcggatgacaagggtaaaattattccaatcaccataaatgataattgacaatgtgaatgataaaatataataatgataaaatcactcgtaaaattatttattgaactcaaatatcatattttaaaacaaaaaattatattttaaaactaaattttcaattattagtttcttaaacaaatataaaattaagaaataattcatgcaatagcagccaatgatatttttcaatgtttgagcaccggtgtaaaaataggaaattattaataatttaattataataattctcatgacaaatgatcgcagcagcattaagaatatttttaggggcaaaaaattatatattttacttttcataaacaataatcaaaaatataaattatttaatatagggtaatttcacatttaaatttataattaatgtctttataatataaaagattttaaatttgatttataaaatttaattttattattttatcttattttttcataataaagtgcgttattgttaagtttacaatatcagtatcattaaatggtttgaacaattttttataacgagtaatataaaagaattattggcaagaagtaattactgaagaatattaaaattttataataatttatattaactaaatgaaatgaaaaaacataattaattaagaagattcataaaataaaagaaaaataaataaacaaacgtacattgcagctaattgaggggcgttttgttgaagatcgactatccaaaaaatgatccaattcagaccatttttattttattttttcaacttcatatttaaacaaaagccactcagtggagccgcatcgaagagatatcattccattag

SEQ ID NO: 11840 - DNA, 2787 bp, Heterodera glycines
cggcataatgattttcaaaaatataattcagaaaatacttattattcgtgcctaatcaaatctagagcttgatcttgacttccagattgacctttgtgtattttctggaaaaatccaaaaaacccggacccataattacccaggcctagatacagatggtgctgagtcgggggcggagtcgttatttaaaaaaaccaacaatatgaaaagttttaaggaaaaattatatataactttgctcaaaagtaactaatttttttattcttgatataataagatagccccaagtgttctctattagcctgcaaaatttcaaaaaatttcgttcatttcaacaaagtaatggccaaaaagtactcaaagaaccagggtttttatatatttttcaaaaattttttgttaagtttcagaaaaattatgccaaaaaatatttgaaaacctggttccttgtatacttttcgccataactttgttcaaacttgacgtaaatttttgaaattttagaaaccactagagaactcttaaagctatcgaatgatatcaagaattaaaatcaataaataaaataccctaagaatcgagctttattaaaatttacgaaaagacccttaaaaacttaaaaatttgaattttgttagatttctaagtcaaatattatataaatatttcttttaaattacacaaaaaagaatcattttaaaaatgactttttattatacaaaatatctttaagaattgactgtggctttaaatgtttaactattttcagctgcttttttgacgagaaatgcacgaaaaagctaaacatttttagcccgaaacattttaattttaacttcattcttcgtcattaggaaatcctttattctcaatttaaataattacgtcactattttggaaaaatttctttagaaaattccataatgaaaaatttagccgtaagattcgaactttatgaaaattttcgaaaaaagaccccctaaaaactcaaaatttgaagttagattttttgttaaatattgtataatatttcttttaaaatatacaagaaatggatcgtttttaaaattacttttaggacaacaaattatcatttttacatccggcagcgcttgaaattcatgccaattctctaaaattcccagccctaataaaaaaaaacatttcgtgtatttaaattgctacagatttgatcccaccagcattaattacttctaaaaattctctggtactactgaagtgaaataaaagttttattttgtaatttgtagcattttttatgcgctatccaaaagcaccaccattcagtgttttgtagatgctctttgtatgccgatacaatttggtaaggtgatacacccccaaaaattttttgattttaaaccgatttttttgtcaaattatgtgtaaaaagcgtgccaatgaattgttttgaaaaccaaatttggacgaaaaacggcactaaaaatgcacgaaaaatctttttaatcataatcattacaacactttgacatgacagaaaacattttttgacaatataaaaaaaccaccaaattctccgattttctcaaaattacttcttttctcgcatcaatttgtattcaaatgtttttgcctttctttttgccatcatttttcggcaattctttttgatttgccattccttttgggcaattcatttgattttccaccacttttcggcactttgtttgattttccaccatttttcgaaaattcgtttgattttccacaacttttcggcactttgtttgatttgccattctttttcagcgtttccttgtgtttgggcgttttcaatggaccactcagagatgaagaagaagaagcatttagggaagcacttaggcttttcgacagctttgactttggtgatggcgacgctttgaatggattgaaattggccagacttggtggcaatgaaattgaatggcttttcaatacttttcctctcgaggatgaagccccccgctcttcgggcagcggcggcatttcgtccaaaatttttgagaccttcaggtcggacaagtccaatttgtgtttttcgccattgtacgcgtccatcgtttgtgattgggttgcggacataaaatgtgcaaatgatactttgtcttgatcttgccatattgagtccatgcctccgctttcaacttttctttcggttaaatccatgaacaatttacgcgaatcgaaaccgaaatcttctattttgaaatttaaattaaaagccaaattcattaagaaatatttaaaataaatatgttatgtatggacaaaattcaaaagtgctattatggatgaaacttgggttcccgcccccgccgggggcgggacaggtttttggcctcacccccgcccccgcgactcagacctccacaacccccgcccccatgaccttcacccccgcgggggcgcgggagtgaaatacacccctaagaatggcatattcgtgggatataaggcaaaaaatttatacaattttgaattttttaaccattttgagaaatttttttgaaataaagtaaattttacttgtgttttttattttatttgtggattggtggatagtgcttcaacaataacagtacttttgtcatgagttcgacttcggctaaagttttcctttaactttttttttgattaatacagggtttctttatgttcttatttctaaaaatattttgatttgtgggtaatgccttattttcttctaaaagaggaaaatttctgaaaaatttggcaaagttctaacaaaattcatgtaaattc

SEQ ID NO: 11841 - DNA, 1462 bp, Heterodera glycines
atcccagataatattttttgttacaataatatttgtggttttatctttttgggtaaatagttatatcctcataaactttcgaatgatatagcatttgttggatttggttttaaaatacacaagtgtgatgagtggtgggggtcagcgtggtcacttaccaccccacatttttgatttggtcccggacggaaaccccagttgggcgccgcaagtttttggctataatttttttttgccaacaataggaaaaagactaattaaattggacaaatcaccgctttaatttgttccaagtttgccaaccattgttgctccactgctgaattgccagttctgacagagagctgcttcggcagtcttttaatttcggaccctgaacccggattcgaacatttttgaaaactcaatttttaatgctttgcaaattaattatggatcacttttctcattatattttcagctgatctcatatcgtttttatgaattcatgtgcaaaaatcagaaacaactacacgtaaatggaaaaatctgatcatttaggtcacaaaatcgcatcaatcaatcaattcatctttttaattgctgtttctgatcagtgatcaccactcggcccgggcgaatcgtcgagaacactttaaaaacaataaaataaaaatatgcaactgaatttttaaattattcacccatcgtcgactgcgccgtctccgatgtaaagctttatttggttccgtccaatagcataaaatagttcaacgttagtcttccaccactctctctcatcgtgtgcaattggacaacggataagcttaaaatggtttgcatcttctttggacagtgccaattcctctccagtcaattcgttggtcaatttaaatggcacaatggcagaaagcgaagaggacaacggaaagccaaccaaaatgatgaaattaacaggagaagaagcagaggaaaatgcctaaaaagacaaaaaaataggcaaagacaaattaaattggataaatcaccgctttgatttgttccaatgttgacaaccattgctccagtgctgaattgccaattgtgacagagagcaccttccgaaaattgtcgggacgagccgagaacagccatttggtcaccgcttggccatccgacgcattggcactgtcatcaggtggaaattcgggcaaaatggtgccggtgccacggaaacaaagatttggacaatcgttgagcaatgacggggccaattggcgcattcgacgaaaagcgatggagggaaattgcatccaatgaatgatggtgtccttgagcattggccaaatgttgagcgcaaaaaactccgaaatgcgaacatttttagttataatccataaatctgtcacacatttgtcaaaaaaacggtgaaaacgacgaaggaaagtgagcacattttggtcgatgaatctgaaaatcagaagaaggtatgatgggcacaaat

SEQ ID NO: 11842 - DNA, 2723 bp, Heterodera glycines
ggaacccaaaaatgcaaaaaatttactcaatcaaaacacgttaatttcacttacaaaattgttactacctaaattttaggaattaacaaaacaactacacaaaaaaattttttttgttgatattattgttttttgaagatatttgtataatatttatccattatttgaaaaacaaataaataaacaatgtttttggcagaaagtaaattttgtttcaaataaaatattatataaatatataaagttcattatgaaattaaagaccaaaggaaataaatacaaacaaaaagttttaaattttatttgttatactttaaaaacataaagaacaaatagattcaacaaaacaacaaaaatgaattaattgttgaactctggttaacgcagaaagttaaataaaataacagcaatgaaaagccaaaatatttataaaaaaatagccaaaaattttcaaaaaaatacaaacttcggaacgtaaaaagcaacagaagaaaaaaggaccggaaaagacaagccttataatctgaaaaaaagttcatatacaaaataataaatatataggtaaaagacattgaagaagtaaaatattgatttaatgcataaattaattttttattcgatgctttatcctagatagtatttaaaaccccaaaatgtaaaacaaaaaatcgataaattaatcataaatattgtttaaaaattcggaataaggtaaagttgaatcaaaatccagctattaacgaaaaattggtaatttatattataaaatatctttataataaatataaatttgaaccaaaataataataatttgttaagcatacatttctgtttaaagaaaatcaatttccttaataaattaaaaaataatatttaaataagcaaagatttggatatatatttaaaaaataataattttaatcattttttgaattaaggcgggaggtgtttgttgacccaaagaatattctccaatttgacaaggttttactgaaaaatacaataatttaaaacacggtgataaacgtaaattaacaaccaggaataaaaagaataaagtattagaatatggtcttaaaattttttaaactaaacatacaagcttcagagtgaaaaaaagctatattaagaaaataggaatggaagagtatgtccgatggaagagaatctgctaaaactttggtacgaatacaaggaatgaaattagttttctttatttgttaaataaagttaaaaaatattttcagaagattcaatatggcttattgctaaattcatgtgaattttaaacctatacttagagatcggcctgtacctggatccaggcctgtatttttcctggatccaggtacaggtacaggccatttttcggcaacctgtatttttcctgtacttttgtacagaaaatacaggtacaggccatttttggaatacaggtacaggtacaggccttaagaacctgtacatatttcctgtattaatttttaatcactattttttggcgaaatgtctgaaaaattaggaaaaattcaaaaaaatatcattttattcagtgaaactgtcaaatttgaaaaattaataatgttttggcgaaatgtcataaatagttcaaggtggacttggtcgttttggcgccaacccattgtgctatacctttttttattttcaacaaaatctaacgatcttggtagcattcgaacgcccttcacatttcaatttggcgcatgctttaataaaattataatgttcttatgagcacaaattttttgatcaaaattccgatttgtaaaagctacattttcaggtagccccgaaaatccttataaaaaattggttaaaatcgcaaaaatgtgtcttttttgaaaaaatctgttaacaaactgcttttaaaattgcaaattttatcccggcggcgcctaccggcaccgccggacccccgtcccctccccaagtttcccaaaaaaatttttttgaaaaagcgcgccgttaaaaaagtaagaaaatcaaaaaagggtcatttagggatattaaaaattttgggaaaaaattcttggtagagggtaagataggcacaaaatgtaacctaattaagcttataatcatcttttagtattcgaaaaattaatttttagtattttttatagggtaaattttcaaaaaaatatttgtttttttttctcaagaaaaatttttcaaaaattctcaaaatatttaaaaaaatgaaatatgtacgaaaaaaagtttaaatacattattattaagcaatattattgtttaattaataataaatacttttaggtatttttacgttattttatacaggccaatcgggaaatacaggtacaggtacaggctttttacaaaataccgatctctagtccatataatttattaaccttagtcacgacaccaaaatacatgcgtgattttaggctttggcctattagtatcaatttgactattcatttcacccaaatattaacgcccaaattacgctaaataaggaaaatgaatgtgaagaaataaagaatgattaaatttaatagagaccattcttttattgacttcactcttcggaaacaaaacaaaaatgaattcttgttatttcagcgtctgcatttttttggcgccgaattttggcgaatttcgaactccgaacccgaattcgaacatccggaaattcaaatttttaacattcgaatattgattcgtgctcagcacat

SEQ ID NO: 11843 - DNA, 4565 bp, Heterodera glycines
ctattcctgtgactcgtcacaactcgcgttccattgctctgcccttccatcgtcaatgcccgccggcgcaacagcctattttcgggtccacctgatctcgtcacttggccatagccgaattttcaatgtgacagcggcatctttggacaagaaaaacacagcacataaggcaaatgccaacaaaaaaatatgattttttattttttaaataaaaattccaaaaaaaaaacaatttaagttaatttcgacattttatgggtggcaatagagcattttactaacaaatcaataatataattcatatttttttcagaaatgatgaattaaaaatattctatatttccttgaaatcaaaaatttttatgtttttggcatttttatataattttttaaattttctggcatcagcaggagttaattaaatatttatatattaattaatttaacaatacttttggagttttattggtaccaaatgactaaaacttaatataaattgagtatttttacttagtttttaaaaattctttgtgaaaggtttccaattttctattttttctctaagtaaaaaatttatgtgtttttcacttttttataattttttaaattttctgtcggtaaggtaaaactcttcaattcaattattaaaattgaatattatttcataaaattaatttaaaattataaatataatttttattccaatttagcttttaattgacaaagtacagcaaaatgagcgaatttcattgacaattttggcatcagtacaaagtcgcgcggacccaacagtttggctggacgggcccatctcaacacaggcgcattttgtgcttttggcagccggtttaatattttatttaaaaaaaactaattaaataatttctttttaaaatttattattaatgataattttaattttttaaattttatttataatatttaatttaatttttataatttttttttgaatttttttggatagtttcacgataaaattcaaattttaaaaaattaattaggattcattaattttatttatttaaatcaattattttatatttaaaatagtttcaatttaaataattttttttttttgaaatttaattgaatatttttgataataaattaaatcattaatttattttatttatttatttttaaggttggaaatgccgttttcgctcaagtgcatgtccacccgcaaattggttaagcaaaacaatcatttgtgacatttgccactacaaattcggcgaacacccaacagtttgctggcatcccatcaaggcgaaccagcaacgagggcgatgccaatggcgtaatgccccatatttttatttttgaattttatggcaaaaaaaatattgttaaatcatctcttaaataatatatatttggcgacccgattatatggttaaaaaaattatacatttaataaataatcaatagctataaaatttattttaaaataatggactaattatttttattttttaattgattctaaaaaaaattatgaaacaatataatttgaaataattaagttacaattaatgacacggttcatatgtataataaaattaaaaaagccaaaaatctaaatataaatttttcagcagtcaggatgaaatttttttttaatttctttcattttataaatttttagtaaaaaagtgaaaaattcatcttaattagattaaaattttataaaattacataattcgaagccttattaagaaagaaatgttatttatataaaaaaaattttttttaataaaattcgtataattgtaattttttgaaaaatatatcattttttgcatttttcaattaaaacacaaaaatgtttgctacgagtttagaaagaaaataaattaaatagataaaatttgtttttttaactttttatataattgcatttaaaaataaaattgttaaaaataagcattaaaccgaataattttaacttttttttttatttttcatttcagcactttatttttctgatttttggtgccgcaattacttttgccatctccgtacttttcacatgcattttgcgaaggtgtgtttattataaaataatatattatatattttttaatttataatttaatttcatttttagacgatgctttttgtttaaagcctttttacggcacaacaaaaaacatcatcaaaaacgtggtccatcagtgtccgaaaaatcgcatcaaaagcaccgtggagctgaaagcacttcgctggttcaacgcggcacgagaggtaaattaattaaagaaaaacaacgcggcactaaaaattaattaagtaaaaacaaaaaattaatcaaaaatattattttacagtaaaaaaataaattattttggcaaaattccgaaatagacaatttcttcattctttaatttttttttaacaatttcaaaaaaaaacacttaaaaccttttcgttcaataatatataatgagtgtatttttgcatttatttacatcaattgaaatcaaagcgattaaaaattcttacaaattttaaaattattattattttttttttgaaaaaccgattcaacctctaaattttcaaccaattgaacgataatgaacccaataccaaaatcccgaaaaaacccgaagctttcctttcgtcgaactcgagaccaccgagattatttgaaaataaagaccacaattttctcagatgcccagctgcagggggaaagtgttgtgttgccaccgatcactttgttgccaaatggtggcacagcggcggatggcatttgcacaatgccaacttcaaacggcacaaatgggatgcatttggccacaacatgtgcctgtccaactgtggatgatcaaaatgaagaaaatctgaatgaagcggcggatgatgaagccgaaaatgtgttaccaactgtgtcggtgctccactttgatgcctattttgaggaaatgtgtgccaatgccaacgcgggattcaagcggcaatttaaggtgccgccgctgggacctaaacatacgattaaattatttaatttattgatgtttaaaaatattttaaagaggtgctctaagaaaaattaatcctttaataattactcatttttgttctttttttaagaaattttagttttcatttcaccaaaacgattgataattaacatatttttaaatatttttttttatttgaaaaaattttctgcgtccgaagcaaaaaaaaaagttcatgacttaagtgattttcaatttattttaaagtgccgtagaccattaaaacattttaattaattctaataatatttaaatttaaaattaattaatttaattgattcaaaccaatgagattttttaaagaaattcattttctaattgttaattttttaaatttttttttaacgaaaatttagatttatttttatttcactgaaacagtctttgacctttttaataattaaactaatttttatatttgttttagcatatttaaaaaattatgatgcatctttagttaaaaaattaaataaatgttttttaatttattttttgcatgtaaaaaatatttttctctgcaaaatgccaaaaaattataatattttaattttaggagctcgagttagatactattgccatgttagaacgtgaaaaagcctcttcatctgatggtgaactttctgctggccgagcatcaaggtgttcagcaacaatggcaatgagcaacaatgagggagaaaaattgaaaaatcggtaatttaaaatattttattttaattataatatgtttatttttaataatttttaattaaaaattatttaaattatttttattgaaattgataagttaaaaaattctatttgataaaatcaattttaaagatttttattacaataaaagaaatttttcgtttaaactttaataatactttattgaaattgtatgttaaaataaatataattaatattttaaacaaatttaaaaaattttatttaaaaaaacactcgaaaaaatataatgcaaataaaaatttatatttttctatatatacaaaaattagtaattaaattaaattatttttttttacaaataatatttaatttaattacctttttaaaagtaaaaaataaatttttccatcataaaaattaatttcttaatccaccaaatgaagctatgtggatgtaaatgcattgcctcggaagagcagaattcaactggtggaccccagaacgggatgtcttcaacattacattaatgcaaattatgtagactcatgtgacgagaagcgggcatacagtaatccaaataattcctatcattactgtattactgtatttatttaataaataatatttttatattttcagtagcaactcaagcaccgttgccacacacatttgccgacttttgggcaatggtttggcaagagcggagcagtgttttggttgcattgaccaacattgtggagagtgggctcaaaaaatgcgatcagtaatatttaaaaataaataaattataatgaattttaaacattttttaaattttgtttcaaatttataaataattttaat

SEQ ID NO: 11844 - DNA, 2136 bp, Heterodera glycines
  unsure (1)..(2136): unsure at all n locations
caatcaaaattaaatttanttttgctcataatatatagctttttttttaaagaatcggttttttaaatattaaaaatgattttatagccccggaattctgaggcaccgctggtgaaattttttttgaaaaactaggctcaatttgataacacattttctcaaaaattaccaaatcttgtgtaaacttaaaaaaattatgaagaatcatggggccggcggtgtagtaaattaatttactagtaattgatttgttcaatatagaaaaattatatttacttaaaaattacattatgtaaaagaaatttaattattgttgaggaaatgaaacagtgcgaaagtatttgaaaagccagaagctttgccactaggccatttgaaaaaaaagttgtaaatttacaggagaatataattttttttcagcgttgtctaaatctaactacacaaaaaaattaaaaagaataaatagccccaaaaatggatttcattttgttagaattttttgtttggattcaaaataaaactgttggttgtactgctataactctatgcatgaagacgaagcagtacaagaaaagtgagaagccaacacataatgccttttggtaaatgttggcttaaaaattctattctaacaaaattaacgaattctaggaaaattttaaaatttaattttatcacttgttaaaaaaatgtgaaaataaattatatattttgagaaagatttttatttttgtttttttttattcgaaaattaagtcaattaaaatactttgttaaattaaattttttgcttttttggagaaagccatgttttttccgggcacaattgaaacacaaatccatgcccgatcattccgtaaaaaaagctccaaaaaattttgtgtaattattagataaataaaattctcatatcgtctcgtctcgtatttttttcctttttgcaacatccctgatgtacaatttccttgccttgttaattggagaaaaattttaaaaataattttttattgcttttaagtgatggtcaacgtgttccggtcatgaaaaggacagcttcactcaacgaacaaaacaatgaaatttgccaaattttgcccaacaattatctggccgccattgataaacagcgcaacaaaaaagcaatgctcaatgaggataaaaatgcttttctaaaagctcacggggttcggatatgctccaagccaattgaagcggaagcgcgacgcctgtacccaccggcaatagcctgcttattagccgaagaagacaaggaccaaaagaatagagagcatttggagccaaatcaaaatggaggtcggcaaatcatttgaattagggatgatattattatgcactaaaaaccatcaaaatagtaaccaaaaatgggagcatatgtattaaaagtcccccaaaaatttgatttatttcaaaaaattgtttaattagttgttaagatggtagacttaaactaaaaaacacagttatttttaagaatttcctacaaatcctaaaaatatatgtttttaaatttttttttttagatttgaatttttgttttactgaatattacgaaagtttacaatacacaaagccatcaaattttcccgaaaaattaaaatgggtaattgtcatcattggagaatcccaacaaatgtgcaagtgagtttttataataatatcacaaataaagtctggtaaaaaaatttgtgagccccggactataacttttttctttgtcaaccaaatccaacattgttttatcattcattcgattgcactaacaaataagtgtcgaaaatatggtttgatgtatttttggccataagtttgttttatcttaacaaaattttttgaagtttttgcacgctaatagaggaaacttagggctattgaataataccaatattgtaggatttggtctacaatgaaaaaagttatagtccaaaacatggctggggcacaaccgttcaggccccaactgaggtaaaccggaagtaaacactggggtcgaaaaaagtcttgatttaatttacaagtttacctgtaaaactaattcaaaatacaacctagaaataattttatattggtccaataatttattcaaaaaaaaaacaaatattttactcatacatttgc

SEQ ID NO: 11845 - DNA, 2360 bp, Heterodera glycines
  unsure (1)..(2360): unsure at all n locations
aatattttacacgtaaatttgcaaatttataacttttcacaatcaatcaagactttttccaccaccctgtatgtgcattttataattatcaaaatggacgcggttagttgggcggttccccgcgggattcccgctcatgtggaaattattttttattcttggatttgaatgaaaaatggctttttatatctttgagcttaaagaggtcaaatttgatctcaaatttagaatgattaaattctgatttttctcaggaatttttatgatctattgaaagattgtgcaaaacatcgtggtgttgtttttacaactccagtggttcaaaatatttctcataaagaagccaattcattgtaagttgatcttttaatagcttgggcaatgttgctagtttgctttttcaattaactttcagagagctcgttcgaaaaagttttgaagcgcacaagaaaaataacgtgcgctttttactattgttagcgcccggaaaggattcggccaattctattgatgtgcattactttttcaaattgatggaacagcagactggtgagagtttattgaattttaatgtgtttttcaattcaaaaaattaatttctcgatacgaaaattgaaaaaaaaatgtgtatagtggggaaataataacaataatacagaataatcaaccaggaaacacggggctttacttaaaaaaattatgaatagggatgggattcttagttttttaactattttttctgcggctttaactcgacgagaaatgcacgaaaaacacattctttttcgaaaatttttcatttttagtgccacaattcatcactaggaatcactattttggagctttgccactaaaaaaaactatttcggaagttggccactaaaataattttttgccactattttggcgtttcgtcattatttttgccactattttggcatttttgaaaaacttcccaaaattgcaataaaaatgaaaaataaacccctaagaatcgacctaaaaaattttcaaaaatacacccctaagaatcgacctaaaaattttcaaaaatacacccctaagaattggaaaaatttcgcaaagattcttcccccaaatttttttttcttgttcaatatttgctacgaaaatattttgtaactgcaattagtgaataaaatctttttccttaattttaaattattttcaaattaaaaatatatttaaaaaattacacccctaaatttggaactttttcgccactatttttaccactattttggcattttttggtcactatttagttaattattttgagattttttatcactaaaaatcccatccctaattatgaatattaatttttaattatttaaactctctttatctgtttaaattttgttatttcatgattttttatcacaagggattttgacgcagcacatttcgattaaaactgtgcgtacggtagtgcaaagaccaaaagaatttcgattcattcttgacaatataatgcttaaaatgaacctcaaacttggtggcattaattacggaatatgtgcttcgcaagcttttatgaatgccagacgaagcactgaagacattgtgtaagtgattatctatgggaaaaatttaagaaacctccatattggacgcttaaaaacatttttgatgataattcatttacagctaaatgataactcaaaataagcaagaaatccatttcgnatttttaataaacgcgaggcgtggactcttgagccttacaagaccaacacggaattctatttttaattttaaaatactttattaaatttttaaaaatccaaaatcttttagtttgtgaatcaaagcctttaaaattaaaaaaaaaaaaacaaaattcccttatttttttagggggccaaatccaatttaaaacccctttttttccgggttaaaaataaacaattttgattttttaaattttttgggaattttttttcctgccccccaaacttaaaaaaaaaaaatcctttaaaagaaaatttttcccaaaaaaagttttattttggggggttttttttcttcaaaattttaaaaagaaatattttttttctggggccgccccccccccccaaataaaaaaaaaaaaaagtttttttttatttttttttttaaatatttttttcccccccaaaaaaaatttttttttttttttttttttaaaaaattttttaaaaaattttttttttaaaagaaaaaaaaatttttttgtttgtctctcttttttaaaaaaaaaaaaagggggggggcgccccaacaacacaactttttaaaatatattttttttataaaaaaaaaaaaaaaaaaaaaaattttttttttttttttttttt

SEQ ID NO: 11846 - DNA, 1001 bp, Heterodera glycines
  unsure (1)..(1001): unsure at all n locations
ttttaaatgcaaaaaaaagtcgtcgggattttaatttttaaaatgtgtatctcaatactgacatggttattttgtgagaacttttgaataagttgtcaatttacacgccctaaatttgaggcttgttagagccaattttcaatttttatagcctattttggggttttttagaacctaaaattggaattaccatagctataattttttcagagtaaataaatttttcttttaaaatttgatatttttggtaattatacataaatatttcaaaaattcattgatttttaaaaagacatgaccaaaataaaaggataactagagcacttgaatgatacgaaaaatattaatttgtatgaaactgaaacaataagaaacgccattaaagtttccttccttctcttgattgataagggaaaacaaaatttttattagtttcttttttaaaaaatcacaaattaagtttagcaaaaccagcacatctatataaacaattatttaagttcaaaacaatggttgagcagcaaacggatgtttttcgggatggatatttcgcaagctccaccgcaaactctgttcgaaaggcgcacagggaaagcacccgccattccgacaatttttggagtaggtttggactttgttcggcattgtcctgtgttgggcatgatttagaacaaagagttttatgaatgggaagcagaatttcagatttctgaaaaatatatttttttaattatcttgctttcaatttgaaagcacttgatagggattagaaaatttaaaaaataaagttaaattggcaagccattttgtagagaattttgtgctctttctgttcgtcatattcatcttctacggaaaattttttcaaacctactagaattttttttcgaatttactcagattttcgtattttttcaaacgtaaaaattttgtgtttaatgacttttttctggcatagaaggaaatagaanaatgcttataggatatctgtacgttatctt

SEQ ID NO: 11847 - DNA, 2895 bp, Heterodera glycines
  unsure (1)..(2895): unsure at all n locations
tttaggatcttaataaacaaatgaaaaatttcagatttcatattttgaaatatgatcctaaaaaaccattgatctcagatatacccaaatgcttatgtatgcttcaaaacttttcgctttgtaatgcgaaataatctttaataaattaacaccaaattcacttttatagtacccaaatctttgaatcaatatatttttattcaaattcaatgtatttgatttcgctaaccttttattttaattttcaccttctgtttgctattcaaatgtataacaattaatcaaatattgtttaataacttcattaatttaacactaatattgctctacacggtttaatcattttaattaaaaggatgttagaaaagtatatggatatggggggggggcggcgtacaaaggatatgcgagaaaaagtggtagcaaaattatgtaaaaaatttattttgaaaaatttaagtgtttgtaatataaaaaaataaatgtgaacaatcaaatttaaatttgaaattcaaaaaaaatttatttatttatttatgcaaaaaagaaaaaagtccacaaaaggggtaatccacttactctgcggacgtgtcatagattaaattgtcctcgagtaatatggattaaacattaaacaaaaaaagaaatcacaacaaaattacatataagaatgaggtcaatgattaataaaaccaaatcactatatcactataaaaaccaaatcactatataaaatatataatatctttaattaaagagataattcacttttccggtcattttatacgttaaggagtttaattttagttttaaattgatttaaagaatttattttaatgatttctttatccagctgattccacaattttgtagccctccccgcaaagggaataaattttttgcctaatttatattttgtgttaaacctataaaaggggacattaaagcgtttagaaggtttgaaaatttttaatatatctagatctgttcggccataaacaattttatgcgccaagaacagatcaaatagctttcgccttttctcaagtgttggcagttgcaggtattctaatcgattttggtatggaattggcggaaggctgcatttaaaaaatactcttttggtgaaatatttttgacacttttcgatttttttaatatttttttgaagagacggattccaaacctccggagcgtattccaataaaggcctaatataagttttatataacgtaatccaaatcttagatgatttggatttaattattcggaacaaggaacgcatacgtaaatacgcattccttgttatatgattaacatgatcggaaaattgtaatttgttatcaatgtttactcctaaatccctaattgtatccacagcatttattgtattcccataaaatttataagtttcttttgggttttttgaacccaaataaagtacaaaagttttttgaattgaaacttttatttgccatttattttcccattcgaataaattatgcaatgctttatgcataatttccgtttctgttcttgctttataacaaatatagattttaacatcatcagcatataatttaatattcactcctgatggttaaattaatattacaattatatttttttactttagtgaaaataatcgttttggaaataggcaaaaaaatttttaaaactaaattaaaatatcattttaaaccaaacaatttaatcaatcaattcaaaaagccattaaaaaaaattaaacttgtgataacaaaatttcaacttaaaaataataattttacagttttaaatttcaagtattaatttatatattaaatccatggcttattagttaattacccttcggcttcttcccaaaaatgcattgacacaaaaattaagccgcggaacttaatgcgcggaccgctcgcacttctcactggcgtatgcgcaaatgcaaaatttttgcataaaaaaaaattggagtacaataattaagggtaatgaacagcatttgatcaacaattaataaatattaaaataaagccaaaaattatttatttattttttgttttttccatttgccttttgagattttcaagaatccaacaattatttctttgtaacttaaaaaaggattttctttctttagcttacaataaaaattcattggccatttttcgatcatttaactacgcatttccttctaaaacagaaaaataaaaatttaaattaaaataattttacattcgatacattttatgccaaatttgtttttccatctgcttagtgttgttttgtcaatgcccaactcttaaccgcaaattgtttctgttttccatattttggcattttttaaaattcgtttattcttttaataaattcgttctttttcttttcataataattcttatcattcattttgtttttcttaaattttaattcttttttccattcgtaaatttttgtttggccaattcccaaattttctgcaattttttgctcaattttactccaaatttttgtcgaatattttcttttttcttaattccatcttttattgcatggaatttataaacaatttcacttttttgctgatctttgaattgttcgttgttctgatcattgccaattggataaattaattcattttgatcactttcataataatttggggcctgatcagtttcattttccgttttttcactttcccatctttggccaaatagttcatncaaagatggccaaacttttacattttttgccaaatcaacagacaaagctttatccgttgaattgattatgaataaaaatancaatattaataataaaattgcattttcttaaaaatttgtgtttttatcanggctcccaaattttttttttcaaaataagacaaaatggctt

SEQ ID NO: 11848 - DNA, 983 bp, Heterodera glycines
ttttcgtgcgttcagggcctcccacagtccaggaaaaaaatatggatttccatataattggactccctaatcatcatcatcatcaaatgtaaaaaagttttacaaaaaaatatattaataaatcctaaaacgatttaaaaatctcaaaattgtgataagttaatattgattttgctaagcatgaatccgaactcaattttcattatctatgcatttttatctatgtttttcatcgtgtcatttatttctttagaatttaatttaggattcgaattatagcgaaataaacgttagtttaggaatattcgaacccaaaaagccataaaaatcttattattttgaaatttttaaattctctaaaatttttggttgcttttaaagaaattcatgacaaacgataaatttacggtagattttcattttgaaatttgaagacaattcacattaatttttaataaagaattaaattttaatttcgaaacccgtgaagaaacagacgactgaaagggctcgaatttcggatggcttgttgattggtcttaccgtggggcggggtatgtttggggcgggttttttggcgccgcttttttggcgctggttttttggcgcggccgttttggcgccctttataaaatagcttttttggcgccagtgtttaaaaatctttaaaatttttgaaaaatttttaatttgtctttctttgttcataactataagcaattttctttcaaagtgccattctaatgcagtggtgtgcaatagtgcataattttcggccctaattaacttttagattttggttcaaaatcaaactatccggggagttttcgagggtgctgctcataaatctgaccataggtttacctatttccgaatcccggaattaaattggaatatttgtactaggtcactcgaaaattcaaaatccgacccggtaatcgatagtacataacactgcaaaaacttatttttactttttctca

SEQ ID NO: 11849 - DNA, 4320 bp, Heterodera glycines
ccgcgctgcggcacacttcaaagggacccacaccctgttttttttagaatttttgggacgggggccatccggggggatggccccttaaaaattcaatttatctgaagtttatcaaatttaatttacgcggaattgggtaggcaaatcggtgcgggtgcagcttgatcagcgtgtttttgatgtgccgtcgaccaaccccgtgggcgccgagcagtacaagcgttttgcggcggaacgaggctaacctgaccacctagaaattaatcaatgcattttttaataatattaaaaattgcgaaatttatcggacaaaattaaatgaattgctggaataaataattttaattaaatttcgaatttgataaaaaatttaattaaatttacaaaaaaataaatttaaaaaaatttaacctcttcgtagctgatcatttccatgccgtcaaacagctcggaatgtttacgcaaatacttaaaaatgaagaaaaattatactaaataagaatttgttatttaaaatgattttagaatttttaaaattctaaaattaatttttaataatttaaaataataattaatttttccgcttttgccttcgtcgtgtaatatttgttgccactttttttcttgctaaacatgaagcaatgcgaattttcccgtgctcgctccatcgccaaacaagctgtccgccattcctgtataattaaaaaaaattgaacaaatccaaaaaataattttggtaaaataaataataaaaaaacattaaatgacgaaatataaattaatttatatacgaaattatatttttttaaacaaaaaaaatgtcataattaattttaagataaacgaattaaaaattcaatgctttcaaatttagattgtttttaataatttaattttactcgaattccacgtaagatttaattcaaaattttttttttaatatttaattatactcgaattttatttaaaatttaatttaaataaatatttttgataattattgttcaagttgcattttaatttaattaatataccttttttcatgatttttttcatttaaaatttattaaaaatatatttttgttaactaattatactcggttttcatcaaaatttttaaaatatatttttttaataattaaattattctcaaattcatttaaaatgtaattaatttttgaagtgtatttttttcatatttgttttttttgcctgtaattccggcgaaggaatcagtccggccatgttgacgttgccggtggccgtggcggcaccggcgccgacattgttgccaattagtgccgacgctgttggcattgttccaccctttttggcatgcctttggggcatgacggcacccgtatggttggccaatgccgcagccgaagtggaggccacctaatttaagggggggggatgtgaatcaatcaaactaattaaataatcaattaactaggtaattaattaattagataattaattaatgttaaaattaaatatatctgtaaacataaaacattttaaaaatatataaatatttttattttaattaaaaaatttgcattttaaattcaccgcatttgccactccgcacccggaagcactgcttgtacatcggccagcagaagaagagtgccattttgaggagccgccaagcgcagggaaatggcacacaaagcgggctaacaaataatttaaacataattttaaaaaatggataaaataccaaggaattgaaaaaaacaaaggaccatagccagtaaatttcaaatttgcgggttccgctgcgggattggaattcaaaaatttgcgggacgggatcccgcagggattaatcccgcatttccctaaatggagggattttggactgaaaatcccgcaaaatcctgcgcgggatctcgttccgctccgggctctaatttcaatgaaaagaattttaaaaaattaaatgccaaagaattggaaaaagcccgatttttggattcaattaaaaataaaaatttaaattaaaattaacaatttctcaccctgccaccagttgtggtcatccttggagatcacttgcagaatgtcgccagttcggaacggcacgcccgcacttgggcacgggatcaggtcatcctgggccgggtcgtagtcaaatctttgatcgtttttgaaattgtgaaaattttgctcaaaaatggcacaaaattcaacaaccttcaatgcaaatataataacataaattgtaaaaatgttttcaagcccaccatctcgcatcatttgcattaaaatttgaatttaaaaaaaaagaagaaattttagaaaaattttctaagaaattttagaaaaaacggggagcagttcgttttccgtcgtcgtttcctccccataaaaaattaaaattttcaaacagaaattttccaaaattgttaggaaatttcttaataagaaaatttcaagaaaaaacaatttttttttaaacttttagcgatttttaataaactactaagttttttcaaaaattttcaaaaaaattgcaaaaaaaattaaaataatggaaaactcagaattattatttttaaaaatgatcagaagctcaccaaattttgcagagatacgtaatggaacagtataaatgttatacaaatttttatagaatttttcacccgagcaaaaattgtttttttgtattgtgagaaaacgaatgtaacggccaacaattttaacgttaaaatagttggctaatttttttttaattttaaaatactaaatttaaaaaattgagtgtttgttttacgcactgggccttgcagaaaatttcgcaggccggcggcgcggagcggtaggaaggcacaattttgaaggtgaccgccccgcgcgcgtcacgcaacagccgctggagctgttcaacattccgattggccacctttaaccgtttatatttttaattttttgaaattaaagaaatttatttaaaaaatttttaaattaaattttttgatttcgctttaaatttttgtaaaattaaatgttgaagaaatgtcactctttttgacaatgagtttaattgttatttctttttctttttcatataaaatatggaaacaataattaattaaatattccctaacccccgaaatatttgaaataaaaattttcaaattaagaaattcttcaaaaaaatctattttttgaagaaaatttcattggtaaaatttttaaaattttttcagctttttgtaaaaatttttgaaaaaatgagcaaatctaataaatagcataaaactcgaaaaaaaatcgctagaaaaaatttttcaaatttttttttttttttgaaattttcttcaaaaaaatttttttaaattttttttaaaaatctcgaagggagggggggggaagacctgctcccgtaaataagaccatttttttaaataatattattaataattattattttttattataattattccatttttctttccccctaccgatactccgttgatctccaggatttcgtcgtccacgtgcagcgtgccctgccgatggatcagtccgccgtgcattattcggcccacataacatcggccatcctccgtgatctgttttgaaaaaaaactcagaaataaaaaactaataaatttttgaaaaaatcgctagaaaatttcaaaaatttttttattgaacttttcacataaatttttttttttttttttgaaaaattcctttaaaaatttgtgttaagtcaatccgagtgcccgaccaccttgagcgtgatgcccatcggctcttccgtgtccttgctgaactggacgagccggacacggctgaccgcgcacagcagcaagtcgtcatcatcgccgggcaatggcgcgctggtggtggccatgtgggaggatgagcagcactcatcctgctcctcctcatgctcagcaagtgttgcaattcgggtgggcctaaaaatttggggaaaatttgagaaattaaaaaaaaataaattcattttttgattattgaaagaaaaaaaattgtttaaaaaatgaaaagaaatattcttttttttaaaaattctagttttttaaatatatttcggcttttcaaaacttgtcaagaattttattgaaagaaataggaaataatatttttagattaaaaacaaaattaaaattatttaattaatataaaggaatgcaaactaaaaatatttattttttaatcataaaattctattcgataaaattcgtattaagtcccaataatcttaaatatttatacatatatactaatggagacaaaatttgttttaattaattaatttttttgttttttggacct

SEQ ID NO: 11850 - DNA, 2307 bp, Heterodera glycines
  unsure (1)..(2307): unsure at all n locations
taactcgaatacggtttcgggattcgaatttggtcgaaatggatgtcagcttcgtgatcagcgagcccaaaaattccctagaaatnttttatatgatntaaaaaataaattctattttttatggtctgcaaaatacataagtaccgaaaaagcaatggacagcagaactgttccaaaaaaaaaccgtgctggcatattttaatataaaacccagcaaaaggggtgatttcaacaaaaagcttgccaaaattttactcaggagaattatgtttgaaactgtttgtattagcgctagaatcggtctacgtcagttgggccctcaccattgggcccccacgtttgggccccagcatatttttccactataacttttttctttgtaacccaaatccaataaacttggtatcattcgaaagcttaacatgcttagaagctttttctaagctattgcttcgcgattagacaattaccaaaaaagttatacatgaaaattgcaaaaaagttgaaatttttgaaatttttttcttaaaaactttttttaaagccaaaaatctttagtgtgtatatattttttgcatttttatgggcttttaccgttattttttgagatattcattttttgtgcctaaccgaattttatgcttataaataattcagggtccaactcgcccggaccgaaagtgatcaattggacaaagtctgtgcactgtatgtgaggcaatagaacacaaccgacgaactttggggtgcgacggcactctaagtcggaccttttcccaacaaaatcaaaggaaaataaaaatttaaataattaggggacactcggaaaagtgatcggcacttcagtgggcgaaagagtaccccctttctaagcgcaggccacctgagcattggccatctgtgctgtttccatacgtgtccaatgggttgggcaaatcgatcccttgaaaacgcgtggcaaatattttctgtactgaagcgcaaaaaaagtcagcgctggattgaaataggcacgtcgaacaaaactcgactcgggcagatcatcttccaattgtgcgtcggaaggggtggatttggccaactcattggccacgtatggccgtgacacggcgagaagcggctgcgcaactcaaatttatgccggtacgccgctaccgcagcacctgactagacggagaacaggtgaaactatggttacagtaatacaaaaagttactgtattttagcaaaatacgatccccaaacgctctgtgatggtttcacttggcttttgctctggctttttcatgctttgtgaagaggcgaatacgaattggtggtgcccatccatggaaaatggatggtgcgacacattttgccaaattaacaggcatatttttaaatttaatttttttccaatattttaggcgaaatttaaaatattaaaccaaaaattaaaaaatgaaaggtgagaatattttcgggttttagcttaaaaaatattcagtaattttcaccagaaatactttgttaataattgtacaaaatttcaaatttttgcgattttggtccaatttttttaagaaaaaattataggtttactttctgcgattcatttagaagtcaaaattaagcagtacaaaaactaattaaattaggaaattggaacgtcaaaaatctgtctgccgggggaatcaaactgctttcttaattttcagcccattaggaagggggcattaagggaagcggagggtccctaatggagggaaattttatttttcaattttttaaaaattaaatgggcaaaaatttttttccaaattttcgccaaaattatgtttgttcattttgggttttttgaaataggggggggggggactgattcgggggngggggggggggtgaactgctctaatatttttaataccagcaacaaatttgcctattttattttgcagttgttggcttttccggccttgcatttgactttttacaagcgctacgccgaccgtccgtttgctgtttgtgccgccattcaccgacgtcagccagtacttgcacgagttggaaattataataaatatttgaaaaaaagaatgaaagagtatctgacaataataataaagtgagagagagagagagagagaggcaagtagagtagagaagagaacagagtgtgacagacgaatgagagagtggaggagaggctagtagagcctgagagaaatagtgcttcatagacgttattgaagagagaatagaggaggagtgaaaaatagagcggaaaagagaaagaggaatttaattcgctattaattcagtttatag

SEQ ID NO: 11851 - DNA, 2842 bp, Heterodera glycines
ttttatttaaccatttttttttgaatttttaaacattcttttaatttaaagattggcattgcctgcactggtgtggctctatgcgctggtttacttggccgctgcggtgtccgacttttacaaacgccaacaaaaattggtgggacaccgattagagcttttttgtaaaagggctttttattttggcccgttttttcgcggagcgcttttttctaaatcggatttaaagccattaaattttatgacagtcttcagatcactgcactcctttgcttgtctgcgttttcatttggcttttgctctggctttttcatgctttgtgaagaggcgaatacgaattggtggtgcccatccatggaaagtggatggtgcgacacattttgccaaattaggtaataggcataatttttaattaaatttaactgttttttatctgctttcagcaattcggcgtctgcattgacggcggacgactttcaaaaaatatttggcaattaaacgattggtctcctcaatttcctgtcaaatggcgttagcgaacgacattttcgagccttaccgaaatgccaagtgcgtgttgaaatgtttaaatcgaaaagccaatatgcttgttggcattatttttttcataaaatttttaggaaaccggaaatggaattttgaatacaaaaactaatcaaaagtttttctatgcttttttcgtgtatctgctttttttaattttcggcgggaaacgaactgttttttttattttctgccgatcggagtgggctttagaggaggatctctgatggagggcgaattttatttttcaattctttttttaaaaatcggcaaaaaatatttccgtaaattttagccaaaattgtgtttgttagtgttgggtttttttgaaaaaattccgaacggaaacgatagggggggggggctgatgatcaatgatcgcttttcaaaaaactccgtttttccaaaaaaaaagtcagatttatacagtgcattaaatttgcgacctttttcaggtcattgaattcgtttgcttttgtgcggttccgaacggcattggcactttcgtttgagcttgtacgaattggtggtgtgtccatccatgggatgtgatggttgaaaggcaagttttttaattttggactgttttttaattgaaatgtttttattttatctgcttgcagcaatatcgacattctgctgacggcggttgactcaaaaaatatttggcacttaaacgattggtctcctccatttactgcaaatggcgttggcgaagacattttcgagccttaccaaattgccaagtgcgagttgaaattgtttgaattgaaaatcaatgtctgggccgccgaaacgccattcggaaattcactctgtaaatttcattgcttcccggcggtgtttcgtcggcaagcttttgccatctttttgttgccctcccacgcccgtgacatggtcaattcaatgtagccgtccgttctgtttgtgtcgaattacgtggaccattttctctaccagcagcagcaaattcactttgccaagtgggaattgaaattgagaaaaatcgaagcatatttatacgttaccaaacatttgaatttttacatgcagtttttaaaaaaataccgatttgcctcttcaactttacagtggttggctttcccggccttgtcgacgatttgtctgcctttcagcgctatgccgaccgtttgctgtttgtcccgttcaccgacttcggccagcagttgcacgacttggagaatgtaataaatatggcacagaatttagtgggcgaaaaattcaaatttctcatggttattttggtcatcaaaaagattttcacgtcgtaagtgttaacgacgttcgaaactttctcacccattcgctttttaccgttcctctctttccctcccatgctctcctctctctctctctcgcttttctttgtccacctctccactatctttctttctctctctccttgtttattccctctctcgcctatttctccttcctttccttttccctttccctctccttttctttattcaaaatttgaattaaattatgcatttattttcaaagtcaattcaaatgaatggctatttgttatgagacggaatgatgcaattcttctctttacaaaaggatgtggatttacgaatatcattcattaaaaaaatgtgtttacatcttcatcagtttacccaaaacgaaatttttacaatttttttttgcgattttaatttggtcttttattttttcctttttttctatttcctttcttctctgtgtttttccttttttgtataacatcgttcctcaccattcccctggaactgatcaaaggctcaatgatcgtttttccaatgcttattttaaaattttttcgaattttcatttttttaaattgttttttattttgtttttgatagacctaaatcaatactaaatcgacatcctaagttttgctgtaattttccaaatcgttttacttttttaccgttctccctctctctctacctgtatcctttttcttatttatagaaatgcccgattccgactcagactcacagctagataccgattcccaatcgcattttgaatatgcgacagaatgcggctgccataatgaacacatggtcgcaacagaattgatgtggagacaccacaacatgtttgacggatgggttcgttacattgcaacccacgacgcaattcgcctgcgttggttgtgccaaaattgcaacagcagattctacgagacttacaaattttctcgaagtgggaagaaaaagaaggtgggcttttatcaaaaaccgaatgaaaactccat

SEQ ID NO: 11852 - DNA, 1147 bp, Heterodera glycines
cagcattctaatcactgtggactcaattctcctgcatttctatcactgaggactcaacccaccagcatttcaatcacgtgggactcaacccaacagcattctaatcactgggactcaacccaccagcatttcaatcactgggactcaattctcctgcatttcaatcactgggactcaacccaccagcatttcaatcactgggactcaattctcctgaatttcaatcactgggactcaacccaccagcatttcaatcactgggactcaacccaccagcatttcaatcactgggactcaacccaccagcatttcaatcactgggactcaacccaacagcatttcaatcactggcactcaacccaccaacatttcaatcaatgggactcaaccgtacgggggccttcggccccactcaccaaatttttgcgccaaaggtactcactcggccgcttcgcggcctcgaacgggatattaaaatttaattaaatgatgtttaaatacaaattcttctaaaagttttttgggcgtcgaataaaaaaaactaaaattcactttttctcagaaatgtgatttcggggtagcgaccaaattttgttctgatttcttaaaattcttcaaaaattggtaattttgtggcgtaatgtcactccttaaaaatcctttgttttcttaaaaaatggctcaaaatcacaaaatttggacaatttttggacaaaatcttttaacaaaatacactcaaattttcaaaaattttcccggcggcgcctatcggcaccgtcgaccttccgccccgcttgtacacaaaaagtctttgaaaataattgattaaatggttacacaagcaattttaagctattttgcaaaagttctgattttttatcccaaaatctgattttttgggctcgatgttctgatttttaaaaattttcgatccacaccttgatataaaccgagaattacgtaaaaaatcactcaatttactaaatatgcaataacaacgacaaatctaagttgaccaaataattatgagcacaacaataattccataatccaaattgatcgatcatttctcaacaattcattcattcacttctgctgctgatcacttgggccggaagttgcgtcgagaagcctaaaaatcgaaaaa

SEQ ID NO: 11853 - DNA, 1291 bp, Heterodera glycines
aatatttatacaataaaacatggtataatatgggaagtgatgcgagagaaattcgcatatctctccgtttctttctgctactctcttttcttttacattgctatttactctcattttttcgcactccctcattctcccacacacacgcacgcgtccaacagactactgctgcacagcaacacgcgtctgttcactgtctgcccctcccatctgccgctgcccgcatagacagacagtcatacagtgcactttttcccaccatccctccctctaacctctacatcctaggaggagaaatcttttaccttctttttctgtgctatttcttttgccttcttcttcttcttaactatttattttcgtctcttttctttatattctcttctttttcaaaacaatttcttttcatctcttttcaaattcatttttaacgcaaaactcaaacaaaacgccacaccaattcaaacagtgacacatacagagaatcaactttattatataagattgtaaaaatttgaatgttttttgttaatcattctgatttttagatatggtatgtagagtaatgtttaaaattaaaacaggactttttgtcaaggatcctgtcgggttcacctggaattcggattctggtccgggttttaacattccgcgttcaacttatccttatcaataaaatgaccaggttttccgcccgaaattcatttgctgtcgaaatcaggcacagatagtaagaaaagatgaaataacttactgtcgaaatcactcattcgaaaccaatcactgtcgaaaagacatagcaccggcgggggtgggatcccaaggattttcaaccccatcccctgttttcctatacgcgaaaaatgggattgcagaagcagcaaaccaagttaaaaatatatttttcgttcgttccaggccattttaaattttggaaaaaatatgcatgtgaattaattattacacgccctattaataataatctaaatataatatttacaaatgttcccacaattagaaagacaaacaaatcattaacaaattatcgacatttgtttatgtgttttctgcgtttattatttttaggtccaaaaattcataatttgaatttaatttataatttaacaaataattataaaaagaatttttaatttttatggtgccaaactttattgtcgccactcatttatcaaataatccataaaatgcgcgttggcaatgtcatcaaattttcgtcccttcaagcgtagaaggtatttctgttcaaaatgtcaaatgctgaaaaattacg

SEQ ID NO: 11854 - DNA, 3410 bp, Heterodera glycines
atcagccaccgatttgccttttacgtcaacgaacacttcaaaacccgcaaattgacattggcatttattcgaatttgtagcaaaattggagaaaatggcacgaagcaaatggaaattgtcaatttacgtggaaaatcaatgtcaattccgcaaattcaattgccatgcaaagtcatcggattcgagtgcatcattatccagtaaaattggcgattattcacaagtttagacaacatttcacgtttttagtttcatcaaccaaaatgccatcgcttttctccaccgttttcggcaactttttgccgactgtcaaatttatctgcccctttgtacgtcggatgaccgcattttggagtttattctttacaacatttggccaattctcaacaaaaacattcatggcatggatttgtctgccagaattttccgccgtttacgacaaattcacaccgtcaattctcaacgactgtccatcgcttcgcgttatcatgccaattatgacggtttcttcgccgattttctgccgatgacagtgcaatggcgtcggatggacaagcgatggccaaatggcttttcactccacttcaaaacaatgtgccaaagatgttcaactgctcgttgcacttgaatgatgggattttgccgtcgaatattgaaccgttcaaagcggtgcttcatttcgtatttctttaatcaattttcccaaatttcaggcttttgccagtgcttcttcctccgtcaatttcattgtcgtcatttgttttcagttgtcttttgctgattccgttgtgccatttgatctgacaaatgaattgactcgggaacaattggcgttgaaaaggattaacaatagccatcgttttcttctaatccgttgtccaattgcgcgagacgaaagcaaatggacaaaatgggaaaaggaagcgattgtctggcgattttgtgatcaatgggatcgaattagcactaatacttattatgagaatgccatcggggatgggtcagtgaatgatttttaataaaaattcaatttttgcgtttatgtttagacttcttaacgcaactcccggcccaagtgatcagcagaaatgaatgaatgatttgctgagaaatggtcgatcaattttaattgctgtgtaggacatgatttgacgtttataaaattgttctttttgttacaatgatcactgatcacaaattatgttatacaatatatgtgcatattgcctttaggatatttagtgattttctgaaacagcgtttgttgttttcttaaaaactggctcaaaatcacaaataaattgttaaaatgttctgatttttgaccccaaaacctgattttttggcccgatgttctgattttgaaaaattttcgatccgcgccctgtctaatacacaccctaagtattattaaaagtcaaagaccatttatagaatagttttctaagaatttccaatggaaatgtattttttgactttaatttttaagtagttaatcatgtggtttttgggatggattgtttaaatgttaaaattttttcaataaaaatcaaaaatttgcgatgagcgacgaagtgaacaaactcaacagattatcgctgaactttaaaatttgattgcaacatattgctgataaaatttgatttaataattgcaactataattttttaattaaaatgtctttgtttttaagccgaattttttattttttgattaatgatgtcatttttttcaagagtttgtgatgcgatctctgttttattaacagtgctgctggcctattctggtattacttaaaagtttttgatagttgaatcgttttatatgatggtccgcaaaagcacacataaacaaacttctttccatggtaattcgtaataaattttttacaaaatgcttaaaaaaataaagctccaaaaaaagctttttattttctataataagcttaatcaatattctttttttttttttgcaaaatttgtataaattatttttcattgtatattatacaatatttctttaaacattatattgtcttctattttattgtgcgtcatttagtcatgccaccaatgcaaatgaattaatcccctgattttatcttttttataaaatgcaaatgtgtaggaaattattcatttaaaataaatttttatttaaaaatattattaataaaatttatttagcagaatggtcttttccacacttttggcattctgtttggtgtcctcatttgactccgcttctgccaaagcccaatccgttaacaattcggtgcgaaatgatgaaatcatagaaaaaggtccaaccagcagcaaaaatgggctgttgaacatgtgcatggacagcggactgatcagcaacggaaaggccggagatgaggcggagatggatggtttggttgagctgttgactgagctggacgagcatgacagcgtaatccaagcagcattggccaacccgacaaaggtggtttctgtgaccagaaaattcgtggtgatagcaataccgtaattagtgagtgataaataatgacatggtctaatagcatatgagcagggtgcagctttttagttgtatatttatgcagcttgttttgatgagaaacacacgaaaaaacatgtgtttatccgggaattcattttaacatcactattcggcacacggaataattatcactttttttgctattttccccattatttagttaactctcatgtttttgaatttgtaactaaaaatctgcacccaaacttacctattcgtcattggaaagataataaagatatgagtgagaattagagctcgacctgtacctggatccaggcctatatttttcctggatccaggtacaggacaggccatttttggaatacaggtacaggccagggatggcattccgaggccccaaagttttcggaaatcggaattccaggggtcaaaaattttttgaaaatcggaattccgaggccccaaagttttcggaaatcggaattccaggggtcaaaaattttttgaaaatcggaattccgaggccctaaattttttcggaaatcggaattccaagcccaaaaatgtcggaaatcggaagtctgaaatttttcaaaaaataaaaaattttctaaatattttaataagctaaattttttaattcataaccaagtaaaaggtgatttcaaaaatgtttttggtatatttgaatattttgcttgaaaaattattcaatgattttatcaaaatctattttatgtcattttacattattttagaacatttttgggaaaaatagtaactatttacacgtttttttgcggcgcatttttttcaaaaaccttttggaaacatggaggagggtccggggtgccgataggcgtcgccgtgaaaattttagtgatttttaatgcgatttg

SEQ ID NO: 11855 - DNA, 1366 bp, Heterodera glycines
ggattaaaagaatttttatcatatatttattcagactttgcgcagcaacgcaaagcgtccaagagaagaaaagtcaacgaaaccaccaccaaaactgcggcagatcaaaggcttggagggtgcagcaaaacaaagaaatgttcgattcgacccgcgcttttccgcttcctgcgggcaatttgacgaattcagatttcaccaagattactcctttattaacgaacttcggaagacggacatccaggtcaggaatgtgcttttcgttttgttttcatcagatgaaatttggacggaaaagaaacaaaaatatttacacccataagaaaagtttatttatttttttgttacaggaactgaaaaaggcttttcgacgcgcaaaaagggaaggaaactccgccctttccgacagaattcggtgtaatttgcttcgtttggagaatcaacaaaaggttctttaatcacggttacctattttataatttttatttattctaggctgaaatggagagacaaaaaatggagaacattcgattagaattgaggagggggaacattgaacgaatgaaccgaggagagcgcccgatttacctcaacaacggtcaataataattacccattgattctgggcaatttaaaaaaaaatcccgtttagccgaattgatggcccgtgcaaattgcgagaataatgtcgtagcgccaaattcatagaaaaagaaaagagggagagagggtaatgtgaagacgattattgactcttccttctgatccaaacaaaataatattgttcgagttgaaaaaagtataaattttgggtataagaagttgcccccacaaagagaaacgaaaaacgcactctcctttaaatgtgcctcatccaaatcgtttgcttaaaaaaaatcggcaattgtgtagaattgtggtcccgaccaaaaataaacttaaaatttttattttattgtttcctggggtggaaaagtacgctgatcacgaatatgaactcggattttacaaaagccatcctttgtctatgatttttcatcaagtatcacaaaaaaaataatcatccatttcgaccaatttcgaatcccggacccgaattcgaacaaaagtggaaatttaattttcaccaaaatcagtttttattgtcctaaaatcaattccagcgaatgaaatggttatgaatcattattttctattccatacaatatatttgattagttttgtgcaataaatgtgaattttgatgagagttttcgacttttgttcgaattcaagtccggagtacgaaattggtcgaaattcttccaacaattaagaaaaaactcatccaagtttcattgccttttcaccgatcgaaattttcttt

SEQ ID NO: 11856 - DNA, 2726 bp, Heterodera glycines
taaggacatttttattttgtaagatttggaccctccaaataaggataaatcttataaataaggacagatccgaaccctgttttaaggcatttagagtcagcaaaaaaaaagtcatttgacttaaattcccagcccaactatcagatacgaaatagagtatttttgtttgttcgaattcgggtccggggttaggaattgggtaaatacgagttaagattcgtaatcagcatcattcgaaaaccccttaaaatagggtacgagccaaaatgaaaaataaaatatattttttaaaaaattagggaccacaattctttaccattgccgtagttttttaattttcatatacctaaactacataaaaagcagagccaaaaaattctaactcagattcaaagttcgaaattgacctaaaagtatgttacagagaccaaaaaccattttggttttttttttgagtccaagtagaaaaaggtgtacaaatcgtagaaaaggtttcttattttactagtattacagattcagctctccaaattaaaactataaatcttagagcattgtttactttaaaatgtccgacgaaatcaaagaactgaaggccattacgctgcaaattctgaagaatcagacgttgatgatcgctcatttagtcaatcaggcacgccaaaataaaccgcagcaacacgtccaaccgccgctgatgttgaagcaggtcaagacggagccgtgtgagcctccgtcgacggtgtcaaagcgaaaggcgccgtcggccgtggagcagccattgaaggaaatcagtttcatcaacaaaaacaacggcggatgcgctacggtcaataaacgtcgcaggatgagcgcaccgaacaccgctgggatggccaccaaacagaacaacaccaaagttagtcgactgacaaatggtcgcaatgtgtcacgttttacactgactaagtgaaaagattacaaaataacgatttgagttttaagttctgcaaaatttgcgatgccgtggtggacgagaatagtctcgtgagtcacatttggtgcgtctttgaattgtcaatgtttaaaatgttaattagttctattcagggagcacattctgaaaaagatgatgaaagagaaggcggacttgtccaatgcgtacagtttcgtttgcgacgtcaacggatgcgtcttccgtaccaacaagtaattcaaacgggcaaaaacaatgagggagaagaggaaagggtgcaaaaactattcaataggagatacacaatcaaaaaagaatcgagttggtatttgggttatcgaaatttttgttgatgcgactgtttgccttcgtcctatttccgccccaattcagaagggtgtgtgtattatgagaatccatttggtttatgttcgtaataatttgcttgacttaggttggaagcggccggtggccatgccatcaaacacccggaagtggagcgtaacaaggtacaataagcacttctcactggttgtgttcggtgtcttcatctgtcgttgtttttgccttctttacgtctcatttttcaggttgtgttggacaatcgtgaaaattcggagccgctctttctcgccactctcgcgcaatgctacgacagaatgagcgactcggagaaggacgaggtgagtccaatgctttgtgtctgtgacgacgaaaagggactttgttttcatctatccacaaataaaaaaaccctatattacaatatttaaaaattggacgaaaagttgttggaacagcaattttctctaaaaatgtttgaaggtgtttcgcaagcgctatgattgaagaagcacatccgaagtggaattcgatattgcgatgatttttgattttaacactgtctacttgtttttcctcatatttggctattttcccatttaattgtcatcaattgtgctccaatttctgtttgtgttaaattatatgtctgtacatttgaaactgaggaagtgcaacaaataattgagcgagtttaaaaaatgattaaaaaaagaatggttatttcgttgttagggtttcttttttgatgtcattggtccgaccgttgcattgggtcgtcgctggctgagcggtcgcttatcattccgccagagtcaatgccctccaaccaataggtcaaaagggtgccgactccctgtgggaagaatagaggcaattttctgttttccgccacaaattttccctccacggtaccgtattccctccgaggtttcctctgttctaccgtcccccccccccattttacttcaattctcactcctcccctcggaatgcaccgaaactctggaaactgttccgacagaagttggtagcttttcagtgccatctgaatgcggtcctgctgtcccgagttctccattttggcggccaaagtaacggtcgaaccgaacacacagtaacgaggggcggtgatgccgacgacacccaaaacgaaatgtttgttcggattgaaaaagaatggggttgattcctggcaagagaaacaattccgggtcccatttttgggccacgaatttggaagttaaaatcaaagaatttgtttgtttacccgtaaaaacactgcccgagttgaacccccagcggcagtgcaaatgttggcccggtctgtgcggaatttcgtagtcgaacaaaaactgacaaaaaacattcggtaattccatgccataattcgcccaaatgaattatgctttctacttaatgggccact

SEQ ID NO: 11857 - DNA, 3071 bp, Heterodera glycines
ctctcatcaacgccggtcatctcgccgtctttcttgccattgacgtgccacgtgtcccgttcgtccacaattgtagcacttcgtagcgcttcctcctcgtccgccgcgtgtgaatgtcgttccagtgaattgtttccaacttgtgctgcgccaattttcatcgcgtcgcggtgccggtccaatgtcctccgttgccaatcgcttgcgttcaaaaggtcggccgacagtcctgaaaatgggaagaggggtgttagacctgttttctgtaatagaaccactcggttcatcccaccaatttctccacgtttcgcccgttggttgtctcgttgtcgcgcttgtcgaagcagccgccgaagttccagtcgcccaatcgccaacaactctgtactcaccatccaaaagctgaccaaacctatctcttctgaactctccggagcgcaacaactgaatgtaactctgtccaactatttgtgtcaacgccgaagctctctctataaatctctgccaaacttcgccaacactcaagaccgagaaatcccctatcaaaaatagaccatgtcgtgcgcgactcagcgctaccgttgcacgctgactgtctgtcaaaaactcggaattctcagagagattgccctcacgataactagagctagttgtcactacaaccgtgatgtcagcctcctgcgcctgatattcgtccacacttaccactaaaatgttaagacctaagtcttcaaactcactcttaatacattctttctgtagcaaatacagacaagctgtccaacttcgctctaatatgcttgagtgcatttgccaaagtatttttctcaacagccaataaattctcaaaaatagttctcgcttgcgcacctaagtgcagtttaagtcggttcaatttgtccgattcagtccatgccgaaccaaaaacatccacatagtccctaaacttaatttcccagtcatcaaatgccgaagcgagttcaccacagaacactccaggctgtgtactggacgtattcatgtcagttagggcattcaggtcaccatctatatcatcttcttcccctgactcatttattgaaatgagtctcgactgattagtcatagagccatttgcaggatcgcctgtggtattatttgaattttgtacattagaggtactttgaagaatgccaaagctattaattgcattatgagttgggggtggggtcggcggaaagataggccttggcgaagtcaactgcttgcctaagcttaagattttctgagccccactgctgcgattcaattcatcgaattccatattttctctcaactcaagttcatttttccatgtgtcaaatttacgttccaatcccgtaactacttccccaagtgtgtcaaccctggccgctgttgtgccaaaacccgtattcacatcggcttcgatgtcactaacccggcccactacttgagtcactttcctatttagagccctcaggtttcgattgaccccttcttctaaaccaataacatcatcatggacccgagaaaggtcactgatttttgcctgcgcacttatatgtttgccttccataagccttttatcacagaccgcaaggtctgtgtactccatgcttttgtactgccgaagcaaacctaatttttgattcggatctccccttttttaattcactttttgttattcttcgttttatgtttgtttttgtttaatttaattaatagaggaaaaggaattcactttgtccgccaacagaagtcaaatgtccttccaatcaatcagctttgtccgttcacttggaatccgctgaagcgttttgtcaccactgatgtcgctcttcacctgtaattctccaaaatgattgattgaaatccaaaacaaaacaatgctcttaaacgccttcagttgtaccaagagggtataactggtccggaatttacacaccaaatcaattaaataccaattattttttaaattttaagggccataaaagcgcattagtgtataacgaacgaataattaaaagcgtaacgaagtttatttggttaatcaaatgaaagcatgttgtttgttaagcaaaacaaaaatgtttggccttcgtaatacaatttccactcatactcacagttttcacacaatgcgaaatgtgtcgcactttgggcagccgaagcgttgaatacagttgatggtccgcaccacactcaaatctcaatttcactcaggtgtcgccgattctctgaaattgggaaattgccaaattattaatgattgccctattttatttatgtatgcgtaagtaccaacatttcccatttgtcttacacaataactgataattggaatttttccccctttttaaaactaaaactcattcgttatgaatttttgatcattaattgattttttttaagaacgggccatagaagcatagatagcgcaaaaaaatgtcactaagtttgataaccaaagatgaaagcaacaccaacattattaaaagtagtgaaaaattctggcttcgatttgttatgtcaaaaaaatcactcatcccaatttcaaggaccataagaccaattcattcgcatttctcatcctaattttctcctaccgtactccaaaagtcgttctgatcaccgacgcactgcctttgttgatcaacaaaattcgttgattgtgctgatcactgctgtgccgattgctgtcccgtcactgatcaccggcgtccaatgtctcacgcagtcgaacaccaaatccgtagaaatcgccgaagcgggagaagacaccttcgatgtgcctaacaatttaaaaatcatattaatgtgtctttcaattaaccaaatttgctgaaaatgtgatcaatttataatatcagattttagaatgcccacagcatactgtaaatgtctaacatgaacgactaagaaggaaattccaagactgtgcttaaattgccaagttaaacaaggaaaaactcaaaatttttgctcccctcagttcaaaaaagcaactttttttttttcttttgaaagggtttacaccgtcattttaagtgtccaattccccagcattaaat

SEQ ID NO: 11858 - DNA, 944 bp, Heterodera glycines
ggggtttttgcattttgctgactgtataaaatgtaactcgcccggtgggactagaacccacgacacaagcagtctgtgccgtgctctaaccgactgagctatgggcgctcctttcggggttttcccatgttctttatcccactttctcccacactccgcttcctttggcatcacaggacttttttatattgtatatgtatttgcaataatatgctgtcaaattaaataataatctttttttgaaagttttaatttagaaatatctcatctttaaaatgaagtcattgctttacttattcttcccaataatttgttcagtagaataaaatttaataaaataataaaatgttaattattttctattaagtagatttttcttaaagaaatcaatgggacctgctcttcaggaggaagagcaaaattatagggacttcaagccggaaagtaaggccttcatgcattgggtcgaccaagccagagggcttgtagacacaattgaaggggccttgggcctctcagagtaatcactttaacgtttatcgatgtaagcagataattggagaaggaataaatgagtaatgaaagaacaacgatgaatataataaggtgaacacaaaaactgatgggggttaaaataaaattaaataaggaggacaagaacgatttcgtcagtgattttcgtcagcggataatttcgtcagtgaacattttcgtcagtgtactatttttatttattttgctgttttccatttttttcgtcagtgttccaattcgtcagtgaacattttcgtcagtgactatttcaggctcaattttttatatatattactttctttgtatatttttaatagctgagaatttattttattcaaaaatgggcttaagcaccataatatataaaaaaagattatttttcaccacaaaaaacttaaatatttaaatgc

SEQ ID NO: 11859 - DNA, 4063 bp, Heterodera glycines
  unsure (1)..(4063): unsure at all n locations
ctcctacantctttttcccatatttatttcacaaaaaactaataactcgatttgttttgagtgttttatcaacgaaaaatgaacaaggaaactgcaatccacaatactaacgaataagttagaccaatgaacaaatggtatatcgtgatcaaattccaaattcgaattccaaaattaaattatatcttcggtaggcgcatcaagatcctaaagtgggacaatgaccgaaaaaaagagacaatagttaccctatacgacggcggcgctcgcgggtcccgcatcccaccaccacctccaccattgacaccccggaccgttgtttcattcattggttccatgcgtcgccatcctccagtgttcatcggagggcgagaaacgccagctgtacaattaaaatatattaattaatgggtctgatcaaaattacactagtatacaattgaacattaacatacagtagcgagaaggcccaccaactcggtcggctccgtaatttcctccaccccatgaagaagtaccgcgttgaaatgctggtgaaaaataaacataaagaatcactaatattacaactcacgaatcctctcattcgttgattccatgtgaggagaaacatgttgtgagtctgtgccgctttcgatcagttggcgcgactcggcacgcgtttttggctgttcaaaaagctgcggactgtggggacgatttgggtcagtaatgaaattgttgtaataaagagcctgcaaaaagaaagaagaaaagttaaacgaacgcaatggtatggctcacctcatttcgcactttgtccacctcctcattgtacttggaatggatgtgtttgtgcacaaagtcgggccctttaaatttcttcccggagagaggacaaagccatttctcgggacccaattgttgcgtattcgcattaacgaacagctcaaccgctctgtgaaagaagcttagttttccacaacttatttgccagtctttcacttgtctgcgtcctttttgtcaagtttctgcaagtcccgttcactcagtggagtgcaccgcttaaaaagtccgttctcaagacgagcgttgaagccttcaatatgtccatccaccgcactttttgacaattgaggagcccttttggtactttcatttgccggtggaatgcgacgaacgtggaacaaaccgagactgagaacaagaactcaaagttactggtggccaatagaaacaaatggacagtccgttttgtagttgcttaccgactcggcattcggtcctcttgcgggtaatggacggcaccgtaaaagtccacagaatggacaatccgcaaataaaacaggagacggtcgagaatctaaaagcaaacaaaatgtccaattttgagtagaacaccaaagcaaaatgcaccttaagaagcgaccggtcttcctcaaattgcaaagaaatctccgacgacacaattggcccatcgacggaagcagccctttccaagaggacttccttaaatagaatcacgttttggattgttttttaaatgtcattcacttcttcaacactcgcttcctccaccatataatcggcaatccctgccaaaatggggttgcggcttttcagcacagcttcgtccaagcctggcaatttgttctgtgatttaatctctgcccagaacttaccatcgactccgttaaattcgcccatgtcgaagctccgtccgccttcgtcttcaccatcctccgcctcttcccggtaaagtccctcccgcacatccaacaaaaagacaagccgagcagcttggcgaagcgtattggacgcaattggacggtgagagtcaatgggagaagtgaacgctgagagagtggcgacggatgggacaaagtcaccgctgacgcgaattcgacgctttaggtcacggttgacttgggtgcccaaatcggaagtcatcaactcaaagttgagaaataataaatcaaattaacacgcgaatattttgccataaaaacgcattgactctagtttaacattaaaatttgctatctttactcaaattgtttcctattttagaagagtgccaataaaaacatcgacgatctgaaggagggcgcagttgtcacgcagaaattggtgaaggcgaagagtgcgtacgaggaaatggtaacgaaggcggaggcattgctgaccaaggcaaacaaatgacggatgaagacgcgtccattgagatggaagccatgtgatgaatgtgcttattagtcacatttaaatgttttctttcctcatgaataataaatatacgctaaaatgagatttttctctttgcactgactcattttttaaacggtgtgttaatttttatgtcagcaaagttaacgaataaattacaaaattcaaagtgacaaaaagttaaataaaagtaaatatacggttaaataaaatcggctgatctttttttcgcgtcttcaagccattcgtttgcgtctttctatttcatcgcaaatgtcagacacaactaaaaattcaaagtgaaaagataaaaaactacaaaaattacatttgcaatcggtcgatagttcgtcagtattgacatccttgaacattggatacagaatttttattttttctgtgaattctacgttgtcgaaaattctgatgggaatggaaaaatgggcacatatttctgaattttcaaaatatgttcaataactaaatggttaaataatataccgtttttcgcccaatcgataaccatttcgggagcatcttttgataatgtaccaagtcgttgacaaatgccgcggaatgacatttgcttaaataattgttaatttacaaaaatttttttacagcttttcgccttactgcctcccggcgaattatctcatttcgaatccaccaaaattgtctgtgccatagaaaaccatcaaaagcataggaaacccttatgatggcccaaagaatgtcaaacggaagaaaagaaacaagctcgaaaagcaactcgggtggaattttacgctttttaggattcatttttgaactaaaaagagcgaatagagaaatgagatggactttctcattataaatgaaatttgattacaaccaaggggagaaataaagaaaggtcatgggaacagtgcataaaatggttaattcctataacaatctctttgttggtctgttaactactaataaaagaatcacctcaaagcgtttactatccggaccaccgccgagtaccattggttggatttgtggatgagagggaaccgtaggcgccatcatccgttgcggtggagtagcagatgggaacatttgccgcggtgccatacgaagagacatcggagcaggacgaggcgtattaaaacgcatcattgtgtccggcggcgccatccgtggaggcattggagaagtagttaattcctataacaatctctttgttggtctgttaactactaataaaagaatcacctcaaagaattcaccggctttacgtttactacccgcaccaccgccgcgtccgccgccttttcgacccgtaccaccgccgcgtccgccgcctgctgacgagcaaccaacccttggaaaaattgacaatgaaacaagcttggaatttgtaaaagccgatcccatctccctcctcacacctgttatcttccaacaattccttgttgctgaattgtgacatggtgccaccagttgttgctggtaccattggttggatttgtggatgagagggaaccgtaggcgccatcatccgttgcggtggagtagcagatgggaacatttgccacggttccagacgaagagacatcggagcaggacgaggcgtattaaaacgcatcattgtgtccggcggcgccatccgtggaggcattggagaagtatgaggctgatgaattgcaggccgagggggcggaggaggcggcggcgtgtgcaaaaagttgacagtacccgacggagagggtggaagaagacatggcggtgagaagtttcggttgccttgtggaggaagtggaggcgaatgaaaaggccgaggagctggaggaggtggcggtgggggaatgggcgaagtaccctaaaaaca

SEQ ID NO: 11860 - DNA, 3322 bp, Heterodera glycines
taaattatgctcaatgctttatgtgctcatcattctatatcaaaacaaagcaaaaaaaaattttgaccaaaaaaagtgaaaaaaataaatccgcactcagaaaagaaaaattaaattttttgttttcatagagatttttttctgctaaaaagatattattgtaattcattcaaaagaagttcttcaaaatttccaagaaaggtttttaatgaatctaatttttcgaaaaaaattcaattaaattttgtaattaattcatttttttaaattccgggaggggggacgaactgctctcgttgggagagacataagccagaaaagtggaaagttacctgcacgccttgcggatgtaccgttcggcctgaaattacagggcaacaaatgtaaatggcattagtacggaggaatccaccgccgcagctgacacacctcgtccacgcggttgttgacgatcagccaccgcggactctccggcagcacacagatcagacagatgctcaccgtgtgcagcgcggcagtgatcaactgaaaaaagcggaaaataatggaatgaaaaacgcaatgggtcaagaaaatttttttggttttaggactttttataattatttaattagtgtgattagttttaatttttttaaatccccccccccatctcgcattgttttgggggcacttcattttccccccgaaaaatttaaaaaaaaaaattttcaaacctagaaatttttcataaaaaaattcttaggaattttcttagtacgaaaatttcaagaaaaaaatttttttagaaattttataatgaactaccaagttttttcaaaaattttctaaaaaatcgctgaaaaatttcttaaaaattttttttccttgaaattttcgtactaagaaaattcctaagacgacctgttccgcattgtttttccttaatttttttttattaaaaaactgaaaatttttggttttctaacttttttaggagttttttcaaaaaaaaaacattgggattgtcacaaaaaaatttttagcagaaaaacatcgccatgagcatcccttctccctcaaacactgttgtttttacctgaatgttctgccacgagttgcaaaagtaggcgatcagtgccaacgttgcgtagccgaccgcccacggcgcctgcagcaaactgccgaccattgcacgatagcgagtccctgggagaatcatggggatgggttggaaaaaatgaaacaaatgaaaaatagtaataaaatggaaataattaatacttaattacccgtgatttccatgcacagcacatacgcggccaggtcagcagctgaaaaggggacagtagcgatggtttgtttaattattgtaatcacacttattttttatggaaattggtaaatccgagggaccaaaaggccgcaagaaaagtccaaaaaaaaatttctaaaatttttagttcctagccttttcattaattttgctttagacaattccaagaaaagttgaaaaaatcctttttgatacattttgaaaaaatgcattttattaaaaaatttgaattcttcagaaaaccgcaaaaatttgttttttggactttttaaatatttttttccggcaaaatttctgtggctaaattttgtctaactccgaacattcttttaaaatgcgtcggatttcgaatgattcaaattttagaaaaacaaattacaatacaatgctaaaaatatttttggaaattcggtgaatttgtatttttcaggaaatttccatcctaactgaaaggactgaccctcgttgcacaccgcgccgcagaagcggatgaacaggaacatggggaagtaggtggagtagggcagcagcagaccgaacatggaggacagaatgccgaagccgatcaccgtcggcttgcgcccgaaacggtcggaggcgaagccgcccagcagacagccgaacaggaagccgaacgagtagaacaggtgggcatgggcacgcttgaagttgtcgtcgcacaccaaattccactccgtcacgatggtggaccgcatcacgtcctggtcgtagaacctgggaggaggggacagcagtttaaaattacacaatatttggatgaaaatttcgaaaatttccacggcggacgcgactgtcggcaccaggggtgttcgaaaatcacaaaaaaaaaatttgaaaaccgaaaacgaaacaaaaaaattttgacggacgaaaacgaaacatgaaaacgaaaaaataccattttcgtacgaaacgaaacgaaaaaaccgaaaaatttttgaacttatttcaatcataattaagaaacattaaactttaaaattgtatcctttaactgagggcatgtaggtcctagtaagtggaaaagcggatgtggctctaggacaggggtgtgaccgaaaaattttcaaaataacaatttttgggaagaaattatcaaatcgtacatttcagtgaaatcgggctgaaaaccccagaatttaacaattttttacggtttatttttttaagaaaagttggggaatgggaggtgggtccggcagcgccgggaaaatttttgaaatttgagtgcaatttcatagcagattaataattaaaatcggtaaaaaatgataaaaaaaaataggtaaaataaagttgcgggcatgcggactcgaacaataatgcacagcacaacataaacctgctgttttcacaactaaactacaatacttcaataaaaagagcttattattttcttatcaaaaagtcattcttaagggtgtaaatattttcgtctttttcgtaaaattttgctctaacgaaaacgaaacgaaaaacaaaatttttaaaaccgaaaacgaaacgaaaaacaaaatttttaaaaccgaaaacgaaacgaaaaacaaaatttttaaaaccgaaaacgacacgaaacatttcgtccagccctggtcggcaccggcaaaccatttctttccttctcactctctctgtctctctcctccgcactccagcgatggctccctctctctccctgtttctataccgctcactctttatattaaaaaagacgatcacattcgctctctctctttctcctctgtttctatgcttctcactccccctctctctctctctctccaaatatgtttctccccctttctgcattccctctgtttctgtgcttcttacgctctttttttataaagagaaaaaaataataatttttgcgttcttattcatattttcgctgcctctctctctcgttcgctctctgtttctctctctctcttagtttctctatgcgcctctctctctctcaccattcagtgcattttcgaatgt

SEQ ID NO: 11861 - DNA, 1187 bp, Heterodera glycines
ttgcgtcgcagacagttgcgccgcggatatttgcgcctctccatttgcgcggcgacatttacgccgcccagcaaaaatggacttttgcgccgcgctttcaaaaatattattatcattaaaattcaactattatcaataagtttactaaaaatataagccaacgaaatattaattgaaaattgcaaaaaattactagtcacaaagattgacattcaattttatttaaccattaaaatcttaacattgaataggttcatccaagatataaaaaatgaagaagaatactaactaacaaaaaaccgaaaatatgaattttctttaaaaaaacccaattatttttttgcttaaaaaagaatgaatttaattcttttgtaattaatttgctcaataagttgtttacatcgatttaaatttaatttcaatcaaattttcgcccctattttaccattttcgccttatttcacaatttttatgtcctcctaaagtccgccgcttaatgatcaggcaatacaaaggcttgttatcgcatatggtcccaatgaaaattatataaatttttttaatactaatttttgtcaatttaatttaagtttttgaaaagaattttttgtttctagactagaaatttttgtcaaacaatttttaaatgtatttaaatttaacaattcttccattatgtaaattttgcaaacgttttttgctttcggtttttttataatttctttaatattaagaaaataatttttttttatatcacagtaatttcatctcttattattacgttcattccagcgattttttgagagtaaattggtagcagttcatgtaccgttaccaaattatgatattgttttatttttcattggtaaattaattaaaattattgtttatattttaagaaattttatttatgcattagttcaaattagggttgcacccccaaccgtcggggttggaaaagtcggggttcggggttgtcggggtcagcaaggtcggggtcggggtcggggttgacaaaatcgttcggggtcgggtcggggttcggggttttttccaatttttcgtattttaaaaaaaatatatataaaagcaaaaaaatccatgataattttagtcttaatcatcattaacatgattttcatgatcagagagggagattttgatcattcttttgcttttcatgacat

SEQ ID NO: 11862 - DNA, 1765 bp, Heterodera glycines
  unsure (1)..(1765): unsure at all n locations
gaattattttaaatttgaaaataatgttattgtttttttcatagaatgtgcaagtttgatntaagttgccgggtttttttttttgtaaattacgaattgagtttntaaattantttgtanaataatttattaaattaattctgattaataaacaacaatttttcatgatttttgcgtttttatataatattaaatgagacgatccattaactaaagtataatcttttaataagataaaaaatcaaatatttataacaatttttaaatttgtttttggttttatcaggtttttcatactgctaatttattattatgtaattttttatttcatatcgtgccatcccactcgtgccaagaaaaaaaatttgtttagtaaatgtaaattaaattatttttttataaactcacgttgcgacgtccgatgatctgataaaatttagtcaaattttaaaatttttaacacattttattttatatttatatattatatgactctttacctataaacttgacaataatggttttttgttgttacttcaggatgcggagcaaaagattattctttttttaaatattaaaataatttgcttcgaataatttagagaaattgcgtaaataaatgcaataatttgttcatttttggtatatgttggctttgctctatcttttaatttattttttaattagtagtttataaggtaagaattttttatatacagtttttgttgaaaattcaaattgctaatttcattatgtttatttaggatatttgtggaaaacttaatacactattttatgctttttaaaaatgtattatgttgtcgtttagacgctttttcgccggatttctcacgttctcgtaactaattcacggttctctgctgccaagatttataatgcttattatgcaattttgtttgaatatatttgaagaaagaatttttgtaactttttaaaaaaataatttttgtttcttactttttgtgttaaaaaaataatttatttattattggattatttaattcatttattattaaaaaaaaaatttttgaatgattttttaagtagggcggataattatactattatatattaaaacagatatttgtatttaaatttaattttgtattatttatatgattaaaagaattattcggcgaagcactggaaaaagaatatggatgaaatgttgaaagtggatttatggagtaaaattgctgggtttatagtcgttttttttgtgcaggaaatggataaattggacaattcttgtgggtgggaaacaaatcagctgatcagataattatgggattaaaagaattatttttataaataattttaaaaagattcaaataaatactaaaattgtttttaatttttatcaaattttatacatttaaattgtcaccatgattaatatttatgtcgcgactacgcgaattcgaaaaattaatttaaaaaataaaaaacattaccaaaaacaaaatatttaaatatattttaaattagacagataaatattaattaattaaatgtgaaagaaaagaaggaataaatgaaggaaaaaatattaatcatattagtcacaatttttctatccgaaaaattgtcaaatgttaaattttaattatgaataatcggaatgttaaaacaaatatcaaactttaaagaaatgttaaaatgagacaaaatgtaaatgatattaaagaattgtaaaatgttaggggatcgagaaatgctaaagtggcacaaaactgaaaaatga

SEQ ID NO: 11863 - DNA, 1144 bp, Heterodera glycines
  unsure (1)..(1144): unsure at all n locations
tgaagaacaagtaaacaaaaaatagtagtttaatttaaatatgtaaaatgttttgttttttttattctacttgttaacaaaatgtttaaatgagaattccctttttttgtaatttcttatatatttttatttaattcgcatagtaatcaaaaaaattatatgagtaaaatgagtaaataaacttgttgttaatcttttcttatttaaaaaaaatgttcagattttttcatcatatttgtattatataaaataatttgtactgtacatttaattaaattatataatgaaacttttgtgtaatttttatattatgcgtgctctcgccataaaaatcattgttacggttggactttatatcgtccaatttatatcataattgcaactactagtaaaattctcgttattactttaagaagtttatttttaattaaggcatttttaatttaattatatcattaatccgaataatttgcgctaatattaattgattttaattcagttaatagatgtatttttaagatcattattttttaaatttcattttttatgctccgcctgcccgttcgtgccgccgactgttgtgccgatccgtgcaccgcccgttcaatgccatgcccattccgtgccgcatcgcccgctcaatgcacccatgccgtgagaatattttcatattaattgtataaaaaattcgactaaaaaagtaatattaaataaattactatattttaattaaataataaaaaaactttataaacaagcaacgattacccaaaaaataataatcttaagccgaaataaatatgtttataaaggattatttgcacagccaaatgaagaaatttgtgtttattttctgtttgttcattatttcaactttaattactgatcaatatagttaaacttatactattgcaaaaatgcctgtgtaccagggatgggccaaattgaaaaataaaaagcgaaatgcgaaaagcgaaatttgcgaaactgaaaatgcgaaatgaaaaaaaagcgaaatgcgaaaagctaaaatatgcgaaaatgcgaaaggcgaaatgcgaaagcgaaattttttctacaactntttaatagttaaaatcataaagcaaaaatcattttttaaattttatattagccaatttat

SEQ ID NO: 11864 - DNA, 968 bp, Heterodera glycines
  unsure (1)..(968): unsure at all n locations
tgcatgcnnctgcaggtgcccggaccaacaaaagttggcaattaggaagaaaagtcttaacatccgacaaatttttagcattatcaaaaaggctgctcaactgtcacgggcgctgcttagcattttcgaagatgggaccaaagcggaccaaatcgaaaaggtattggcacattacgcgcgagtgctgcgagtgtccgcccatttccaaaactgactctgaatgcttaatctcttttttaattttgccaatttctcccattccgtgccaattcccccccccccccctaaaggcctattcgaatgtcgccgatgcggagatttttgacgcaaagattgaattggataaagtgaaaggcgaaatggagcagtacttaaaggcgaggacagcaattgcatgggtaaaaagagagggaaaagcaaagaaaaaaaaactaacgctggacagaatgccaaactgagtttggagcaacggcatttgatcagcgcgtcgaaagaggcgctcgaaaacggcactttttcgctggcatcgctaaacgacccgaactcgccgaactttgtgcggtatttaaacgcgaaacgaatgaacattcaccagaacagccatttcggaacggacattgaagtaaaaaaacaaaacgaagatttgagggacaaacaccggcggatttaggcaaatgccaccgtcgaagttcgacttcggcccaaccccaacttcaacgggttggtcaccagctcggacgcctccacagtgcatgtgccaactcccatttacaacagaggtgccaattccattcattccgagggaatgtttttgcgatggattgcccttttctctcccattttctccgctaattacagtcatggtcatatgtttaacaacactcaagattttctaccaaatttgatttaaattgattataaaatctcaatatgactatattgcgtaaacatgttttatatttcttgta

SEQ ID NO: 11865 - DNA, 3342 bp, Heterodera glycines
  unsure (1)..(3342): unsure at all n locations
aggagtgatctgatcacttggtgttgctaccttttttgatcagcatccaaagttatgcttacctgaatttttttagatttttttaatgctgtgaaaaaaaatatgggtagtgttgttaaacatatgaccaccccaaaaagggagtgcagttggtaaaatggtttgtaactaataaggatagtgaatggtatcattataaagcccacaaaaaatgctacaagaaatataaaacatatatacacaatatagtcatattgagattttataatcaatttaaatcaaatttggtagaaaattttgagtgttgttaaacatatgaccatgactgtatgtcattttaatttacttcttcttctgtttacttcccgcagatgcccaattgttggagcaaattcattggtcggacattgaccagcagtaccggcggaaccgtgagcagctcaaagacctcaattttcagaagttctgctccgagtcgggctttttgcgctattttccgtccgccccgtggctttgggaggtgtttaaagcgtcaaaatgtgccgattattccaatttttgcccaaggaccgttcctcggagttggacctgttcgactgtcggaacacggaatggtacgtcaacgcggccaccgcgtcgcgtaatttggtcattttgctggacacttccggctcaatgctcggccaacgcttcgaaatcgcacggcagacaatcgaagcgattctcggcactctttcggacaatgacttcttcaacattatcaatgcacgtgctccgccccaatcattaattgctgcccataatccgcttctcctccttaagttttctaagcaggccatccttttggaggagtgcgacggcaaaaaattggtgcaggcgacgctaaggaacaaaaagttgcttctctcgcggctgtcaaatgtcagctcagagggaaaagcggactacgaaatggcactgcacaaggcattcatggcactgatgaacgtgagagccgaagagattattaaagccaaactgagagcttagataaatgattgaatgttgcttaagctaagctaacggtacccctcagcaaatattaatttgttgctaattgcaatttctaatttacttaacttttgccttggactgcttatgcacataacttccttaaatacccttaattaactaattaattgctttttaatgcctttctcattgccctcctaccgctcaattgtctttttgctttccaccgcttttcgcttgctcagttgccggatgaaagtgtgcgtcttcgaagcaaagaggaagcggcgcgtgaagcggcgcgaagggaagcggcggattcgcctgagtcggagagagccgcggaaggaatgcgccattttgtgttggaggacaacgttttaacagtgccggaacgctttatggaggcggttggtccctttgctgctttgctttgctttacctccgatcactttttccgctgctattcttctgatctttttccgctttgcttttcctctaatcactttttccgctttgcttttcctctgatcactttccactttgcttttcctctgatcacgttttccgctttgcttttcctctgatcacttttcccgctttgcttttcctctgatcacgttttccgctttgcttttcctctgatcacttttcccgctttgcttttcctctgatcacgttttccgctttgcttttcctctgatcacttttcccgctttgcttttcctctgatcacttttcccgctttgcttttcctctgatcacttttcccgctttgcttttcctctgatcacttttcccgctttgcttttcctctgatcacttttcccgctttgcttttcctctgatcacttttcccgctttgcttttcctctgatcacttttctcttccctttctcttttccataatcatttttcaattaaatatcaatctcttttttcctgttcaagattagcaaatatgcgggaagtgaccagcagatgggatgccaggatatgatcatgctgataactgatggagcacccggctttttccgcgaaacattcgaattgttcaatccggaaaagcgggtaaaaagggcgaagccaacaaaagtccaaaaaatgccatttcaaaattcaggtccgtttcttttcgtttgtcgttggagaagaggcaaaggattttgagcaggtgcttatcccttatattcggccaaatttgaatttgaaaaaggtccgatggatggcatgtgcaaaccgcggatttatggcacatatcagttcaatggccgacgttcaggaggtgagacaggcgaaaatatatgggaaaagagagagagagagagagagagagaaggtaattaattacatttgatcaaggcaattaaaaatgaaaaaacaaaggaatgggcaacaaaaatacaaacttttcggggatgaaacattcaaatgcattcaaacgtttatccacttaccccatagaaagtgcagcaatacgttcgcattttgtcccgcaccgtttcgcgacaaaaggccgctttcaccgaggacagtccgttttggagtggggcaacccgcgaaagaatggtcagtcggtgaagaagggagacataaagcggggggaaagggagggaaaagcgtgtccttagtagcaatggattggtaactttacgttaacaatttcgccaaatctctccaacagagcgacgacttcatcgtttctgtttcctttcccgtcgtccttcccgacggccaatttatgggcgtttcctccgtcactgtgccactctttgaactgtcccaattggcccatccgtcgcgcgtcggtgcgcggagtcattttgtgctgttggacggcagcggatacgctctgattcacccccaactgaggccgatggtaagcgaaggaaggaagaagcaattatggcattttgagaatatttggctaaggaagagacgggggagctgaaggccggctttaacagcatctcatggcacgaggcggaagcgcaacggacgcattcgccggtaaggcaaattcggacgaaaatgccataaaacggagcagatgctttgccattcagcaccaccaaaagcgatccttcagctgctcaacaggcgaaatagaaccaaaaaagcaacacactctcttcgcggtggacaaaatggtaattgaggaggaaaagcataggaaaagcatgaaaggagaaatgcgggaaggaaggaatggcatttgacaaaaggacgacacttttctttcgtgatgcgacatttgcgccgcccagcaaaatcgacatttgcgccgcttttaaaaaattttaatttcaactagantatttaatcaaatta

SEQ ID NO: 11866 - DNA, 5811 bp, Heterodera glycines
cattatttccacaactttggatggcgtttaatttcaataaattattcatttgttttatgcgattaaagattttacaaatttaatatataattctttaattttttacttatattcaaataaaatttaaatcccgaatcccgtaataaaaattaggaattattttctctcatgtgaggctttttttcattttattctaaaattatttaattttaattaagcattcacaaatgattgaaataattattctttatgtattattttattcaatcatcatgcggctttgccaccgaataactgcaaagaaaactactttcatccaaatcttcgtcaagactcttggtggaatgacgctgactatttttgcccattccttggacaccatcgagaatgtgaaggcgaagatccaagacaaggaaggcatcccaccggatcaacatcgtctcattttttgcggtgggtttttagtgaaaatagttaaaaaacggcatttgtaattgttaaaaagaattactaaatcgaaaattttgaaactacaaattttatttgtttttattgtaataataaggaatgtaagtaagaattactaaaacatgaaaattagcgaaaactaatgcacttttcaggaaaaacgctcaaggatggtcaaactattgccgactacaacatccagaaggagtccactctttacctgcgcttgagtctgataggaggagcgcggacgaggcggcagcaagcacaagaggtggcttatgggcactgtcttttgttcgcctgacggcgggcgctttgctcgcctgatggcgggcgctttgctcgcctgacggcgggcgctttgctcgcctgacggcgggcgctttgctcgcctgatggcgggcgctttgctcgccagacggcgggcgctttgctcgcctgatggcgggcgctttgctcgcctgatggcgggcgctttgctcgccagacggcgggcgcttgctcgcccgacggcgggcgctttgctcgcctgacggcgggcgctttgctcgcctgacggcgggcgcttgctcgcccgacggcgggcgctttgctcgcctgacggcgggcgctttgctcgcctgacggcgggcgcttgctcgcccgacggcgggcgctttgctcgcctgacggcgggcgctttgctcgcctgacggcgggcgctttgctcgcctgacggcgggcgctttgctcgcctgacgtcgggcgctttgctcgccggatggcgggctctttgctcgcctgacggcgggctctttgctcgcctgatggcgggcgctttgctcgcctgatggcgggctctttgctcgccgaaagaccagagcggcctaataataataataattaaaaacccagcaatgctcgcatcgccacagggagcaatgtgaacgcgattttgaggacgaagggaaggaattctacgagatagcatcccttcgactgtacgacatctgtaactgcctgcgttgtgaaaaaatctgccatttctggaagataagatttttcggcgacggatctgagtatttactggaaacagatgtactcgagcatgtaattttattaatcttattttgaaaaaattgacataccattaaggctggcgagtccattcttttgatcatggaaacaatcaataatcgcgccagaattgagggccacatagacgtccatttggcgcgtaaaatgtaaatatggctattttaaaatcttttttaattttaattttaaattttaaaaattttctaccagtttcgaattttttcaacagtttttcttaacgctgtattttctacaacattttatttataaaagtacaaaaaatttttgtatttacgaatattaacgttaaaaagaagattgttccgaccaaaaacgagttattgtggatattctcacaaaaatgaaaactgttaaaatattcaaataaatataagccctagtcataatgataaatacgatcaattttagtattgttcaaaataataacggctccctaaaaattcacggttttgacgaatcgacaaatgacagcgtcaacattgcggatattttccctgttgtgcctatcgcaaaacacacaaggatggatcttccgtcttcaagcggtaccgtggagttgttcgaccgagggttggcattctctgtacaggaacgatacggtctacaaacggctgcgacattgcgacaaaaggacaaccagtttctcacaacatcacatgccttcgcccccactgaaatttctgctgatgctctttttaaatctgtcgttgctacggcaactgtgcaaccacaacaaaaatcaccaccatcatcatcattatcatcggcatccccacaacaacaacaacaacaacaatcatcatttttggcatcggcaccaccaccgccacaacatcgtcctcaccaatttattgattgtgaaggaaggctcacaacacacctaataatagatgagggcgaagagttagaagaacagcaacaccaaaaccaacaatattcacctatatctgacaatccatttgagggtgtctcgcaatcgggcaccgagatccaaatcgcaggcttaatgacttctattttaaaggtgtttttttaaaatcaataaaaaactaagtttttaccaaaaaatgataacccacgggaaattgtaatttttgtaattttgcgtttttcggaaaagaatggaatttctttctggttatgaaatttttgaaaattttgtttgagattttggtttccgggtctattaaaaacctcaattaaatgattgtcaaaaataatacaattagttaaaattaatcataaaatttaacattctgacgtttcccacaaaagtttcaaaaatacgcaaaatcctcaatgaacttatcaaaaaacacaaaatgatgataaaaatcctattgtttagcgtatcccctctacttccggctcatcaacctcatcaaagtctggacatgaaattcggaagcatgtccgagagttgtacgcagaattgggcgagaaaaatgagcagcaacgcgagagagccaaaaacgccattgagacaaaaaatgaaggagggcggaagcgatcaactgccgagacagacaaaataaaaaaaaaagtcatccaacatcttaaatataaacattctcatgagtgttcgttatgcaattctattcacgctgcttatcaaaaataaaattaataaaaatgtcaattttttaaaaaatcgcaaataaatcataaaatccataaaaaatacaaaaaatcagaaactgcaaaaactcagaaaatgcaaacaagtcgtaaattatgagaaaaaaagaaagattaaaaaatcaaaattcccaagggtaacaaattaaatgttttttaacaatttaaattttattcatttttttatttcaaatagaaaataaaataatcgatcaaacgaacgggagggaggtgaagggggggggggggggtatctcatcattttccccatagacccccgtccaaatattctctttcttggcgcagtagttcgtcccagttccaagtgtatgtgtccggctcctgtcgtttgttgctgccgcctgcacctttcgattgctccaatctctcctcacagattttcttcatctcatcggtcctcttcttccatgttttggggtcttttttttctgcttcctccctctcccacagaagtcttcgttccttccattggtgccgaaactccttcaacgttgggattttttttgtttttgccgctgcggcatttggcccatttcatcaaaatccggtaccgcccacattggcaaaacatcatcagacccttgattttgttgcattgacatttcttaatgggaaaaaaatgttaaatcaaaaataaatagcataaactaatgtttgaaggcaaaattatatatcgctaatgaaaatttagagtttcttaaatagtcgctttttgcattgtaatgctgacgcaaccctaatttagttcaaattcagcaaacgaaattagtaaatgaccttcaaacttgcaaaactttttggtcttttgtgcagtaaggctcaaatattacactaaaaatcatgcgattctattagtaaggaaaatgtttcgtttttttttgcaaaaaaagttgcgattttattagatatgccgaaataacgaataaaaaatttctctatttctttctgtaagaaatggactaaaaaatatttctttttcaggtctaaacaaatgacttactgcagttactctaatttcattgtacaacattttgatattaaatttataattccctatctttttttgataactttttatctccgaaaaattggcatcggatatattctctgcttcttgacatttaaatatatctgtttctttgatgccaatttctagtttctgcatagataaggcctggtttctatattcacccataataagaccgggtaatttttgaattttttcgagcatttctaagaatgaaaaatataaattttcgattccaggcgcactaaatgctgttatgtagaaatttttcacccgtttaaaaatcatatttgcaaaaatttcgagattatttgatcgtttaagtatttttccagaaattttccaatttctcgtaattttgttttttataaaattaatttcttggtctattgtcgacatttgggattatagttacttctagcgttatgacatcatccaaaggatagaaaaacgaatataattcttcttttaataggacatgttggaacaaagcctcagctgtgttttcgctagggcatttaagagggcaataaaatgattcaaaaccaaaagaaagcttcaaaatgcttctgaatttttcctgttcctctttataaatttcatcgattaacgatgtgagtattagtttaaatttttgctcaacattaacaaaaaatggattaacaaaataaaacttggttttgtgttttttaaagccaaattttaagtccttatggaaatatgtctcaattatggcacaattttccattttggtatatcattatttttttgttcttatatacccatatgctcccaaacaattgtttggagcctattttcataatttaacatttggctctgcaccctccgggactcgaaatgtaatcttcgggcttccgttaatgaattttgcgattgttcctcgagctttgttgcctggtcaaaagttttgcatctctcgaaatcacgccacgtagattcggctttttctgactccaaattgattttgtccaggattgtgaagatttcccaaattgaatcggacattttaagatataattctcgaatatcattagcgtaaggagccttttctctagattttattgcacgattaagtgtttcgcgagaagatttggcaaaatcgcttacttcatccgttagcgcagctacatcccgccatgctctttctgtctctttttttgcagcttccaataatatggaattagctttttctgatttttcagaattcatttttatttaattggtatttttttcttgatcctatttatagtttacaaacaataaattcatctctaaattcagtttggagtctcggatttttcttagcatcatcaactatttcttgttgcacccaaaaagcattttgcccccgcagaaaaattatgatattttatgtcctcttcgatttcaatcaatatagtgtcaggatgatgattgtgtcggcgcatcattgtaaagaacccttccttttcaaagccccagccctggcacccatgtgaattaagttcacataggaggcaaagtttgaacttggtcattttatgtttgtaatagcg

SEQ ID NO: 11867 - DNA, 3155 bp, Heterodera glycines
taatgacagtgccgattgacaacagcattctgcacaaatatcttcgtctgttcatttatctggaaataacttacattttttcaataatcaattagtgcaaatcaaatttaaatattcttttacttcggaaattttgttgctttttggcgagaaaaaaactcaaagactgccgaaactcggatggttgggtagccaaaattaaacggaaggcaaaggataaattccgagagaaatttttctggtgttaaaaatgcgctgatcaccaatctgaactattttgaaaaacattgatttggtctatgatttttgatcaagtacttgattttttcaaaattttatatgagttttttacgcccaactaattttaagtttaaaaaaatcaagtacttgatgaaaaatcataaacaaaatcagtgatttcttgtattcatgaatttggacgcctagtacaagagccgaaatttcacttgaaaaatacaaatgccacacgatgaaccttcatcatcttaacattgtagttgattaaaaatgcctaccatcttcgccattccgattcacacgtgatatgataattttaaatagtaatttcagggcacgctaaactgttttcaagaaaaattaataaatttcaaaatgtacacatacgtgacaatttcaatcatctcattaaaaaataggaatgtaaaacgatagcatttatcgcaatttttaaaatttggtgcaaacattctgactgtcaattaaacataaactccatcgggaaagcgtttgcgttctcaggacggcgtgccaactgcgtcattggttcacttcaaaattaattaaattaatacaacatcaattaacatttttaaaaaatgccataaaacttacggacgcccgaagacgctctgtcgtggcgatgtacagaaaccggatcagtaaccaatggaagtcaccaatgcaacggcgatgaaacaaaaagcaaagctcttcacttgagaagcaccgcttttagcactttcgtcgacttaatcattaactgaaaatatagtattaaaattagataaattatccagtcgaagtgggagtttgtaaaaaggcaattcttaaattggctgttcttatatgtgagctctgtacaacggaatttctcacaacaaaaaattcgaattaaaaattttagtcttttcaaaaaaattattcttgtaaaagtttcaattgaaaagttaaaaaaaatcgtatgcaactccgttgaacgatccgtatattgtacgaactgtcattgaccaatcataattatcggttacaaaatgtgtaacatttaattttgaaaacacaaacgctcacaatcagaggcatacaaaacggcgaaaactgcggaaaatgggaatttgccggacatgcgcagtgccgcgtaatggccagaaattgggccagatacatgcccattcatgtgatgatgttgttgtagagaatgacgaagtcaccgaaccatcgacggttaaattcgcatccgccgatgtcgctggcgtaaggcgaacaactgaaactgttacagaaattatcgcttttggcagctctttgagtgagaatcttccaacaggtccattcttaaaatgcaggcccataacatgaaaaaattttttggaatggcacccgaagaacatttgtttgctgttcgggacaaaaataattttttctgttgttttttgaaaaatttcagcgctgggcgaacaaatgagaatttgtagtggttttcgccaaaaaaatgacacatttttgcctttttggggtaaaattttcaaaaatactggtctaattgggccgagtaaaatttttggaaatttttaccctctctttatgggtcggggtcacttcggcgcggccacttcggcgcgaggttttttcggcgcgagctttttcggcgcggccacttcggcgccctatataaaatggctttttcggcgccaatgtttaaaaatcccaaaatttcaaaaaaattttaatttgcctttcattgtgcatataacttatgccattttctttcaaagtaacgtgctaatgcagtggtaagcattggtgcataattgtggtcccaaattaacttttatattttggtttaaaatcaccaattggtgggttttcgagggtgttgatcacaatctgaccataggcttgcctaattcagaaccccggactcaaatttcgaatatttatattgaatttgacttacaaattccaaactgaccagtattcgatggtacacaacactgcaaaacaatttttttttaactttttctcaaaattagtgtttttgtagttcacagcaggaaattttttgcttttgatatggttttctaaagattttgaaaaattttttgaaaatttttttcggcgccgaaaaagccattttatatagggcgccgaaatggccgcgccgaagtggccgcgccgaaaaagcccgcgccgaaaaaacctcgcgccgaaatacccgcgccgaagtggccgccgcgccgaagtgggcggttccctgtttgagtgtatgcaaatgcaaaaatgactacctattctggggactcgtccattaaaaatagactaaatgcaccgcgcgcgctaaaattgccgcgttaaccccgccctgccgcctcccttactcatgttaaatgaccaaaaaacacgcgcacttgaaatgtccacgacacaccctactaatgcttcgtttggccggataagaaaaggcaacctgtgctacgcactgtatgaaatacctaatgcgcaatttggatacaaaaaagagatagctatttttgggcacgttacgatttttctgtctgtgtccaacaccctactaatgcttcgtttggccggataagaaaaggcaacctgtgctacgcactgtatgaaatacctaatgcgcaatttggatacaaaaaagagatagctatttttgggcacgttacgatttttctgtcggtgtccaacaccctactaatgcttcgtttggccggataagagaaggcaacctgtgctacgcactgtatgaaatacctaatgcgcaatttggatacaaaaaagagatagccatttttgggcacgttacgatttttctgtctgtgtccaacaccctactaatattggttggccggataagaaaaggcaacctgtgctacgca

SEQ ID NO: 11868 - DNA, 1709 bp, Heterodera glycines
actagagtagagcgggaccgggaccaaaacacggacaactgagtacaactgagtacaactgagtaccgaggtcccggttttgaccgggaccagtcccgggttttttcccggttttcccagccaaaaattcccggtttttcaacccgaaaaggtcccggtcccgggtttgcccaaaattcccggtcccgctctactctaattcgcacttttgtcactttgacccagcaccaatccccctaaaagaataatgacagtgtaaatgtgaatcactttcgtttcttcttttactttttttttctctcgacttttgttgccgctgttttcccctttacgggagattatcaagtcgaattgaaagttaaacttggaataaataagatgaagggaaggaatttttttttgactgaaaacataacgccaaaagaattctatggaacattgatgaatacttgtacctctccaaataccgtaccagatgttttcgacagtgattggttttaacagtggttgatttcgacagtacttttaattgattttctacataatttatctaatgaattaatattaatatactttttgcatatacaaaattataattgaagtactgatttttgtcaaaagatttattgcattcacttttcgtatacaaatatctcctgctggactctacagtcaaaaaatataacgatacttttaatagaacaactttttttaaacaaactttactgtcgaaatcaatcaattcgaaaccaaaattaccagaatccttgatcagtttttgtattttttattttaatattgatatcatttgtcataataacgcattttttggaaagttgaaattttttttttgaattattgggggcccaaacgtgccggcctaaacgtgacggcccaactgagatgtactgcctgtccccctccccccgcccgctatttcagtttcagcccccctgactatgctctgctgctctctcattctctcatcctcttctctctctctctcttccccactctttttttattccctcccgaattttacgtgatctcaatccgcaatcgcgcagattgtaattttatgccgtcttttttctgttcattttccttgtttcagtgttttgccattttctaaatttatttcattcgttcgttcgtgttcattcatccccccccccagctgattcgtacttttgcttcatttaggaagttttttaaaaacagaaaaaaatatatttaaaaaaaacatttatttttctatcatttttgtgtactattttcaatctttaaccaataaaataacaaaattcgcaaatgattattaatgttggtttaaaagctacacaatcttttggctttattcggtagctttaagtgttctcaattttatttgttcattttgatgatccaatcatttatcaaatgatttgtgttgattgtgcaacaaaaacagctgagaaataaatgcgaatgtgtgattgattgggtacggtattccaaaattacagtatgcggcattctaaagctgcctctcccactcgccatggtacagtaattattttaaaatgcttctgatacagtaattcagacgggaattgggcgcagtttgacgcgggtgccgttgggatgcagttgaaagagttgaaattcaactgaaaaaatggaaatttaattttaaaaaattttaaacatttataggaaaatggcaaaaa

SEQ ID NO: 11869 - DNA, 3722 bp, Heterodera glycines
aacaattattaattttgatattaaaattattaataaaattatgattaaatgattttaaaggaatatgaagggaacaattattaaatttgttattgttacgccccaaagtccgaataggaataaaataaatatttatttaaaaagaagggacagggcgaacggggtcaaatatcgattgggagcaaagggaacaaataaatggagaagaagcaaaagaatgatggggaagggtcaacatcgcgggtatttatgggcggaaaagtgggcgtgacataacgaagggagaagggaaatacaaatgaaacaaagggtcaaaatgggcaccggacaattgggtcccaaccctaacatctccccccttgaaaagtgccgggcctccgtccatcatccgcatcctcagatcggcgttcttatgccttgtgtccacagtcggaagcttctcgaagatcatctttcgtttgatctcgtcggccatcgctgccgtgcttcccgatagatccaccggatgaggctctcttcagaccaaacccgtcaagaagaaaattcaaattttcatcttcatccggcttgtacggttgtacaccttttgccgggaattctccagtcgtgccgtccaaaaattgaacgtcgtaagtgccttcttttcggctgatcacacgtccggcacgccatggctcatcacccaagctggcgatcacattcgctcccacagcgaagaaattcttctttttgccacgtccgtcttttctgaagaatttcttctttttcttttggctcgctccgttctctttggaagcctcagttcggaatttgtccttcagaccatttctgatggagtccgacaatccaagtctgtccatcatgtccaatccgagcaaattcttggatccgtctttggaaacaaagaaatgtccatagcatgagcggtctccgaacgaaaaagttgtctttcctttgccaacgaatggacgagttgtgccatcgtggtactgagcacgttcttgacaacggctcaatttcaaagctccgatttggcgcacagtgtcctcacaaagaacagttccctcagtgcctaaatcagcaatgaaatccactttggtgccattcacatcaatcggtacatcgattattccattcttcctctggttctcagatttaaccaggaaaactcttccaacgcggacgttgttcgccgctttttcattctttcctccattcttcttcaaccatgcctggtgcttggcacacatcctttccaagtggccactcttcttgcactttcggcaaacggttttttcatgtcgacaattcctcgacgaatggctcaaaccgcatcgccaacatacgcgttgcgatcgattgctgctccgtgttcctgtcgaaatgctgctcgcattcgacgaaagatcagttcgttcgtttcttttttgccttcaatttggtcgccatcaagtttcgtgagcccatcggttgttgttcgaggacctttgcttcagcgatggtcgactggtacatttggaggtcttcgacgactccatcatactcgaccaggtcaccatccgctgcaagcttcgaaaggattcgctttctcagctcggcatccttcggtgatttcagtgccgtcaaaagcatgaggcaagaaaattgctcttcgttgagcttttcaaactgaaaatcacgcaagagtcgcttatgtctgttgataaaaggacgaaagctttcatcttcgcttttcgaggccctcagacattcatagcgatcaatccaaatggattgtggccggctgaaggcaatctttaggcgctcctctgtttggctgtagtcaaaatcgatgactttcttcggcagacatgacttgctgtactggctgaaagccacttcactcagcttcgtcatgagcagcttgacctttgcttcgtctgccagttgcggtgccgcacagtcgagggcaaaattgaagcgttccaaccaatcggaaatgcttctatcgtctgatggctcaaaacagtcgatggtcggaagcgttggcaaagcatgcgcatttgcggctggcgcaccattttgatttgccaataattgctggattgccgcagtgagttgttggattgcgtcgcccatcttaaccacagctcgtggactttcccctcagctcgagagtactcgttttaaatgacgtgtcgttcaccactcaattgttagcagcgccaagctactaaacagagtgggtgcgcgtggatgaactgaaatgtgtcgccaagacacaaaatcagcggcgcaaaatttctcaccactaacagtgtcaaactgttagcaggttcaacaaaaagttgttattatcgcctagataatagcaaatgcaggcagtcttcagcgatgacacagcaaaactcggttgctgtcaaacctcttcctccacaatcagatcaataagcccacagtcaaaagtctgcacgggcgtcgccaattgttacgccccaaagtccgaagaggaataaaataaatatttatttaaaaagaagggacagggcgaacggggtcaaatatcgattgggagcaaagggaacaaataaatggagaagaagcaaaagaatgatggggaagggtcaacatcgcgggtatttatgggcggaaaagtgggcgtgacataacgaagggagaagggaaatacaagtgaaacaaagggtcaaaatgggcaccggacaattgggtcccaaccctaacagttattaaatgttatttattatagtccgtatcaaccctttaattcgataattagatcttggtcccggcggtttggccagtaaattacaatgcctctggcttaataattttttattcattgtctgcgtattatgtattatgtacagtttcgttgcattaaaatagggacaaatccccaattttcgtttgtttgaactagagcccgggcgcccgccgggctttagctgggcacgataaattttcaaaaaacaccgggctcgggccgctcgccaaacgggctttttttagctgggccgcccgggcccgatcatatttaccaggctaaatgggcttaaatttcgcccgcgaaactgctcccatttgaaaaattaagtaattattttgcaaaatgtctttagttcaaagttttaagattacttaaggtttcttttgaaattaacaatttcaactgtttaaaaatttttagatttttctttgcggcgcctacatatgtataggcaccgtcagattcaaaatccgcctaaaatattcaaaatttgcctaaaatcagctatttttggtgaaaatcttttaaatggatgcaaaacttaaaaattttcctgtcgaccctaaaattggcttaaaattgcaaaatttagtcatttttttgaaaaaattcagaaattaaaaattcttccccggcggcgcctacctgcattaagtttatttattattttattattattaaatattttttaaaatattaaactataatcagaactggggtttttatgtgccaaaaaatttttaaaaatataaagaatttttctcgaaaaatttgttaaaataatgcttcaaattatttgtatgatttgaaattcataataaacaaatgcttttgacttaatttcccgatgagttttttgtttaattaatattttccacccaattaaattatttttaaattttcagcaatttgtcaagaaaaatgtgaaagtttttttttgttgctttaataagaa

SEQ ID NO: 11870 - DNA, 2014 bp, Heterodera glycines
  unsure (1)..(2014): unsure at all n locations
gctcgctctcttccctattcccccattcggtccctcctgctgctttgttgtggcgcgtttccgtcccatagtgacggtccgtcgcgccaaagtgccgagaaggtgtcaaccccccccccccccccccccccctccaccctgtgcacgcccagccccataacttccgtaaatctcgtnccctcctgctctttggtccgggattggcaccacatttnctagtccataagcaaagcacacaaaaagtgttgctgctctcgtatatttcgaaaccctttccatctactacctnactgcaggctgaaaaattaattataattttcgtatttcttcggggctcaatttgtcaccccctctctgagaaaggaacatttccactagcttggtactgcctgaaaaataaataataataatttacgctcccaagggttctattttcacaccccgccccactcgaaaggtgcgagcgtgggctctaatagaaggataaggaggcttcattaaaagaaatacggtaaatttggggttttttagccaaaagaaaatggccgatgttgaaatgcaagaacagagtgtgccacttaaaaatgccgagcaacaacaaccaacacaacaacaacaaatgaccacggaagggacggaaacaacagcaacaacaactacagtaacgacgacagtaaccgcgccgggcactggtgtcgccgttccccaacaaggggaagaagccccgccggcatcgaaaagcaaggagaaaaaggggggaggatggttcgcaaaaaaggtattgtaaattgttttgttcgaacttgctgaatatgctccgaccagcaaatatttacttctaattacacaaatacaactcatacgttagttagctgaaatgcgtagagttatgattaggggccaattattttcatttttgcctattgtacgctactgctttttatatttaattgatgctgaatattaatcatgtatgtaggtaaaataaattaaatttattttttcatgaattatttaattttgtttgcttaattgaattgctttgcctttttgaagtggtttgtgcccaaaaatgggcgccttttcatggtttagctagtgtccgggattttgaaccagggttgacgatgaaccaggactacaatgaaaacgcgtagtttttcggtactccaatttcggtattttccaaaataaaacctgggttcgggagtcctgccggtcccttatgggctggcattttccttataccagcgatcagttactactgtttgcttacagtaataatacgcttttaagaagacgcaaaagtcgccgcatgatggtggtgatgaggaatccgaaaaattggttagcagtgacaagaaagcgaaaaacctagcagcagcagcagcaggagacggaggtggtggtgatgagaaagaggctgcagcagcagagacaaacaatgtgaaggatgaagccaagaaaatgaagaaggacagcagcaacggcacaaagcagcagcagcaacgtgccaaatgcccgttcagtctgtgccgtggtgcgcgaaaggtggaggaggtcggccatgccgagcagcatacgacggcgtcgcaatggggcgaacgggagccgacgccgacgacgacctttcgctttgaccttgtccaacgcgattcggccaagctgcaggaagtgagtgggtggacgaaacccaactcgtactaggccaatcggcatcaaagcaaagccgaattcggaaaaattttggattatggttacagtacttctcttccctattttaaaattttatccccgaaaaagtgaaccaatttctaagacaatcgacctgggagttcatgacatttttggagagccggatgctgtgcactcaatgaatggtgtttggaaaatgtcgcttactgtttttcttacggtaattcacactactccactgttttcatcactattatgactggaatgggtcatttcggcgcccagtttcgacgccaaatccagttttttgactgtactt

SEQ ID NO: 11871 - DNA, 2307 bp, Heterodera glycines
gggatgggatggaagaatcgaagacacgggcaataaaagtgaaaattaattgatttttaattttaagctaaaattccaaatttttgaaattcgtaaccgtcggtgccctcttaatttcaccaaaatttttgcttttaaatacagagcgaaaaattatttgtgaccaattgtaccgcagtttcaatctttgctggtaaaatgcaaatgtcaaaataattttcttttcttgaaaaaactatttttagctcttgacagtttaagccccgttttttaaatttctaataaattggtttttgagctcgctgatcagtgatcacgaatccagcatctctctaacccgaactcgaataaaagccaaaatttcatttattgcctaaaatcgaattataatatgtaggagggatgcaagttatagttgctaaaaagtgccaaaataattagcccaaaatagttgctaaaaatagataaataggtgctaaaaacttttaaatttaggggtgtaaaatcgaaaattttcttcaaaaagcaaaaatattatgccaaaccatgaatgaatgagatacataattttcaaaatcaaaaattatcgttaatagaataaattaattaattcatttcttaggggtgcatttttgaaaattttcgggtcgattcataggagtatattttttgaaaaaattttatagtgttttttatttgctaaaaataaaaaactagaaaatagttgctaataactcaaaaagggtgctagtgcatttcgtaaaaaccgccacccatgagcgtttcgtaaaaccgccaaatgggtattttgttaaagcccccacccatgcgcgtttcgtaaatccgccaatgggttcgaaacaaaaaattataataaataaaaattcataacttggcccaagttcaaccaaattaatattttatggtattttttaatagctttaagtgttctctatcagaatataattttaaaaatttgttatcttatgtataaaaaagttatcgtcataaaatttcgaaaagtcttatgtcagaattttgtgtacagaacttttttgaaattcaattaaattttctgaaatttaaaggtaaatagagaattcttagagctatcgaatatataaattaatttggctcaattgcattttatagatttaaaacattgtgtttataattatatatgcttgaccattgcaaaaaacctagaatgttcaatgatttataaatttttttatacttaagataaaaattttgtaatattatattctgaaagaatacacccatagctattaaaaaataccatgaaatattaatttggttgaacttgggccaagttatgaatttttatttgttacatattttttgtttcgaatccattggcggatggatttacgaaacgcgcatgggtggcggtttttacgaaatgcactagcacccttagcaattgcactgacctttggcccattttcccggccaccgttgccaatgacaactttctttctatcgggattcccttcaataaaaaaaggaaaacatgcttcagttctaagaaataaaggaccattccaaaaataattttcttaaagattttcttggctctatcttttttgtttttccgttttctcaaaaatataaatcttttttttgcatatgtgtgagcatccgcgcgaaggacagcgccaaatgaagagaatgtgagtaaatatagttccaggctatttttggcaacctgagttttttctgggcctgatttttgtatagaaaatagaaggcccatttttcaaaacgagctctaatcctccatttgcatgaaaaaataacaaagttttggtttcgggattccgaaatttttcgatgggattttctgaataatctgaaaaacccaatcaccataaagctagacatagactcgaatacgatggcaaattttttttcaaaatccactacagtaaattatgtgccgatgtttgctacgacgtgctcgccttctttgggcctgtaatgctcgggctcggaattgcgctggtcagcggcaaattcaacgcggtggccgaccatttgttgagacgaaaactgtggacagttggccacattcaaattcgccgtgccaaggacggcattgattggatgttggacattgtcaaggattaccaagacgcgcagaaagccgtcacatttcccgtcgccgtgtcaccacttccgcttggcataacagatttcaaaagcatccaaataaagtggaatattttagtgcattcatatgagaaacaaatatgactgtgaccagaaaaaataaagtgttccaaa

SEQ ID NO: 11872 - DNA, 2322 bp, Heterodera glycines
tggatgttgcacaagggacggacgtcacaacattatcagtctgttttcgctcacatcctgctctcgtccgctgtacggaggccggcttttacaaaccgcacgccgagcagttgacaccaggacgcgacgactccgagcgggcgctcatgaccgaccaaacggcattcaaattgccgaaaaagggagtccccctcattttagtccatcagaacacgcccgcgcaacgcgacgaagtctccacttcttcggccaatcctggccagaccgacacggcgatgagagccctctggcgtttggcgcgggccttccccggaacactcatccgctgcatctgcttctacgccgcgcaagccctggagatcgaacggttggtggcccaacaagaaatcccggacattttagtgacaacagcggacgcgacacagggccacgagtcgtcacttgccgtcctcgtcacaacatgctccgtcttcgacagtggagcagactctcagcctttctgggctgatgccgcgcgggtggacgtcgccatctctcgcgccagccatggaatgatcatcattggcgatttgctgctgctcaaccggacggagacatggcggcgctacctggaccaagcgacaacggaaacgacagtggtcggcccggagtacttcgacttcgagcagttcaacaaccccgacaactactacgacaaggacggacagctgatctcagccaacggcggtgcggtacggtcagagcatttctacagcaagtacggtaaaaatgtgtggtacaacaactccggtgagtcaaggggggcggagaacagatatcaaccttatcttcctcaaggtggcactcgggaacgcactcgtggcaaagcctcaacttctggcgcgcgcagatgaatgaaagccaagctgtacgacttcagccatggtcggcaactgcgcatggacctgctttcattcccttcccctcacgttttaccattttccttttgttttgactctctctttctcactctctctcgtcatccatttcttaaaattatcattcattttgtctttatttccgaactgttaatggcctttctttctcccaattcaaatttctcaaaaatgcgtcggtttcctcacactttctctgacccattctctctcttctctcatcatgcttttacatctcgttcccaaaccggaatgacccctggttgcttttctccgatttcccatgccatccatctgagatgaaggtggaccactgctcattattgtaatgcgcagcttggccgtggaagttcggattggagagatgaagggcgaagccgagagtttggtccattcattcactttcacttcatttttcatttaaggatcggggacgatcctaaggaaaggggggagttgtaaggattattcgacgcatttccctcatttaattattccttattggccattatcaattcaatcacatttatccattttcacacgtttttccttttctcattgtaatgtttctccgcccattctcttcgtatttctctttccccagtgatcagttagtcagtagttgtgatggaacagacttcaattattattccgatttctcgcttcgtttaaatccaacatcgaatgaataaacacatctttaacagtcaatgagtcgtttgggggttcggggcttggtcaaaggcgccttggcttttccccattccctcccaaactccatccgggataaacggtgcatagttggtctgggggcacagtgcgcatccctcactataataatttaagaaaattttgtaataaaatttctgtaaattatcaaatattgttgatttatttgaattaataggaagcgagtttagcatagatcaagaaagaaatttcaagatgcataagtgtttaaattgtgaaattgccaatttggcattaaagaaaattaaattcgcagaaaatatggaaaattgttaaaatgtaattaaataaatcctaataatcaattgtaacaaatattttatcttttaatattacaatgtttcttttattcagtctttttaaatctaaatttgttatagaagaaaatatcattaaaaaaatcatttttcttggttttttttttgttaaattttctcaacgatcactttttttgctatgcatttaattgtattatcaatagcttattcctatcaaaatcaccgagttttaatatttttattttaatatttaaaaaaatgatttatttttatggaattgccctttttgtattgtctttttgtacacattgaaaaattaaactaccgttcacgccgtagaatcacaaatctttcattca

SEQ ID NO: 11873 - DNA, 1458 bp, Heterodera glycines
cgcagaatgttgaccagctcaattggctgaggctccgtttggagcgcgcattggcacttttgttgcccgaatttggccccttccgttgtctgccggccacgggccaagccgaggaccaaaccaatgttggacgacaattgcacagcgcaatccggtaggaatgtaatgccaaaaatttgggggggggtccaagatttgtaatttttgggtttttggcatttattgcgttttctccaacaaaattcggtgctacaaaatggccaacatgtacacaaactctagaggaaaaattggcatcgctttcaaataaaaaaattttggaacttttttggcattaaaattgaaaataatgatacaaatgacctttaggccctttaagcccattgaaatttttttttaattttcatgccaaaatctcaaaaaattactcaattgccgctttaaacccgctttttgtccagccatggcatggacaatttgctgctgtttccgctccaaccgcagtgccgcacccgccctttgctcgcggccatccgaaaagccattggcgcaatggcaaaccaaacgcaatgccaacaaaaacaagcggaactgacgagtgggttcgtctgtgccaggcaattcgttgtccgcaattcgcccgtctcattttcgctgctcatcgcggacgaccaaattgcgtggacccactgttttgtgcaagtattgtacacatttaccatgccactttttaatggggataggtgctaaaatcgacggaaattattattattttttaatttaaatgaattttgcatgcttttatcagccgacggagtaagagaaaacagaaatttagaagtgggaagtgaactggtatttttgaaaattgagacaattttcttacaactaattgctttcgttcaaatttttttacaatttccaccagcgacgtccatcgattgccaaatttgataaaatttgagtttttctcatttgtggcttacaattaaaacgtaattattagcatttaaaaacaaaaaaagcaggcataaaaagccaatttttcagtattgggtggagcgaattctgcccctgttcgccgattatggtgccatcattttcacggccgtccgcccaacgcccgtcgagcagctcgaacccgccgcacgccgtgtgatgcatgcgctttatcggcattcgccgttggccaccccctggcgctgtgccgtccattacgcgtgggatcaaccgtttggccattgggtggaccggttggcattgatgaggtgaccctgactgagttttaatagggtacggtgcagtggagtttggaactcggaaaaaatttttaagaaatttcaagaaagtttttgaaaaaattatcaataatttcaggaaattttctgaaaaattactatgtttttcaaattcctaaaacatagcctgaaactttttttttaaaaaatttctttaaat

SEQ ID NO: 11874 - DNA, 4244 bp, Heterodera glycines
ttatattttctagggaacatgtttcgcgcatttggcgcatagccagaaattatcaaaaaatgatgtaccgaaatgcaaaagactgtgttttttacatctgttacacatctcgtaatgacaggggcagtaatgacaacacttaattttatgtggacagttcattttttcaatttaattttatttttggttgctatttatagaaggggtatataaagggagtgaaaggaccatttgattggtacattgtatcaaaaaatgcaaaaaccgataatcgtaaatataattgctctcgctaatctcggtaccgggattaaactaaacgctctgatgatcaccgaatgcgaatttaaatataaccctagaaaattcaatgccgcggttatcaaatgtataagccccatcaaagccacggcattattatgggaatccgggaaaatgatatgtctggggacgaaaagtctgatagactgtgaaaatgctattaaaaattttatagaaataattaagggctcggggtgtccgggggcttcttacaccggacacacggttgaaaatattgtttcgacctttaaattcggacgtgaaattgaactgaacgagtttcgaaaaaatcgtcgtgcattttatgaaccggaaatattttgcggtttaaatttcaagcggggtaaaagcatgactgctttaattttctggaccggtaaagtcgtaattacgggaacaaaaaacaattctgaaattgacgaaatgtaccattatatgctgccctatctgaaaatggctcaaaagaatttaaagagacgataaaaattttaatttattgggacggtcccccaatttatggttctgttgtgtatttattaattatcgattactacttgcggcatcagcatcggcggggagggtgggggtagtgtaattatcgattaatttgcgcggcggcacatcgacggagcggatgagagtggcggtctcattatcgattttttttttgcgcggcggcgacatcgatggggagggtagggcggtgtcattatcgattttttttttgcgcggcggcgacatcgatggggagggtagggcggtgtcattatcgattaatttgcgcggcgatgcatcggcggggagggatgggttgggcaaaaaaaagcacccgtgcggttttgggaaatcggatttgggtgggcggcaacttcaaagtggtccaatagattttggttctgggcggtaactttaaagtggtccaataggtttgggttctgggcggcaccttcaaagggctgcacccctcccataggctttgggttcgtgcggggcggcaacatcaaagggctgcgcccctcccataggcatgggttcgtgcggggcggcaacatcaaagggctgcgcccctcccataggcatgggttcgtgcggggcggcaacatcaaagggctgcgcccctcccataggcacgggtccctgggcggcaacatcaaagggctgcgcccctcccataggcatgggttcgtgcgggaaacacccgtgcgaaaccgttcgcttttggtactttatactactgagggcaaatattcacaaactctattattaaaaagaaggcagctttcatgcaaaataatgattttcaatgaaaaaaaattctcatttatttctgaaaaataatttttggtgccaataatttgtataaaaatgatcaatatgacagtaattgagccattgatttttagccactcaatttattagctaagtgaagaatctacttatgaaaatgggttttattttatagccctaagagtttagaatataaaatttcaaaaatttcgtctagtatgaaccaagttatggccaaaaaacacaagcaaccaggttttcaaacatttttggccctaactttttagaaaattaattaaatttttgaaatttgacaggctactagagaaaactaatgctatcgaatgatatcacgagcagttaattttgttggttccaagaaagttttaaacagaatttctggtgatcgaaattattttaattctaattaaaaaaaaattttagttataaattattttattttttattttcttgctatcattcgaaatacgaaatataagtctaattggtaaaatcaatgttttaagcatataaatcccagaaaatctcattctttatcattttcaccctcacaattaatacatttcgaggcgttcgggggtaaaattagcctttgccggccctctttctttctcattttttttttgaaaaatatcacaaaaaatgcctcaggaaatagactaaatttgaacatatacatttgaatttttaatatttacaggaccctcactaaattttaaaggaggatttacaggacttttcttgaaaaaatctcgttttttagaatacagtcttgtaacaggagacataaattcaaaattccgaccacaaaaattattaatattgttgattaagttgattgttactgctaataaattcacaaatggtaaaatcaatatacgaatttgtttttgttcgatcgttttcatacgacattttcggcactttccctttggtcccaatcagttttaattctgctcaattagtggcagcatcgtcatgcttttccgtgcaaagaaccgattgcacatccaaaataacaatttccggacggtcagcaccgttcactgaaatgccggcagacgcgaatgatttgcccgggtaaaggtgcacattgttgggcaatgtgaacaactgttgctgatcagcagtgccattgtcagtggcaagcggaacgatgccccaatgatttgccaattttgactgacaaaaatatatattatatatattagttgtgaactcctagggacaccgcaaagtacaataaaacaaataattaaaatatactcagaatttttataatttattttttattttaattgaactttgactcaaattaatacaattaaaaatgaaaatgtcaccgttttcggcactttcacatggaatttgacttggtccaccagcttaaagcaagtgttcgtaaattccaacgagtaatcgctgcatgtgtccgtgctgttggtcaatttgagttgaactgtgatcggatttttttgtgacagcggaggaggcatttgttgattggagagcggaagacacataaaaatccattaaattgttaatatcttaggtatgcagaaaatttataaaatattattaaattttagagaaagtcataaataattattaattttggcttagtatttttaaaatttcttaataattataaacatttattatttaaaacgatgtttaaaatcggttttaatttttcaattaaaatgtcatacatttactccgatttaaagcctaacaattgggtaattttgattttacagaaacaaaattgaaatattttattagtattttgttgcagtttttgttaattgaatagatatacaaaaattaaatatgctcaccttttatgcgattgattgtaagatggttgtgacaaattttttgattgaattttttgcaaaatgatgacaatttttgagtgagcgagaaaagagaaaagtcttttcgctgatgaatcggtgattcatccatcacatcgatttgtcgtcagttatttttttcaattttttaattattttatttgtttctttgctcctccgcctgtcgttttttatcccattaaatgagaatgactcatttcatttgaagatgttgttgaagaaatgtgctgacagtgctttctcctaacagtctgcttaaaaaattaaaagtttcaaaaatcattgacgtattatttattatcactgacttttttttaaactgatgtattttcactgtgtgtttttaactgatgtattttcactgtgtattttacgctgatgtattttccacggacgtattttcattgcgtctttttcactgatgtattttccacggacgtattttcactgtgtgtttttaactgatgtattttcactgcgtatttttcactattttctattgacgtattgtcactgacgtattcttaactgatgtattttcactgatgcattttcactgcgtttttcacttatgtattttcactgagtatttttcactgatgtattttccacggacgtattttcactggtgggtttttaactgatgtattttcactgagttttttcattgtattttctattgacgtattaccataggagtatttttaactgatgtattttcactgagttttttca

SEQ ID NO: 11875 - DNA, 1976 bp, Heterodera glycines
ttttttatattaatttaatttatcaagcaaaccaaaggcacattagtgctcttacatggtaccaaaaaaacaaacaaagaaaattgaacaagaaaaaatacaaaatgaatttagtaagaaaaaagaaaaaaaaataaaatattatattgtgtaaatatggcacagaatattcctagtcagatcacattgcttttcgaaaacccctgaattcctttgccttattaatagggatgggaatttaagtcaaatgactttttttgctgactttttatatttttggatttttatgacttttttggtgacttttttcaccttttaaggcaaaatgacagtgaaaaagttagaaccaaaaaaactctggcgctaaacgactccgaccgtcatttttatgtataaatgtaagcaaaaataccctaattttctaatgtatgaagaatgttgattcttcagtttgtgattttttgttccttcgaaattttaatataattatacagaaaatcccaaaatatataaaaatatgtaaatgaaagtccagctttttgaatgaaaatacaaaaaaaaaaaatatatatatataataaatatatttcctggtgtcatgacaactcgtacaaaaggcaactcgtatacacagcggcccaattttgggctccaagtacaattatgctggatttttcgtcttagtggtctgtgagttagtcaccaaaaggggggtcccaggttcaagtcctccctatgttgtgtgttaatttcaatttcttcttttaaagaagaaggcagaaatattttttattaataaaagttttcgtgtcaaaaaaaaattattttcaataagagttagttacgtacagcatcgataatttttatgaaattttttagcctataactttgtcaatactagatcaaataaaaccattttatgctcattttgaagggaaaattctagagaatattgttagttttatttgatttggccttaattgcgcacttggctaaaaaagaattaaagtattgaaatgtttgccatgggaaaaaattttttcctgtgggtaactttttttgaaattttgtataggcccatattttgtccccctctatcgaatcacagtttattttttagctgtctagtttttaactcgagatcggctcttctatttttacaaggaaaaatcccaaaaaaattttaagttttgcaaagttttggcgttctgattactaaataaataataaacctatttgcactgagagcccaaaattgggccgctgtgtataattgcttaagttaggccggtgtttaggcctaagctttcggctaggcctacgcttaggcttgattgggtctaggcttatgattagcttaagctttattttgtaaaatatgagttgccttttgtacaagttgccattgagccattttccgattatacaaaacatgcagaagccataaaaatctcatccctacttattttatttattaagtaattaatttttctctattttcagtaaatttatgagttcaaagcgcaaattacaggtttcttatttaaaagattggccattaaaaaattgacgaaacccaactcgtacttggccaacacgtactgccccaactcgtactgtttgacaaaaaaatcgtcataactcttgcaaagtcgactaaattaaactttcttggtgccattcgataactcttaaagttctccatctacatgaagcaaaatattagaaaattttattgcttttcaaaatttatgaccaaaaatggtaaaaaaaattttgttaattttttcaaattttttattctttaattttttcacatttcaattaattgtctcccccattggttcatttccaaaaggtaataagcggctaagagagagaggcgtgcgttgttccaacggccgcgccggcggcggggcgcggggtcgcgcaagaattcggcacaaattaagatagcattatttacaaagaaaaaa

SEQ ID NO: 11876 - DNA, 1894 bp, Heterodera glycines
caaataaggacgacttcaatcacaatcagacgcaatgaaaataatggtccatttgccggggtactattcaaatggtgcttggaaaacgtttttgttcgaaaatattccggatccacctgcacacattcacaatttcggagcaatctttgtcaggtctgaaataaattaattttaaatttcaagcataaatttccaatcttttttcagattcattgaccaaaccgctataatatttttgcaccgaattataagcggaatattgaacacggaaatcgttttggatctcggaaatatttaccaaagcgttgccgcgtaatttgcttctttttgggcactgctcaaggacagaatgattggcttaatcttaaatgaagagtcttgcagttttctccgccaaagcatcgcacctacggcacttctttcatgccttaaactgcacattattgagggcaccgaattaatcccggagttttctcgcaatgacattggggaaacaactaacgaaaatgaaattaatcgatggcttgtgaagcatctcacaaatacttctactccaaaaatttacaaatgtcaaactgaagatatcgctttcaacgtttccgcgtttaagacggtattatgaattaaataatatattatctttatttttaaatatcgctataggagttaaacccaacttttctttttaaatttaaaaatagaaaattatttttaagggaaaaattcatgcacctgttgatttaaattttattggagtccaaaatgacgagtggagcagaatttgttttttaacagatggtacgcatttcacgttatttattaattgaaaacaattttaaagcaaatttgcgctagttaaaaagtgacagattttgaattttatcaaaaacctaagggggggggggggtttgtgttttgcaaaatttttttgagataaaaaatcgtgaaacactttttactagccataattgtgctgttaatgcttaatattatcattagtgtaaataaacaaaaaaaaaagtttgaccaaaaaagtgaaaaaatttttaaaaaggcccttctttaaagtggcgctaatttttctaatttgcaattagttataaagcataataatatttgaaggattataagaaagtattatgttttttaagtacttttttgtatataaacccaggcgttattattataaattattatttttatccaatttaattttactattaaataaattcagcttttgctttcgccgctgacctgaagtgcctgtctcgaaaaacgatctttttcataatgtatttatttttattccaacacatttaaaaaagattaaacaatcatttaaaaaactactttagtttcgggtcagattccggctcacttatatagattgaattcatttcaaaattaaatgagcgttttattgctatgtattcactctccgaccattcgttttctttacaactgattgagtctcttcgcaatacccaaagtccattcggattgaaatggttttcaaaacgacgaaacgtcatccttttctcgtgttcgcgcgttgtcccattctaatgggttcccagtgaaattaaatgtaaaactaaaatcaaaacagacggcataactgacgggcaattccgcattgataaacacctaaaggcgcaaaaattttaaaaacagtcaaattttgaaaatatcatttttaaatcttccaattgcctttcaatgttggaaagacaataacatttgagcactttgggacgtccatcgtcgcgcggagtgtgaagccacttggacaatgcctggttttgtgatgcccgggggccatcatacgacggactctcgggaaaaatattgcggcaataaatgactctgagattggcacagccccgagaatgga

SEQ ID NO: 11877 - DNA, 3226 bp, Heterodera glycines
  unsure (1)..(3226): unsure at all n locations
aaatttattttaaaccaataaaaagctaatgtatataanttcaaatattaaagcannttaaaaaanttaaataaaaaattaattatttatttactattttcagaagtgtttttatgcttttatataaagtaagaaataacggtcaaatttaattttattaggtttattagaggtcagaaattcatataaaagtttatttgaatagattttaaatgatagacaaataggcatttttatatgggtttttacaatataaaggttcgtagtaatattttaataaaattctattaatttaattttaatcccaattttttgtaaattataggaattttaatttttcaccgttttatttttcactttgacagatataatccaacaccttgtcatgcatgaaatatcccaataaatatttcctttctaattttattaataattatttaattaatattattatccatttttcgtcttcatcacattcgacacttttgttcttctgctgttgtttctgcttttccttgttttttcttctctgaatttttttttgtatttgtgccaaaatgattaattggaaaatgaacacctcaaactttaataaaagaagcgttttttaggtgccgtggacttcctcccttgaggaatgctttaaattcataaataaaaaatgattttaattaaaaaatattaaaaattgccaaaattcaaaaaaaaacctttgcacaagcacagtttgcttgacttaattgtccgcatcctgttgaacaaagcccaacacacagcgtaatttcatcgttccaaacgcattcttgcaaagtgtccaatggcagcaataaaagcagcaaagccaacagcagaaattgtttggacattttgattgtttaaattatatttgtttgatcaattagaagtgattgggatggaatggaaaagtgttttgctggaaaattttgtgaaaattctcaaaaatttaattggaaaaatcccaaatttggttggaagataaagataaaattttaaaaaataataattttgttatttattcggtctttattatactagaaaattttaaaaaattctcaaaaatttgattagaaaataccaagttattggcgctacttgcaaagagggcctttttgaattctatcaaaaacaaaaggggggacccttttgttttgcaaaatttttttgagataaaaatccatgaaaatttgttatccgagggttttagaggtcgctgatcacgaatctgacatctaattcgaggtcttggacccaaagaaccccagggaataatttttcatgactaaatattaaaaaattttgcaaacaaaagggtccccccttttgtttttgctttttgataatttcaaaagggtactctttttaaatagcgccgcactttttgtgttgtatattttcccaacctcttttttcattttgtttttttttttttgctactttttcaaattgtctccattccttttattgtataaatttattctaattagctatgaatgatgaatatatttgctgagaaaagctcgtcattagagactcctttgaataatttttgtgtggttttttgtggacttaattctataactttttccaaaagaagcagggagatgaaaacatttattaataaaacggttaaaaaatgagaatcaggataaaacgagcaaatcagctgcctttttaatttatcctttaaaataaataatttatttgtgaatttcatgcaaatggactgtctaatcggccgcttgtgttcacaaaaactgcctttatttgcgtgtaattccaaagggacgcttcgccattctcacgcccataccttaagacatgaaaagtgattaattaaacgaccttaattagagaacccggactgattgaagcctccgaatgggacattcgggtgcgtgtcgttgtacgtgttgatgtacacatttccggcgttcatccgagcggcgaattggtgggccctggccaaatccctgaagggaaaaagggcaaatttgacacaacaataatcaagtaaagaaaaatgcgtcattagtcactgcacagactttgtaaaaatgccaccggccaagccgaactccgtgtcattggccatttgaagtgcctccttggaattagcactgattatttccaaaagtaatccaatccttcgtttttcacctgctcatcgtcaaacggaatgataagcaaaaccgggccgaatatttcttgttggtaaacagtcattttcggggtgatatttgtgaggacgcacggggacagaaaatagccatgctcaaggcctggaaagtgtgaaatgtgcaggcagattcacccaatttaatattcggacttagtccaaatggcccctttttactggggtgattaacgacctaattagtccaaatggtgtgttttaatgaccctgtattgtggtgacccgttcgccacccgtcaacaatttcgcgccatcttcgtcgacggcggttcgtatgaattggcgcactttgtccatgtgctgttcagaaatgcaggcgcccacgtgggtggactcgttgagcgggtcctaaaaacagagaatgccaaaacaaacatttgcaattgtcaactaatggctgctgcagttttctatctgcctctcccaacctttggccatgacaattttggcatttctctcccaatttcttccccccccccccaaatgcccaccccaatgcgcatgttctccgtctgatgcacaatttggtgggtgaactgctccaacactttgcgctgcaccaacactttggacgcgttgctgcacacttggccctggctgagaaagttggccaacaacgccccgtgcacggccatctccacgtccgtgtcttcaaacacaatacacgcgcttttgccgcccaattccagtgtgcacggctaaagccaaaacgtgacttccaaagatttaacagacaaagcatttcaattttcatttaagccacaaatgggaaaattgggtaagatgaaaacgaaaaaatgacacaaatttggtttatgtcattatgtttaccagtaaagaaaaaaaacctttaaattgtcagtggcacacgcgcgggcgatgcttttgccggtgccgacacttccggtgaaggaaatctgtggaagaaaatgggttttcgatttactaaaaagcctttttactctttctcgctcgttaccttttttatcagtcggttttcacaaattttcg

SEQ ID NO: 11878 - DNA, 720 bp, Heterodera glycines
tggcgctagttataaagtgatagattctgaattttatcaaaaaccataggggggacccttttgttttgtaaatttttttttggataaaaatcgtgaatatacattttattcaccataattgtgctgttaatacttaatattcatcattatgtgtaaaaaaaacaaaaaaaaaatttgaccaaaaaaaagttgaaaaaattttcaaaagtttcctctttgcaactagcgccaaatgcccattcggccttaaaagcgcaccattccgcggttcgtacactgtgaattcgccttcgcctcggcttttcgtcagtcccgtccgcgcaccggcgacaaaatgaagcctttccaaaatgtcgggtggaatcgaaaagcgcttcatcgttttaaagcggaaaaaagggcaatggtaaagaattgatgtcccgacgaaaaaaaaatgtttaaaaattcgcagctattttttctaggcttaaaaaatgcgctgatcacgaatctgaactcagattttgaaaatcattgatttttatctatgattttttttcaaaattttaaattatttaaaaaaaagttagcaacgaatttgggcttaaaaatattctgatcacgaatctaagctctgattatgcattaaccggtacttgtgtggtttacctgacagatttcacatacattttcaaacgcatataaaagtattaattaagaattgtttttttaagccat

SEQ ID NO: 11879 - DNA, 3248 bp, Heterodera glycines
ggccaaaaatgaatcgtccttcgtccgcctatatatagggaacgattcgaagaaaatgctcacattttgcgtctgttagtatttttatcattattttctatttgccaattgcatcaaagcatcgttctgctgctccttcatcgaccacatcaaacggaagaagtcatcacacggagtcatcatggagaagatcgtctacttaaagctgttccaaattgtgctcactttgaccatcttttggcaactcatttcacttcaccaattctgtggcactttgccgacccaaaagtgctgtcgctgttttttgttgccaccaattcattttaaatttatgttttcagactttcctctgtcacatccgtgcgggcaattgtgaacgctacacgctcatcggaatggactcagaaactggcgaattcggctcaatgtacaacaaattgcacaaccaactgtggatgatttgcaccaatggccgaccaatcgaagaacagcaacaccaattcatggacgaattggccgcgaaattgcctcccgctggacgccattgcattccgataacagtcaatcagcaaagttgatgcaaattgtgctcactttggcattcttcaacagctccaatggacagtcaaccaatgcaccgcaataccaatactttcacttcttggtcgagaaattgccacccgccggacgtcattgcattccgataacggtcaattagcaaaaagctatcataacgatgaaagcaaatttcatttgtttttcagatttcgccttttgaatggattggcaaagacataaacgccctcaacaatgacactttgttatatttctccacccaactgttcttctcattggtgtcgcttggcgttcttggctatggcatcatacacaaaataaatgttaaattaaaaacctccattcttcagatttgtcgtgtccaaaaatgcctttcttttcgtcacaccccgttatctttttgctgccagttcaatttctgctgattgttatcatcgccgctgtgttcatcattgtcagccaatgctgtggtggcggttccaagaaaaaacaacaggagcagcagcaggaggaacaagcgcaaacgcaacgtggcaaccagcaaagtgatcaattgaatgaatcggaacacaattttactcttttctcatttcagagaagaacaatgacggaattataacgaaatggatgaaggaacgtcagaagtgatcagcggaatgagtgatcaaaatgactaaatttggaattgttgcatggaaattgttgctttgatataaatgcgtccatttatttaatgaagattcttcttttaatatgagatcatttctctgtacttttaaaaacattttgcacaaaatttcagtcttttaaaaaattcaattattggccacattcgctcctttcatcaaacacaaaaagttcactcacacttttgcgccccgcccggcgccgggggcaacaagtaacagaaacaaatttctgccccccccccccgcccggccatccggtttttgtgtgcattagctgcgcaatgtgtcgtccgtccgccctgcacacctcgccgccgccgccccccgaacgctccactctctaaaaatagggaccctaggaaaatcctccagcaacagcaccaccgatcagcttctagcagcccccgcggggccgatcggacggccaaaagaatgtgttctctctctctctctctctctctctctgtgtatgtttacatggaaaagcgtcagcgatcggaggaccgatgggcccctggggggagacatggtggacactgtgtctgctgtccactactcaattaccaccaccacctcaaccacccaccaaacatgtgaagatgctgatcgcgatcagcgatcagaaacagagaccgccgtcgggagtctcgagagtgcggacgaagacagagtgatcagaacagataggaagttagcgaacgccgcgccagcccagcagcgcgggggccggatgagggccgaggagaagcttccggccgggtcacattgtcgcttgatcaacccattaggatgtttgatctaagctctaggcactgatcagtagcagaagtctaaaggaggagtcattccgggctataattttcgatttattatgcttaatctcgaaatcatccggcactatgatcccggatgggcacttcgagaatgcccgatcatatttttcacaatttccaatttgaattaaaaaaaattcataatttttgattcgaaaaaaattcattaaatttctacacactcccaagtacctatttgatcattttgtggtcaatttttggtgtgtattagtgtccctccctcacccaactcatgacaattggcttggtcagtctcgagaatgggacggacccccggggggattatctgttcgagaaatgacggcgatttgcgcaccttttgtcatccattagctatcaatcagtcagtcgttagtcaactgctgccggaaataggctgctggacatagcgcaaaaaagttgtggtcactgcactgatcagacaaaaaaaaattggaaaaaattttgtccggattttttcgatcagaaaatgtgcagcaatactaacatttcgagatatattttctttaaaattactaattatgaatatgtaaattttcaaaaatcgattaatttctgtacaatttaagaaaaattaaaataaatttaaaatagttaaaaaaaattatttttaaaattttcggaatcgaaattattaaaaattgaaatctctagaaaatttaacaaattttcaaatacaattctattcaccataaaattaatgtggacatgtattttagcttttaaaaaaattttcagaaaaacggaatgtcagtaaatttgccaccccctcctccggcaccccctggctttgttggcggattttcaacacacccgtacaacaccagcactaacaacaattccatggagataccagagccgttgtccttcaggcctaggccaagcctgagctcgtaaattttcctggcttgccaattttttgatttttttttgtttgctagcgccacctcctgcacgtccgacggcttttccacgtttgacgaagcaagcttgccttctgcggcaggtggtccgggacaactgcaacggatgcatgcagtacagttgggtgctggtggtggggtacatgcgcaggcggccgctgcacatagggtgcatcacggcacaccgcgtgtgccggaggatccgg

SEQ ID NO: 11880 - DNA, 1858 bp, Heterodera glycines
  unsure (1)..(1858): unsure at all n locations
caattttgagaagctgttgcccttggcctcctctcttttagaggccgatttgggccagctaaataaattattggcctgataaattgaattatcagccatatgaccatatagagtcctgaaaacaggacttttaatatggaaaatgcaacaaagcttatgctcatgaatgataagcaaagtccccctgctaacattgatgaaataaatgggtaacaggttggattcgctaaatgttcaatgcaaaaatagcattcgaaactgctggacataaaatgtcctttttgaacacgtgtttggaatccatccaaaaatgaccttggcattaatagtcatttaggaggatttcctttggaagctcataagagaggttctttacattctcatgaatgtaacagttctctgcacagcagagctcaactttattaatttcctttgggatctttgctttaacgcgtttgttaaagcaaagaagattgcactcagtgcattgattggtttgataagcatttgtttctgttccccccttaatgggaagagggaacaaacatgccaaaattacagtaaacgcccattatttgcaaaatatggcgcactgtacaaaattgagggattgcccctctttgccttccttcatgaaagtaaggtgagctctgatcctcaaaacaaagtaatgatactttgagttggatcatgggtgctatgtcattatttaaaaaccatcattatgtgcgttatttaaaaaaccatcaaaataaaaaattttgctttctaaaaagaccaaatttttaatccttgatatcattcgataggtctaagtgttctttatgagcctgcaaaatttcaaaaaatttcgttaagtttaaaaaaagatggccaaaaatgttcgaaaatcaaggtttttcgagttcctcgagctataacttttttgaaacttaacgaaattttttgaaattctgcagactgatagagaacacttagggctatcaaatgatatcaagaattaaaaatttggtttctttcgagcaaagttataaataatttttcgacaaaaatttacataatgatggttttttaaataacgcccattatgatggtttttaagtaacgaccctgcaccatccagagttgcatttatatttaatccagttattttgaaattaattttagcacaaaaaggattcgttttaaaacgcatttgtttttgacgtaccatcacgattttgcgttttcaaggacaacctttccacacaaaaatgagctcatatggtaatcgtcatgatcgaaattcatagtactattattttttctgctaatagagaaactaaatacggctcataattagccaaccgaacgtttaaaggttttttaatactatcaaatgatataaacaagctcaatttgttcgtcaatgagacaatataaatgaaaacatagaacatccaattcaacaatcatatataaatgggaaatgcgcctttcactcttcacattttcttaattttcatcatcgttttccagtttttcgcgcaaaacatcgatcagtttgtccattgtgacaagcttaattaaaaacacattgtttactttccaattcccaatcgaacctcctctcctttgtctttggccgggatgtaacgcaattttaccgaatttttagcaatttcttccggcccgaggataagcatccaccggatttgttgagtctcacaaaatttaatttgttgtaaaaattttacgttggccttataacctaaataaccaaaatgtttatgtaagacaatcagggtggccatttcaaaggcaaagtccgaactanaagggaaatgacagacatttaaatgagttngctaaagacgac

SEQ ID NO: 11881 - DNA, 1449 bp, Heterodera glycines
  unsure (1)..(1449): unsure at all n locations
tataaaaaaaacaaaatatantcttctataaataatgttttttaaataaaagaaagtaattttttttaataaaaaacaattaaataaaatataataatatttcttcaggaaatgaaacaaatgtttgccaaggagagaaaatataaatttattattaaaagagaaaatgtaaaatgatttataaaatagcaaataataaaaaataataaaccgaaataattcaatttatgtaaattaattaataattatacaaaaaatagaaaaaaaattagtcagcactttttcataggttttaaaaatgcactttttttgcttaatatccaaattataattacataaatttaaaaagtaatacatatataaattaaaacataaatgcgatttaaaataaaataaaataaatgatgagatggaaaagtacaaaaattaattagcaacggacaacaattccgaaagccggaggagatctctagtcaagagtttaaataaaaataaaaagacaaaatttaattgtgaaatttaataaaaaggaacataattaatttttaaaataaacaacagcaaaaaattaaacatttattaattaaaaaagaatgttaaaaaagcgaattaaaccatgaaaatgaaaacaattattgttatttaataaatgagcaaaaaaataaactcaaatatcagctaaaaatggataaaaaacaattttaatttctaaaaaaataaaataaaatttcggcattaattttgttctaaatgaattcacaaaaaatgaacaattacaacgaaggagaacattattcaagacataaataaaataaataatttaataataaaaagcataatatgtttttgctataaatatatgaagtaggacgggtccgtatattttggcaaaaatttgaccgggttttaacgggtcatgaaaaacgggtatgggtccgggctcagcatttcatcaggaccaacctgctgatgctggaaaaattcataatttaatatttatttatttatttgagcgaaccgcaaggcatagttgcacttatagcggaaaacaaagtaatgaataccattagaaaaatatgatatggtcaatacggctacccgacttttggggatttgcaacttgggtacccgacatttggggacccgacatttggggacccgacatttggggacccgacttttggggacccgacatttggggacccgacttttggggatcccgtcatttggggacccgacttttggtgacccgacacttagggaacccgacatttggggacccgaaatttggggatcgaatgtcttttggggacccgacatttggggattttattaaaacaaaaaaaaatatttaaaaatttatctcaaattagacaaatttacgactgctttagccagagttaattcaaatgcaagaaaagacaaaacaatatttttaaataactctgt

SEQ ID NO: 11882 - DNA, 3658 bp, Heterodera glycines
atacaaaagaaaaatagttcaaatagcatagaaaaaatcttctaacagagaaaaaaatagtatggaaccagagaaaaagagataaaacgggagaaaatggagaatgagaagcattcaaataccacagaaagaaagacacacgctgtggcattctctgcctaaacgcggcgcggttcgattcgtcacacgcgcgcgcgcgtacgctcacaattgccgggcggtgattggcggcggcacttcggcagcgatgggccggccgcttccgttaaccattcgcctgccggacggacgggacggcggggagtgtccacaaatgtcccccgccccctccccccacacattcccctggggggagggcattctttgcgcttcgccattttcttgaaggtcagtggtccgtcctccgagcgaccgacccattcattcatccatcattagcaaaattctgcccccccccctcctatccccccgcgagggagggacggagacgggtcaataatgccttgccgctaccccctactgcccccgggaccccggaggacggcgaagcggagatggtttaatgccatgccgcttcccctactgcccccccagctcccggcggacggagacgggtgaatccctcaccgctaccccctactgcgcctcgggtctcgggacgggagacggacgggtcaatgactcacctcgtaccctagcccccagcagcccaggcggatgggtcatcatcatcctcctcctcctcttccccctccgcccgactcattttatccattcacatttgagcctggcacatcggacaccaaacacacacacacccaaacgctcaatcatcccctcattctcgacccccttcctaaattctcgacccccgtgagaccccgtcctctttgcatcacaaaagcaatggggcaggggtttaatgttttgccttccataaacattttgttaggcattgaattttaaaatttttcgagtcttaatgcactaatttaataagtatttaaaagttacgaaattttatttacttttttttaaattttatcgatattctcgaattatttaattgattaaaattcctttgattcgctgaacccatttattaattctcgagtcccagtttattttagtactcccattctcgagcaaaagctaaataataccagtaaatggagtgttcgattctttactcccgggatttgattggaattaaattttgtttaatctcttattttctctgctcaattttaatgaaaatccttggctttttcgacagccaagtttagctgcaaccgatctgattaaaaggcacaaaaatgatcaaaaataatgctgatcaccattccatgtcctttaaaagctccattgttgtcatttgttgttgtttttggggtttgtatacttagagcaaagaaatccaattccttccgatcactttggtcagatctctggctgtgtgttgaacacgatctgccgatatatcgcgctcttcgcacttcaagcaatgatcaaataaatgatcaattagtggtgagcatggaccggaccaggacaagggcagaatttaaatggaaaccggaaattttgagcaattcgggatcagattcggggtcggtgaagccagaatgggctttttccaggtcctgttccgggttcatttatctaaaaataccttgatcaggatcaagatctcgggaaaatcctgacaagattctgttcatgcccgatcaataattttcaaggacacctgctaaattttgtcctgattttttttttgcaaaagtaacataatccaagtgtccgggaaacaagttcttagtccaggccagatgtgtccaacccatgactctttgtctaaagtagtatggaatttaaaaaaaatccggtcctaatagctttatttaattaatcataattagtggccttttcccctccccctccaactcatttactaattatcataatttaaaagaattgttgtgctttaagtattcatatttattattatctcacccttttccaacccatccacccaatccattaattaattgattttgcccgttgggtaaaattgtgcaaatgggggcgcgggatgggctgtgtaatgtgtgtgaccctctctcattttcccccgtttccatcgttggttggcgcattatttgggcttgaatgccttcgaggctgggttttattccaccccccccccccactaattacccttccgtgccccagggtccgttcacacatttaatgatcaaaaatttgtgggattattattttggtaattttccgatgaggattagccatagctgagcatatttaattcattcatcagagcttccatgtgtcctggtttttaagcgttgcccttatttagagaggccgaatctttaggaattaaaaatttttgggattaaatcttatatttgaggcctattttcgttaatttttaaaaaatgggagctgaattatctcaaataaatttggttatataaaatcgaaagtttgactattgagccgtttttttaagtcaaaccttggcattttgatgtcaaaattttcaatagttttaattttaaaatttaattctgtatatggaattatttataatttatggattaaataaaacttcgaacagcttaaatttcattcctaaataaacaatccaatttttctatggttttcatcactttgcaatttgatttcccagagatttttgtccttaaaactaagaacaattttaccgtaaatatgatccagaacacagaagaagtgtaccttaatttttcaggtttaggggtaaaaaaaaattactaaaaacgtaatttaaaaaacaactattttcctaaaaaaaaatccaagaaaatcaaacatggccaaggttcaatatttttttacaacgttcacccaagctctaatttccactcaaaactttcataattgggggcccaacattttttgagctatacaaccaaaagtggcctccgtcccggccaaaataaaacaatgggccgcagttaaatttgttgtggcgttttgtatagtcggccaatattcaatttcatccgcgcttttccaccggcggaagaagccgggcgcggtgcgtaaataattcatggcccttctccaccggcaagttggggaggggaggcacaaaattcttacttattttggccacaactcgaaccgccttggccccaagttaattattagtcattcaacagtctatttatggatttttaaaggctctatttcatgggaaaatggcaatcagaaactaaaattcccatgctaacaattttcgggagtcataattatggtaccaaaaaattttgcggacatcggattacgtcaaagcctagaccacacaaaaaaaaccccatggcttttctcgtctcgaaactcgaggggccaatcaagacttttctcgaaactataaaaacaagatcacgactggacccaagataagtaagacctccaacccaaaattttctcgaaaccaaggccaagactgatcagtcccccacaaaaataaaaggaagatcgggtcccaagattcaagatcatgatcacaaaaaaccaagacttttctcgagttgtgaccctagtccaagactctcgaacaccattattatttttgtttccatatattattcct

SEQ ID NO: 11883 - DNA, 1502 bp, Heterodera glycines
  unsure (1)..(1502): unsure at all n locations
tcaaaattatattgtgtgcacaataagaaaaaaattccaattttttatttatttgcctggcattctatgtaatttgatttttatttatttattggcattttgtgacgaaaaaggggaaaaacaaagttcccacggcgacttatgctaaaatgccggggttttagcacatgctgaattgaaattatgtatattcacatctagccattttttaatgctctccgaatcaaatcaaataaatgatttttaaatgagggtcggggcttaaccctagtattttgaaagaattttcagactaccaaaattcccaatctccaagaaaatttagaaatttttttcaatttttctaagccttttcatcaaatttttaaatttcttcctttttttctctaccgtatattctctaattatcgccccgtctctattaatcaccccgtctccaattatccctcctttctgaggaggttgaaaaataatctcccccggggcgataattatagaatatacggtaaatgttttccccatccctttttgaattttcttcctttttctatttactgtatattgaaataatgtacagtaaccgtaatggactctacagtatgtaaatatattttctttgaacatcatttatttccaattgtcaaagcactatttaacaatatatggtccattattgagtcccaaaattcttcgtttcatgggcacaaacattgttggcttcggagttaccacccattggcagcaaaatcccaccgcaagccaaaagcaaacagaacgccaaaggacgcgcgaaaataaatatttagggaaaatgcgaaaattcaatgagccgcgcatttagtctgtctgctgaacaaatagtaataaaataatggaataaattgcatttaaaaaattgtttatggaagagaaagcaagctgatggatgccaaaaatttccggtatttcgcaaaaaatttaggaaatcaagaatcagaggcttaaaataaaaaccaaaatttcaaggttcaaaaaatggtaatttaccgtagaaattgaaaaaatatcgtaccttttttgtaaaccttgagattaaaaagatgtgatcagacagatcaacaatcacttcttagatcagcgatgataacaacagatcagtcattctatcaaagcccttaattgattaggtcgagtttttaaggcgcgaaaggtgacctgatcaaatggatccaaatcattgaaagcgtttaaaaggtgattgatcagaccaattctcgaacccaatcaattcaaagcatatttctcgaaaaagcctcctaaactggacccttctacagattaaacgcaaatgattaaattgtaattttaatttaatttaattttttttttaaatttaaaattattatttttaatttccacgaaaatttcaaaatttctccggctnaaaaatcaatgcaaataataaaaaattattttttaaatttcatggaaatttncaaaattatccaacatttaaattgatc

SEQ ID NO: 11884 - DNA, 3707 bp, Heterodera glycines
cttttcttttccaccaaccgatcgatgaaactggagtcgtagaagaacgctgctgcttttgcagctgtgccacgtcaccattgtccacgggagttgcgtccctcggcggcgccactgccttcacaacttcagcaggcggcgctgtcttctcaactgtttcctcatcttgcttgaattgatatttctcgacgatcacgtccacgtaaagaagttccatagaggcgagtgcataagccaaatcgtcgtcgtcggcgagggtaacccagtcgctctctgcattaagtgttgtgcaacaataccgaacatgacatgaattaaaatttacaagcaaaaaaacaaccccaactactaatttgaaaaaagtaagtgattagtgggaaccccaccgatgtcattcgtccccaataccacatgacctattttccgttacacttaagctacataatttattgttataaaaccttggtcgcggtatttgagtttgatggcattcgcatccttaatatcgaaataacgctgcatcttcgttaccaagtcattcaggctaatgtcgttactgtgatggatccaattcttcctaatatccgacccgaaacgagccttcagcgtggtcttattcattgtatcggaataaattctaaaaacttttcagtatttaatattccaacagaaattgtaaattattagaattcaattgtcattatgtaattatgggaaacaagttgattgtcgttgattagtgaattaattgggctggtaaaccaaaaaatgaggagcgaaagaaaagttttaaaaacgaggcgattgacgtgtcgtgtcacaacagagacaaattggcgttttgttctttaattgattcaaataaaatcaaatagtatttcaactccaactagaaaagtacaccagcatttttaatctgtttatcgacaaaattaagagcattttacaccgaagtcacactaaccacaatcagcacaacatttaattaagaaattaaaaatgaaacaatataattgatattgtaaaagtaaaaagatcgaaaaaatatcgagaataccaaccattgcaagcatttaattccataaatcgaaattaaaaaataataaaggtttttccatgattgactgcattaaattcaaaagcgtcgtgtgccaccattgctcacaatcagtaacgcgtcgctccccactgctgctgctgtggtggcggcacgccgccaggaactgcggttgaaggctgaccccagccacccccttaaaaagaaattgttttcacagtttcaaatgaagaaacaaccaattgcgtcctgttgtggtttatctccgtaggcgccactggccgcgggaccaccgccggccgcgccgccacctccccatgcgcccgcttgctgcggtccccaggaagcacctccttgctggccccatccttgcgccgctgcgccccactgcccctgctcagcagctgcagtacccgccgcaggaagcggcccagcgggcgcttgtggtggtgcaccgccccacgaagcggctgctggaggtccttgtccatagccgccataccctcctccataaccacctgtaaaaaggatattttaatctagtaaaacatatgccaatttgaaatggtccttttgtggcgatgtccgaagccttaccccattggggcgggggtggcccccagcccggctgaggcgggccgtagccgccaccgtactgtgcgtaggcaggcgggggtggaccgtaaccaccgccacgtcccccgtactgcggtggcacacctgaaaccaatgaaccagcaaataaatgcaatgacgcttgggtctggaaaacctcgtgaacgcatccctcgctccattctgtctctgtcgtgctgttgtgccttttgcatttcttcgcggctaagcgcctttttaacgtcacaacgataaccgccgatcatatgagacttgaggagtacgcatctgaaattttttcacattttgacgggatttctcatgactaactcacttatctacagggtcgtaatcgtcgaatgtgacaaaagcgaaaccgcgcgctttgttagtgtttttgtcctgtattatctccacctataattttcaatatgcgaagtaaactcgcgaataggaatgaaaactgacctttgcgacggggccaaactcagtaaaataatgcatgaacgattcttcgtcgtgttcatctcggacacccgaaacgtaaagccgtttagtggacacattggactcggcttttgctgattgttcacgaggaacctgatatgagaagaaaattggcagattccaatggaatgataatgaatgaaatacggatttagtaataaagaaaaagggcattctttcatcataaatgaaaaactgaccgctcgtttcgggtcaacgactttgccgtcgattgtgtgtggacgcgcggacatcgccgcatcaacctcaaggaacataatacctcaaaataaacaattcgctaaacactagaacctcgtcggctgtttgaaacgaaacaaaaccaaagccgcgcgaccgctttgtttgtgcgtcacgcatcacaatgcaatcgacgagcattccgaattgggaatagaaagcatgcagtgactcgtcggttgtatttagtgacagactaaaacgacaaaacagtatgtaacaatcataaaacattttattgacagacccgccaatgaacagttttcggaactgctccggctcgagacttcccgacttgccgctccgctggtgcgatcggtcgatgccattttccttcaattatcaaaggaacccggggatttaaattgtcaatgaaataaaaattaccgttaaatacgattaattattttaaagcgtgagagtcttcatcaaaagtgtttctcgaaattcgttaccattcaaaccaaaatcattttcccatttcgatggcgactcccccgcttaagtgttgttatcccacctcaactaacccatgtttaacttacttccttcttaacctcaaccattttgtcaggccgttgctgaactctgaagaatcaatacctaaccaaagagtagtaactatggaccaaatagtaactgagtttttatctaaattgggaatggcaaaactatatgctaattgtaagtgaaacttttaagaaaacctgcacaaaacacaacaattataaattaattattgtaatgacaaattcaggtcagagacgaaactttaacgggaaatgagcgaagctaaccactaccgctaacagctaaaaatgggtggtgaaacatatcgtaattatgtaggacgaatgaactgaactcccttctaactggacgaacctagaacaaatgtaaaagtacgattagccaaaggccaacacaaataaaaacattaaaacaaacctcccaaaatgaaggccatagaaagtcggcaagaaaggcaaccaatgagaagcaccgattgcactgactcgcaattaataatgacagtatgagtgaacagaacacccgtttagggagggtaattgttaaaagtaaaaaacctaaatttgtgatcgtactttttaggggaatccggcgatgataaaagcaaaagtaatgaaatttcagtattcaatcaatgacagataaagatgttaaaaaataatactaaagataaatctcgtttttatctgacaatagcaataacggagtctacaaaaaaaacatttgggtcctaaaa

SEQ ID NO: 11885 - DNA, 3048 bp, Heterodera glycines
gtttttggaagcgaccaacacaaagcgatgggagccgagcaaagccattccatttatgttcgaccagtcgttaggtggacaagaatttcttaaattcagaaaaacgcaaaaatttgttgttgtttttttagctaaggtcgacaaacaatcggttcgaaaagcgatcgtcgaaattcagtcgaagacctgcttgaagttcaaagaagtgaaggtcaaacccacgggttcgcatctgtactacaccaaaatcgccaatccgacgttgtgagttcggctccgccccttccttggccaaatccttcctttttagctgtgggctcagttacgtcggccgggtgcagccggccaaccccatttacctcagttttatgtgcggaaaccccgctggggtggccgtccacgagacaatgcacgccctgggcttccaacacgagcagctccgcttcgaccgcgaccagttcatcaccatccaatgggaaaatgtgaatccgcagcagttggacttcttcaccatgtcggacgttaccaaattctcaaggtgatcccccgcagagtccgtgggagaggccaaaggcattcccaaatgaatgcttattcgaatcgtagctacggaatcaaatacgactacggctccatcatgcaatatgcgagcacaattgcttcaagtgccccgggcaaaaagacaatggtggccaaattgaagccgaccgaaaatgaacggctaatgggacagcgggaaggactgtccctttcggacgtggaagcggtgaagaaaatgtactgccaaccgagtgagagggaaagggcggcacacggacaaactaatcaatcaactaattacgcccaaatttgggcctttgttgctcaatttaaattaatcatctaaatatccctactgtaaccagcaacaattatttgttaaggttgtgacgacaaaataatcttttgtggcatttgggcgacgatgaatttgtgtgagttcagttgaaaatgattatctcaaaatattttatgctttcacatttggcgattattgcttaaggcgacccgcgaatgtggcggagagcggtggtgcacgcgtggattgtggaaaactgccaaaaatcatgcaataaatgcggggagaaagtgcaatcggtcaaagggcaggcggccattttaaagttggccaattgacgcggaaagcgacacaaaataacttttgaatggcattcattgcctttgttctcactccgtttggtgcttttgcttttcccttttttctttttcatatccaacattcgcaattgtctcttttgctcctttcgccccctcccctcctctccgtgttttcctttctctcttcctccttttcttccatcattccgtcctttctcaattccttgccaattgttctgttttcttttccatctttcgccgttacttttgccttcgcctcctttttgaccttaaatggaatggcaatgcttttgaaatgcattttaaattgaacggacaaagtgtcggagaaggacaacgacccaaacaattgctgaggcgacgaaaagtgtggcaatgaaaatgcgattgggctgaggctttttgtgctcaatgatagttcgagtcgtataataagaaaagactccaaatgaacgaaatatttccaaaaagggagcaaatttcctgaaaaatgatttccgacgcaataaaaatgccaaatttcccactttttgtcgaagaaagcgccgaaagactgcactaaaaggaaaccatttttacgaatgttttttgactttttgtcaaaggacttgtgcaaatgaagaaggcgattttcagtgtgaagtccaaatagcccaactgagccctgtcgtattcgaagtggaggaaaatgcaaaggagcagcagaaaatgggcgaggcaataggccttaagccaaacggaaagggacgggtcgtacttttggacaggcaattgcacctgaattagtgaagggttgggagggattagcacagggaacgaaaaataatgagaagccaaatacaaatgggagaagaaaagccatttgaatggaaattcaccgggggaactccgaaagagtggtcatccaacgaagtccagtggaagaagtggcgaatctgaggacaaaaggctgagcaaatcggaaaagtacacagattgccctgctaaacgcacttttgttccagggaaccaacccggagggaagaaaagcgccttcactttgtccgtccatttggggaacactttttgccccttttcgtcctttaagcgccatttgtcgcacaacaattccttgagagtgtgaaactaaaaacgaacgaaaactgattagaagcacaattggaagccgacaattcaggcctggagccacagctgatcaaagcttcgctcgggacggatcagcccgtagaccgggggctcttccttgcgctcggcctcgaaagtgcggaacatccggtcccaaatgatcaaaacaccttccgaatattaaaacagcagttagtacaagtgcttttttcaccgaccaccaaagttacggtcgatacagtatgcctggaaagggaatactcattaatttgctgctggagagagtggcaaagtgcggacattgcgtccgtggtgcacgcggtggtgggacggagtgttgaacacaaagccaagggggccgagagaaccgagcagggaagtgtgcatccaaaactggaagatttcggagaaatagcgatggacgaggaaaatggacggagggatgagaaaggcctgcattggaaggacaatggaagtgattagcagaccaatgaacgaatatgcatgaataatgaatgacacgggcgaacacctgcaaaatatcatacgccgccagtcccgcgtcctgtggaaaaacgtttaacggtaatagcacccgagcgtcggactttgtcagcccgatggacctgaatcgcagcttggcgaagagcggttgagaagttgtaatactcgcttgagtggtgaatggtgtgaaagcccctaaaaaaagccgaattctgtgcagagagaaagtgagttcagtcg

SEQ ID NO: 11886 - DNA, 2454 bp, Heterodera glycines
ccaatgcctgattaaaattcgtaataacgacaaccacttctgccttttctacgcactgcaggcaacaatggtcgccaaaacgtgcaattggcctcgctggaagtttttcgactatgtgaacgacagaaaaggacagcagggacaactccatcatgatgcggttgagctcatgcagcaggttaatgcaccaatggatttggttggctacgacgcggacacatttgtgcctcacgtcgttgactactggaacaacacgcagcgacaacaccgctttgctgtgttcatctttggatcgttgggacagtataagccactctacaagtacattgacaacacctacgacacaccattgctgctatatttcaatgaggaccatttcgatggtgtgcagaagcagggcggtctgttcggtcaaccgtactgtttggagtgtgaacgaccttacgataaaatgtcaaggcacaacaaatcttgtaaggcgcattgtgtgatgtgctcacgtgttggaccgcagtttccgtgtcagccaacggatggattcgtcaaggaatgctctaaatgctataaaaggttccgaaactacgactgctaccagcatcatcttcattccaacttttgtatgcggtcaaagatgtgcaaagattgcggtgctgtttgggatgtagcagataacaaaagaaatggcagaaaggggcatgtgtgtggcgagaattattgtgggctatgcaacaactaccacaacactgagcggggatgctacattcaacccattgagccgaaacaacatactccctatcgtattgttgcgtttgacgtggagacaatgcagcatacgttcattggggaatctgaacaacggaaccatttgcctaattttattgctgcgaaagtaatatgcccgggatgcatcgagaatggagactggcaaagaggaacaaaagggtgtgaggtgtgcgggccaaacagaacggtcgccttttgccaacgccgcttcacagaaacaacagtcgacaagcaagtggtcgcagacaatcctttggaggaatttgtcgattggttagtcttccaactcccgctgaagtacgacacttatgtttattcgcactttggtggccgcttcgatatggtgttggttttccgtgaacttttccggcggggattcaatccgagcatgttgaggaagggcaataagctgtatgaaatgaaagtgggcaagcagaagaaacgcaatccaaacgtggtgttccgagactcgtataatttgatgccctgcgctttggctgaacttgtcccatccttcggcttggatgtcgaagacaagccattcttcccgcacatggcaaaccaaccggataactacggaaagcagatataccccacgcctgaagactacttggccgatgggatgatgccggataaacgacaaaaattcaacgtctggtatgaacaacatcagcataaacccttcctcctcgacgaggcgttggcaagctactgcacaaacgacgttgaaattttaaaggcagcgctggtagcgtttcggatggaattctttgatgtgtctcggagggaagaaggcattgtagcggaaagggcacacgaaggaattaaacggcgaaattttggggtgcacccaaagagacgaacttcagcgcaccgacacatccaatcactgaattcgcgacctaacaacaaaattcactaaactgccaacatctccaaaacttatggctggaacatctcaatcgctgtccacaaaacagcaaaagcctatggaaaaccataaaagaccttggcaacgaaagcaaagtgcataacaccattttgattttcaacaacaagcaagccctatttcgacaactctaaatcggcctctcttctcaatgaattagtagcgaaccgtcttttcgtaattctttttattttacttacattagtgaagaaaactgagttctgtacaaaatggcataagtaatgtaaaggcaaatttaaacacttctttgttttgtttttattgggtgtattcggagtcaatgaatttggcgattgtgttcagttggatgttggaagtgccttcataaatagtccctgaaattggcaaaaattaaggaatttgccttgttattaaagaccgattttgcagtccctgtagtatttttcaatgggaaattctttggtgaaaccaactccgcccattagttcgatgcatttgctcgtcactttcgtggccacattcgaagagaataatttggaaattgccgcttcttttatgtaaggcaaattcgattccttcagacgcgcggcattgtacacaagcaaacgggtggcctcaatatcgcatgccaagtcggcaagttggtgttggacagcctaaagaatcccatccgtaattcaaaatgtttttatcgcctaagtaacgatggaagtcgatgatccgttgtccaaattgttttc

SEQ ID NO: 11887 - DNA, 2026 bp, Heterodera glycines
ttcccccccccccggcgatgtcgtcattttgcacccgttcaatttaacacgccaaaaaacaattcattagcaatcgattcatttattcattgatgtattttattaaacatgtagctttttttcatatgtacatattttacaagtttttgtaatttcatttttcccaaatttcagtctcccgcactgaattttaacgcccatacgccctcctcatccaccgaactgtccgcctcggccgaccagcagcagtaccaaagatggcctggtaaaaggagattcccatttttggcacttttccgtccgaatttttcattttttttccacccaatattttacattagatcgctcttttttctgaatcaagcattgatcctttcaggcgatcgatctggcccatcgccggcaccgcccgcttcgtcggcttccggcgccatccctccgccggtgctcgtctcaccgcattactctctgcctccgcacattcaacagcaataccaggtcagtcctccgggatttcggggcgttcaaaaatgtgctacaaaaagttttccaattttaaatgtgccggtgattaactttttgcgtttcccttccagcaacatcatttgggtgctccaggtggtggcggtggaggctttttctacgcgcatcaacagctgacaccgcccgtggcccctggccaacactcgccgggccagcaacggcactacgcaccgccgccgccacaaatgctccatcccggcatgatgtatcaccaccatcagcagcagcaacaggcacaacagcagcagcagcacatggcatcgccttatcaccagcagcaacaacaatacggagcagtacagcatcagcaacatcaacaggcaatggcagcggcggcggcggcgtattgggcacggacaaacggacagcagcaacaacaacaacaacaaatgccaaccccaccggcacaggttggacggacgggatgggatggaaatgacggcaaatctcaaaaacgagatataatttccctgtcgttcccccactcattttcttttgttcaggatgttggtggtggtgccgtgcctggcgcgtccacctcggctcggcacacgccgcagccttcgtcagtgccaccgcccaatccatcgcccgtcgcttctgccggcccaccgcagcagccggtggttcagtccagtccatctgtaacagctgcgacttcgtcggctccgggcaccgcgtacgatgaatgcggcatggccgacgtcggtactaccgactcggcgcagcgaccacggtcacggcaacagcagcagcaacaacaacaggctgtacatctacaacaacaacaacaaccgccgcaacaccacccgaacgctccgccgcagcaggcgatgatgctcacaccgcaggcggccgctgcccatttgcgttacgcgtccgccgtgccgccttcgcccggcatgatgatgatggtcggcccaccagggggaggaccaccgctgtcccatgggctgcccccgcaacagcagcaacaacatgcgtacgcaccgccgatgggcccgccgccgcatccctcgccgcacatggcgatgccgccgatgcaccaccatcattacgcgacggcgcaagggatgccgcctccgttcccgggtctgtcgtccggcagttttcccccacaattcataggtgtgcgagagggagggagggggccgggtaagaaaaaatggggggggggactttgaaatatgcattttcgagttggtcgtccgcttatctccccgcttccttcaggtcatcctccccctcatcctggcatgtatttccatcccggcgctccgctcggctccgccggtgccgtccaccatccctccgcttccgccgccattgggcaccccggtcctccaccgcctgcgtccggcggcggtggcctcgtcaatgggcgtgaagcaggcccagcgggaggcggtcgaaaagttggtgatgcaactggcaaacaccaagcaagcagttgaccgccgaagttggtgcacgagcgacgcct

SEQ ID NO: 11888 - DNA, 1269 bp, Heterodera glycines
catgggcatgaagcaggcccagcgggaggcggtcgaaaagttggtgatgcaactggcaaacaccaagcagcagtgaccgccgagttggtgcacgagcgacgcctgttcttcgagaagttggtgctgctcaacgaacagcagggcgaagtgctcagcggaccgccgcaggtgtccaagtcgacggtggacttgttctcgttgtacttcgcggtcaaaaagaagggcggctttgaaaaggtgagcgagcgccaacctccgcaattaattagttggttattccaatgtcgaaatttctaaattaaagacacgcgttaattggcaagcctgaccagacaaaagggaagaatcctctgacatattttatttattttttcctaattttttcgaatgtttttttctcaaaatttaattccgcgggtaaaaaagaaattgtttagtatactagtaaatgagcatggttaagggttttaggccaaatttgaaaaaatcagaaaattactagtaaagatttaggtaattctaagtaacttgaaaatttggcgctaaaaaagcccttaaaagtgctcacaatcagcagatttttaattaaaaaaatgtcatttgagaggtgaaatttccctcttccgatatggccataattgggcaaaatgggaacacatcaacactaaaatttccaaaaattaggcaggatttcgtgtcaaaagataccatttgaatgactacattctccgccttttgcagaccatcaaggacaaagtgtggaagcacatgtgcgtggaggccaacgcggacatgcaggagtcgtcggcggccggctttcagttgcgcaagcattaccagaagtacttgctgaagttggagtgcatggagacgggacagaacgccaaggagttggtggagtttgcggagaagcagaagaagaagaaaaaggagaaggagccgagcagcggcggcgggggcagcgcaagcgccgcggggccctctacgccgtcctccgccaaagacgagcagcagcaacagcacggcggcactgggaggccacggggcgagcaaagccgggacggaacgaatgcagcaacaacggcgccacagaggggaggagggacaggcacggcaagcagtacagcggcggcgacaacggcaacaacgcagcaaaacgctgcgggaggggcaccaccacaacaacagcagttcagcggagcgccaggaacagcgcaaggtaaagcaaaacagtagtaccagaaatggggacacatagttcactgaact

SEQ ID NO: 11889 - DNA, 1415 bp, Heterodera glycines
accaactctttacgttcagccagtaactcattttaaaggggtcccaaatctcatttttaagaaaacttaatttttactagcaattatttagtaaatgaaatacatttgcttttattgtcgaattatgggaacattgcatttttagagtgatttaattggatttctaagcaattaaaaagctgaattattttagccagccacaataaagtcgaacaatggaaaggcggagatgccgatgagtttcagctcaagttccacttcgactttgcattcgcagccattcaaaactttggtttgtcatttcttttgttcattttggcattctgtttggactgacttttaggctttaccttccgatgttgagcttttagcagcgaaaaagcaagcaacaaaagcgcatgagaacagttatttgggggctgttcttcgcggtgagaaaaagatgaaacgatttgtgaggagttgtgggggacaggttggcattctcatggcgaaacattaaaaatggaaggtgaactgcacactttgccaccatccttttaaggtgtgggaggactcatccatggccgagtgggacccaaatgattttcgaattttttgtggtgaccttggtaacgaagtttctgacgaattacttgccaaggtacttgtttttggtttaactctactacaattaataattacatttttaaaaattatattttttaaatcatgatgggcaagatcacgaaagattctccaatcgaactttttccccttttttgttccttttttgaatcgtatgtagcgggataattaatcatatttttggttaaatttttgcttaaatgtaatatatgaagtggacatttacaaactttcaggcttttcggaaatacccaagcttccagaaagcgaaggtggtccgtgacagcaggacgaacaaatccaaaggctttgggttcgtctccttcaaacaccaagacgtaatttctgggaaaaagatgtttatttgccacttcattggttaaggactttattcgtgcaatgaaagaaatggacgggaaatacgtcgggaacagaccaataaaattacgaaagagcaattggaaggaacgcaatttggacatcgtcaaaaagaaaaacaaggccaagaagaagctcggattgttgtgattttagtggaaaattgtaaaaggaattgcgaggggaaaagaacaaattggtggttttaacttgacacttttaagcgatcgtccgcatttgaaatccagtcttcctcaattttaatgaaattttttaattacttttctaaaagttcattgcttttaaacagggtggccaagtgtgcttatttcagcattacgtgcttattttgtgcttatttttgggttagaaaataaaaatgaaaattttgaatgacagttttgacttat

SEQ ID NO: 11890 - DNA, 1365 bp, Heterodera glycines
cttctctcgagttctttgttatgaccatttgacgtgtctttttggtcgttggacatccattcggttgtgttttgatgaacatattcgggatgcgtgaaaaaagctcgccgctcgttttgccttgacttcgtccccttctgccgattctccccggcccatagccactttccctttctctgtccatcaaatccgtcgatgtcctccatcggcttccgttgacatcgttttccaccgtcgccttttgctctctgttcatttccgtgttgggacttccgtttgagaaacaatggccaattgtcgtgggccaatcggtgggacattccgtcggagggggcggcggtttgctggacggaggcggcagccgtcgcgcggaggcggacggcgccagtgtccgtcgccatttgtatggcgcttcagcgatttcgctctctgccactgccaattcctcgtataaatcgttggatgggacgaagtcggcggaggaacgccacacaaagtcgggggagaagtggcgatttgggggaaaacggagggccaccgactgacgcggcggcgtggcaaaagtcggcgaacggacagagacatttgacctaacaaaaaaagggggatgggcgaaggattgccatggcacggcttacccgactttgttgtcggattcggcaacagcaaactgacggaaggaccattcgttggcattttgagcggaggggacgctggacacagtttcggtggacgaacgacacgaaaaattggcatcggaggacggcgaagagaggaagttgaagtggggctggggacgaacggagtggggcggcacggcactcggcggagtatttcggcggagagcgctaaatgggaattggaattgccaatcggtcgtatcaaaatcagttctgacggcccaattttggattaacattcaaaatcgggaaaatgaaactgctgctaaatccaatgttagccttagctttgttgatttatgactgcgaatgtacaaattcaatttggcaacgacaattcccccgggcccattcaatttgtttcctttctctgtgcttttccttgctttgtccattggccattttcatggaaaaatggagagaatttcgcccatcgcccgcctaattctgcaacagtgccgggttgggttgaagctgagtatcggacgcattgtaaatatttaattattttggaacgtccattcattcgctcatttccttccactcaattgcctttctttttagggctgatggatgggaaatggtgggaaaagtggacagtcagaaaagggagtgagtgaggaagactgatgggaggaagagaagcaaaagtattgggggaagaggaaggacagtgcatcagata

SEQ ID NO: 11891 - DNA, 3666 bp, Heterodera glycines
cgcagtcgcttgtgctccttcccatcctccacgatggattcgtctatctctgtaatttggtgctccgtctcgtcaatacgccgttctatccaatggatttctttgcgcaaatgtctgtccctttcctccaccgttttgaactgcacaacaatgattaaatgcactgctcgcactttcccggtccctcacctgttcacgatggccctgcttggcatacaattcgcgacacttttgctcgccaatgcgaatgtccgagcccagctgactctcctcctctagcaactgttcaaattggggctgcaactgttccaattggccctccttctccgcgatgtcgcgtttcagttgttgcagcgaatgttccgcaatttcgcgcccgcttctctcacggtctacgtcttcggccaagtccctaatggccaactccaactgcgtcttgcgctccataaggtccgtctgctccttgagcagggtggcacgctcttccttcacgcctttgtaatgcgtctccaatcgacggatttgcatctccgcctcttggattgacattttggcttggatcagcttcgtctccaccttaagtgcttcgttttatttgtattgctggacagttgcaaattgccgacttcgttttgctgtgcgtttattcgctctctatgcgaagtcagtttctcgtttttgctcctcgcctctttgatttccaaatcgtaaattgtgtactcaattgcccttaatattcagtagtaaatcctcaccatacaccgcaatcgcaccttcgcattttgtcccacttttggtactccttcaagtcctctttctcctcctccaattttttcaaccgttcattaatataaccgagcaattgaacactcttctcaattttcgtctgagtttcatgcaatattttggtgctttcatcctttttctcatcaaaaacgcgtgtcccggccacctttaataaaaatgcaattaatccaatgtcatcgtgtaaagcacgcacctccttaatgagcttaagtctgtacggatcagacgcggttgctaattcagtgattttcccctgcttgacaatgtaatagggatttgagcgcgaaaatccggcagattccatcagattgacaatctttataattcgagtttataaaattcaaattttcatggatcaaattcggctcacctcagtccgtgtcactggtttgttgtcgatgaaaaattggtccttcttctggccgacctgtcgcattatccgaacttcgtcactgtcagttggtattcgtctgtccgtgttgtcaaagacaatttcgacctttgcaattggagctctgcttccgaccccctcatgcaaaaaggcatttttgtcctgcagagtcaatgaggaaaaatcgttgctcagcacaaattgaattgcagtaaaaaagttgcttttgccgctcccatttcggcccacaacaacattgtgtttgggtgaaaaattgcgaactgttgtcaactctttgtaactgcgaaaaccagtgatattcacttctttgatgtacatttttgtatattctgttagaaaataattaaaatttatgtaaataatttgataggttcactgcggtaatagttaagatggttgccctttaaaaagtcattcaaaacaagtttctaggggtttccgagtcgctgatcacgattctggcatccatttcgctcaatttcgaacctcgaacccgaattcgaacaaaaagtcgaaacttcaaatttcgctttttttcgtctaaaaactagagtgcagcgggaccgggacctggacacggacaactgagtaccaaggtcccggttttttcccggttttcccagccaaaaagtcccggtttttcaaccagaaaaggtcccggtcccggttaagcctaaaattcccggtcccgcttttttcgcttttaaaaacgctttttttcgccgggaaaaatttgtgattttagtacgatttgttaacagatttttgtccaaaaaatgaccaaattttgccataaattttatatttttttgtaaaatagtgacattaggccataaaattttaaaattatgagtttgtttaagaaatcagaacaaattttggtcgctaccccaaaatcagaacatttctgacaaatcagaacttttttattttatcagatttggacccttcaaatcagaacatttctgataaatcagaacagatcgcatccctggtttaatttaataaaaatgaatggcgaagttcgtagaccaaataaaattgtcaggtgcctatgttcattttttaaaattctttttatttggattttaattattttgacaggtataagccaattgatccgatggtacagccagtgacagcggaagacagcattccggagtatatgaacgtgttggggatggtcttttcgatgatgggtcttatgatgagagtacggaataagcatttaattacttttctacaaagaattccaaattctttaattaactcattgtttatttatttagctcaaatggtgttcttgggtggctcttatttgctcttgcgttagttttgccaatatgcgcgcgtccgatgacactaaacaggtggtcagctcgttcatgctcagcatttcggccgtggtaattttccagctttgatgcatgattcttattgttagacctacacattcaattccaattcaggtgatgtcctatctgcagaatccaacgccaattgtgccgccatgggcgtaaaaaataaatgcattgaattgttcagttcaaattatgttattctatcggtttcatttacatctcttattatttgcctgaaatacccgttgttcagcccaaaaatggattttttggttccgtgtcaaattgagttaaccctcataaaatatctaaaaaaacgtgtcctttaattctttgtatttgccttattgatgttgagtcggagtcctgaaatggaagaagaacgtttgcccattgtttcgatggtaattgtcgcggacaaaagtcgtgcgccggccaatttcattacggtgttttccgattatttctttaatttttcatttccccgtttttccaacagctaacgaaaacttacgacgacggaagtgacgccgatttatggaaggatgggttcggtttcgggttgttcaaccgttccgttcgttatatcgctgtaagccgacacatcgccgaaacgccggtttgtccgtctgtctgctgcttaaattgtgtgctttttagcccagcggtttggaagtgttgactgacgtggccgtcatttcggacaaagaagcagttccgtccagcttcgtctgcttggacttcaccgttgacaccagtgcgtcggtcgccttccatagttcttccttcactttttttgccctttagaagaacgcgccctgaagaagaaatatttgtgcgcccgcttcactcctcggactgatgcaattgacgcggtgaccaatttgattgttttggcgcggtcgcggaggccccccaaaggatacactttggccgggttggtttttcaattaactatttacttcaactaatagtagtaattagctgttctccccatctttacgtttgccttttcagtgacattgacggcatggccatttgtttccgagtgtccataatccccgaaagttatggacgacttacgca

SEQ ID NO: 11892 - DNA, 4325 bp, Heterodera glycines
ttgttggcaccgcacagcgaaatcaaatggtcagaaatgtcagcttggcaattccgtccgacccagcatggacattgcccaaatcaccgacatgtcggatttgatcctgaatttattaattttttcgctattttaaatatttctatgcaaatataaaaggaaagcatttcccacaaccatattattgaaaagaccggtgaatgaaatagaacctgcggtccgccgtgcgttttgtttgttggattgaaatgcgggccggcggaagtgcacccgttggacaaatcgccgtaggctaaacagataaataactttagactgcaagcattaatttaattaccatggacatggaagccgtgaagaccaggctcaagaccactgatttcgccctgaactgacacgggcgaaccttccttgtcctggaaatatacaaagttatacttactaaaaaatattaggaaattttaatgacttgagtgaaagtaatcatccctttcacggatgggtccgcatcaccgacgagcacgcagacagcctttttcggatcagccatttttcaggaattcggtaaaaattaacaattaaaacttaaaaaacttatttaaagaaaaccaagacagtaaaaaaacattgatttgaatcattgtacaattttgctttataacatgaactaagcaaagttaaaacggcgctacaaaaaagtagcggccattcaagatccaaagggttgtactttctttatttaaatgtaagcattatcttgttttctgatattattatgtaccttattcagaactttatggttaattgattggactcggtctttgatcatgaatttgacataattaaaccaattcctttcatggacggtaaaaaaggaaaaaagcggcaaaaaataattggcgtaataaacaaaatgccaatgcatttaaaaagaatacaaagtctttttctttgatcaaattcctaatcagtggtcaaagcttccaattccacttcaaataagttaaatcgtgtgtttttagaaataattaaataaaaaataatatttataaaatttacgaaaatttcagtgtcttattttcgttgtttagtttgatcacatttgatcacctataactcgcttcattccccactaaactgaacaattttggtatcaatcgaatactaaatacctaaccacaatacatatatattgtatacaagaaaaatctataaattagacatttaaaatgacaaaaataatttaaaggaatactacaaatagcagacaattcaaaggatccatcacttctcaacaattcatttgcgctaatcactttggtcggaagtgccatcgataagactaaaaccaaaaaatggaaatttacaatttaattgtgttttttactgacttgtctccgatttcttcagtattaattgcaatgtgaaacatattcaattggccccatattccaactcaatcgcttcattctcccattttatccatttgttctcatctcgggaaattggacgacggacaagcaaaaaatgtttgtttttaacgggcgaagctcggtttagcactcgaagccgaaggcaaagcccgaagccctattttactcgaagtcgaagttcgaaactcaaaaaccccgaagttttcgaagccgaagtttcgcccgacccttcttcggatttccttgcgcgaatcgcgacttctcttcacccttatcgcatcgccaatctcacaagtctcttctcttcttcctcttccttttcctcctcttcttccaatacctttcaatttctctgtcgtttgtattcttcgccaatctttcgtccttggcctcttttcctcttttcgtcttctcccgacaatctttctctctcatcatagtattttgttttgctttttgggattaatccgttaaagaatctcatattttgaggatttctctcgacattcttcgatggccaaatgaatttcaattttaaagagcaattaaaaatctctcacaattttttattccgtatttttgattagttgatcaatgccttcttccgttttgctaatcacttcccattggactccgcttggcctctcgttggcccatcgtttggtgccttcttcggcggctaatcacaacaacaaattggtcgtactttgtccatactctgccaggggagtgccgcgttctttgttggaagaggcggagcgcggcactgtgcaaattgaattcggacagcacgggaacgaacgatcagtggccaaattggtccaacagcatcaggtggcacggggcaacacaaaaatgatgcaatcagttgagaatgaatgcttctataggccaattatacaaaaaatctgtcttggattggaccagatcaatcattgtgtaaaaatacttcattcctgcccagattcgtgccgtatttctgttgctcgccgacgacgagtgccaaccgccaaactccgaggcaattgcgacacgcacgcgtgccctgctgcgtccgctatgcgctctgctcgaatgcctgcggcaatgtgactctccgccaacgctttgcgttgttgcggacggacaaatgcgtgacaatgaactcttggaatgcttttagtcgtctaaattgcctttaattgtttagtgttttgtgactcaattagccgtaatctcttggggcatttaagtttaattttggtccaaatcattatcttcgttcggcacattcccggctgatcaattaaacatccaatgctaacatcccacgctttgattgtaaattatttgtttaattttcagttcgattcgttcgccgaaggacatccgcagccgcgcgcggtcgtccaatgcgccagcgaagcgtccgcgcggttttcttccgtttgtgcgcttttgcacgcgttcgctgtcaggtgcggatacaaaattagagaggggattttttttgtaaattgccctctaatgatccaaaatgcctcaaaactttttgccattcaaatggtcgctgtggcattccgcctccctttttatcgaagtattggcatttgtaaaaaaataattaattaatgacagtatccttctttaacagttaccgtctgaacatgcaaattatactgatcgaagaacgcttggacagtgcgcataaaagggacaaagcggcagaatttgtgatggaaaaggcggagaaagagggcgaaaaggcgccaatccattcgtttaaaatgagcggacattgtgacggagaggccgtagaaaaggaggaggaggagtacggtagcaaacaggtggaataccgtagtttagcaatatgtaagcgacatagaagaaaatttaggagagatagtctaacaatggaagtatgtgcattaatgaaggtttatgggcaggcacagtattaaataattgtggaggagttacggtagtataagtaaaacaagacgcatagatactgtatttgaattcatttgcctggactacagtagtatcctgcccaatcagctgatcccttgtgctccgtacgctcgtctgttgctcttcggcacgccctctgccattcaaagtgcgcaattggctcagctccgtgcgctcgtccccggcgcgcaactggccgtggccaactgtcggcctggcctggacacggacgaagcggtggaggaggaaattgttgccctgggggcaagccatctggtatttgtccatggggcaggtgagacggggaaatggcatttcacagaaaataaattaatgacataattgccagacggagaaacgcgcgacgcatgggaagcgggcggaccggcgaatttgcgggagaatgtgcgcgtcaacctgttcaggtaaagccctggttgaatccatttaaattttgtccattttcagcccgtggctgctctccaacatttgtgaccgttttggcattgtgttcatcgaatttgatggggagggcaaaaactgttgcaattcggtaaatgtttttgtttgttcgagactctcgaattttctaattttcgaacattttttttaagaatgggaaagtgccgacaaatgctgacgctttacaaatgagtcgctacgcggtggtgcgccactttggtgaaaagctttgccaaatgaaagtccacttggaataataagaaaatgagggcaaagaaaaatgaatccatttatcatacagtaatatggaatttacaaaaaaagcaaaatgatactgtaaccaacaatttatagaaaaaataaaaaaattacatttgttgccacatttgacattatgcacaaaaaacaattagcattcagtgaaaaaaaatgaaagaaaaaaataggaaaaagaaagagagagaagagagagat

SEQ ID NO: 11893 - DNA, 3075 bp, Heterodera glycines
  unsure (1)..(3075): unsure at all n locations
atagtatgggattagtgtaataatattnatgtataaaaaaaagctattnntgattattcatttgagatactttgtaataatttatcaccaaaaagatagcctccttaaaatgtcggtggtgggccttatcnccgaaatggaaatttttttatttgcataaaaaaatcattttttcgaatttttntaagccgattttcggtttcggttaaatcggccgtgacctatcttttaaatagattttttaaattttttgtttttttaattagctcttcttcaattcatttaataatcacttttattaacaggcgaagttgaaaatgaaaattcccgtttttattgagtaattattgccaagaacgttcccggatcgcttctttatcaagaaaaacttcacatgattagccatgttcaactaccacaaaaaaagagtttagccatttctattgaatccttttcaaattttttttaattttggccatttccttggcgtttcgtctctgctgcggctcctctcacatttatgggcgcaacgcgtgtcgttctgtccaccgcggccaacgaaagtgttgcccagttgttgttgttgttgttgttgttgttgttgaaagcatttgaccctcccatttgtcgttgctgaggcttaaaaaggcgtggaaaatgctgacgcaacgcattttgatagtcggagctaaaaacggcaccaaaaattggcaaatataaagattaattagtgagcaatcagaatttttttgagttttttatttggccttaattggttttgtaaaattcatgttttttcatacggtaattgcatttaatttataattttttttcgacctataaatgtacaaaaccggcgcattggcggccatcgcaatcgctgaaaacatcgaagagagaaaagtgatgtaagcaaaattggcaattttccaaagagacgaaatgatacgaatcacaatcgcaaaaaaatagccaaaactgatgatgaaaatgagcatggacagagaggtgagtattttcattgtgaaagtgccattccctgaaatttgtaaaacaatttgcaattttaatgatgattaaatgttgtgccttttacattttgttcggtttctgcgcacaatgacccaaatgatcgcatagcaaaggatgcacaaagtgaccacaacgagcgacacaacaaacaaaattgtcccaattccgccttggtacgaatcggaggggttcaagcagatgacagtgctaaaattgtatgaactttcatacagtcagaatgcttaaaacagaaaatgtctcgattatgaccgagagtctcgaggcgctcctcgccccaatgatttaaccctaaaagtttaatttgactttttcttacggtgagtcagccgtcaattgcggtaaagcggtgtagcagaagtacacaatgcaaccggcgtacagaatgcacagtgttagcagggagcccaaatagttgaactctttgttatggcgtgtgtgcctacagtaggaaaaagccattggacagtaatcgggaactttccggcacacttttctcaaaaaaatatttaaattgttcttccatttttggcacttaccatgcgggaatgagcacactcaatagccggtcaaaagcaattgccaaggttgagaccataaacaaattgccaaaaaacattgggaccaattcccaccagaagcatatttggactggcattaagctgtgattgaagacggagatgctcatgaatggcataaaaatgaccagacagaaagcattgaatgcgatcaaaaagttgcacgacccttgcaaatcgctgaatttgttggttttcaatcaaaatgagtattttaaatggttcattcttactaagtgttcactgctacatacagtaagcttgcattgaacagaatgccaatgatggcaatgagaaatcgtatgactatcaatgccacaaatgccaaagggacgccgtcgcgttgaaaaatggcgtaattcttaaaaaaataaaatgtaattaaaatttactttaataactgttggcttacattgtttcttgatgagtcatttaagtacaaatccgaaatcattgttatataaacttgattttttgcctgaacttaaaatgtttattgtgaaaatgtgcttttttaaacgagttaattatttttgtttaaacataattctcaaaagcaggcataagatatttgtaaaactttatcaaaaaattttcaaaaatttttttcctttatactccattttttaatgtaaagactcaatgcaaaagagagaaaaaattgggctaacaaacaatttaatgagccaattaattgttaattaagcatttgagcttttgatttctcatgactcacagaagaaattcatgtaccaactttttttattactacgctaattaaaattttacgcttaatgccttagcgaagagttctgaaactctgaatatttattcggatttaacgaattaacaaagcattaaaagtaaaaatgtttaaaatttttagcaactgacaatgcctttgtcaattctcactttgcgccgtctttttttcaccatgtaacaaatcacaaaaaaaaagtacaaattttttcccatgcctttggcaccggcggaccgaaaattcaattaaaatttaggaattagaaacattgcattgtttgaatttttgacattaaaatccacacgattttcaaaaatttcggtggtgggcagacccttcgccgcacacaaaatttaccgcggtgaacagagaaaaaaaagtctccacaacgcttaaaaatttcttagactttttttcacataaattaaaaagggttattattttcaattcaataaatgctttcattaaaaaatgttaatttattaattggaaaaactaaattttcgcacggcaaaagacacaaataaaaaataaataaaattttatgtctgtgttagtcataaaagaaaaggcatatacataattaaaggcgtaatagaaaagaaatgtaatattccttgagaaaattcattcgcaataacacttaaggtgtaatataagttttgtaccaanatttttaaaata

SEQ ID NO: 11894 - DNA, 2648 bp, Heterodera glycines
  unsure (1)..(2648): unsure at all n locations
aacccatgtaatgtttgaatgattaatnagttgcgctaacccacctaggtctctctctgtgtttttgggnttttcataaataattaatgagccagttaaagcccaatttgctggaattaacacaccggccgatttttcggccgaaaggtcacactgccaacgaaatttttattttcactaatattttcttgcttttttcaatttaaaaaactttgcgcgtcctttttcatttttcaattggttctacccaaaaggtttgcctataaattgggctgtgatggctcagaaaggcattaccaatcggcttcttcttctgctcacttccctcctaatttggtaaattaaatattcaatcgctttccctcattttggctttaatttgtccattttcagtgcttccctttgtccaaatgaccctcattagcaaatgttcgcttctcctccttttcgtcgcgcccttttcccatgcgtttttctccggctttgagtgagttcattacaaattttgtaatccgatgatcattgtcattgcttttctaatcatttggtcccctcaagggtttctcccaacgcggcacgtctccgtcggcagtgcggttgcggcgggtgccctcctccgcccagcggcggtggctctgtccaactcggcatcagctgcgactcgccgcgccctccaccgccccctccgtgctgcggttgtcagtcgtcttgcggctgcggtggcggcggtggcggcggatgtgagaattttcaaatttaaaactgagtagtgccaatctgatccggacaatttttgccattaggaaaattctcggcattttaaggtacagacggttttgtttagctttggaatttttccttttcgatttttacatttgttgcataaattaaattaattttcgattttttaaggtggcggcggttgcggcggcggtgccattaaacttacaattggctgcgactccccacgccctccgcctccccctccgtgctgcggttgcgggtgcggctgcggcggcggatgtgagttcatttggtgacaaattaagacaaactgaattaattggcatatttgcacaataattatacaataattctttcaatgaaaatccaaaaattacttttcattgctttcacatcgctttctcaaccaagaactctgactttgtgattttggctttttttggggtatattcgaattcgattgaccacgacattcctcgggggtcaattccctaatttaaatttgctattattattaaggtggtggtggcggttatggtgcaaatggcggcggcggctgcggcggttccattaagctgacaattggctgcgaaggcccaaaagccccgccaccgccccctccgtgctgcggttgcgggtgcggttgcggcgggtgccctcctccccccagcggcggtggctctgtccaactcggcatcagctgcgactcccctccgccccctccgtcctgcggctgtcagccctcgggcggctgcggttgcaatcgccgcaagcgcatggcttttctgcgccgcgccgttgctcagcgctctgttggccgtcattaagtgcaaaatgaagcttaattaggcactgcttattgatgacgtcaattgctgacccgaatgatccatttaattattaatattttagcatagaaatgattttaatttttagtgactcaatcgaatttagtattagtttttggaaaacaatccttttcaaatgtttatttaatgaataaattaatcactacaaattcggcgaaggttaaaagctattaaatttctttaaattgaaaaatttcttatttgatggatgcaattaagaactgtcatatttaagctaattggaaattaattttattcaaaaattctaataaaataaataatttctggcgatggtcattagaacggttaatattaatatttccacgagaaaaaaatccaaaagcctttccaataaattccgatgttttgagtcttttttctctctaaaatttatgaaacgaagatttgttcggaaatgactcattaaaatttaatggaaaaatgttcggattcattttgcatttacggaattgaattcgccgcctttcaatgactttttaaggtcattccgttaggctggcaccaaatggcgacaaataaaacaaaatgaatgcattgaatgaccttcaaaactcatgaatttaattgcaaaatcagccacaaatgaaaaaaatgcaattaaatgtacaattaggcaaattgttgggtttaattatttggcagaaaaattggccaagcaatgaaaaggtgcaaaaatagcaaaagagaacttgcaaaaaatattgccatctctgggcaagcctattattactagagatcgacttttgaggcatatgccttttttctgcgcactagtttcgatatattaaacataaataacgcattttccacttggtttgaggcttctaggttgacttttattatgcctttttttgcctttttcgggattttcgtgccttaaatgcattttttggcatttttcccttttggtgcctttttggcgttttttccgaaacattccataaaaatgaaataaaattgggaaaatacacccctaagaaatgacttgaaaaattttcagaaaatacaccccct

SEQ ID NO: 11895 - DNA, 1983 bp, Heterodera glycines
ccatccgaaaacttggcatttgagaggtgttttcggcaaacttcggcaatttcctggttggcaattttctgctgacttttgctttcataacatccaattagctcatatgaccttaattaggggttaatttaattttaatttccatttttttaactttttgcaatttgtctctgtcggcacttttccacacgcttccattttgtcttttatttccattttttcgtcgtaattttttggcaattgtccaattttgtactttcttaggtattgtttacaggcaatgccgaatagtgcggcggaaacgttcagcgaaaattgggcaatttcagctggaaaatcaatttggacgcaatttgtgccgaaatgcttcacagtagaatcccgtggagtgaacagattcggctaaaaaatttttaatttaatttaatttgagggaaatgattacagcagatgaagttccgacatttgggtttgtttttgtatgggtttccaaggtggtcagttcagatgaattttcaatttcagactagaaaaaggcattatttttaaatttttaaaaaatgaaaacgattacaacgcgtggtgtttcagttttgaatggagttacaattttcagctttgtttttggcggagttgcccgagtggttgtggaagtttgaattccccgagtggtcaattttcgacttttttcttcggtagcctacaaaattaaaatttttattaaaaaaaattcttaatacattcaaatctcagttgttttgtagccatgggttctattccccccgtagccaaccatttttttcattcaaaatattcaaatttatttttttaagtttcactttaccatcgttttgcaagtgttcacgtcatttgttccaatggcacaatgaatttcaaatgcgacaattccaagcgctgcgccgtcgaaatcattcaaaaaaacaccgaacggaagagcattttggaactcgtccaatttagcggaagaggaactcattaacgctaatgactcgatcaatttaaattaaatgcttagaacaactgtaccctttgtgatgtcaatgtccaaaaagtcggagccgtgcacaaaaaatttagagcctatttccacggataaatcctttctaaaattaaatttgctttttaattttaaattaaatcactcacccaaaagaggacttaaggatcagcccgttttccttctgttcgatcattagcgcgtgccatcccttcgtgccgtctgtgccaacacatctttcagccaattgcttatttccatttcgccttttgaacacttttcccactttccatccaaaattatcggccattttgctcttgtagcaaatcagcagactaattaatgcgggaacattaattaattatcaccaaaattatttgcaaattactttttggctttctttcccattctgatcattccgtttccattcaattcgcactttttccatttgtcctcggcaattctaaagaaacagaaagcatttgaaaattgatttgaattcatttaattacccttcaccgatggcatttgtcgccagaacaacaaaaaagaacgaaaagcaaattaaattcattttgattttgggaaaggaataaatttgctgaaaatgggtaaatgattagtaaattagtgggtttattggctttgcaatcgcttaaaaagccaaaaaagccaatagaaacggtgactcatcgtttattggctttatctttctgctgatcggaattttgtccattccatattcacaaatcagtgcagtgtttgggagagaagcgaatgccttttttcattttatgtagacaaaacggacaattttatccactttcacattgaatcatcatcataaaaatatttagaaagatttgtgcataattattgtataaagtaaagtaaagtaaaaatatttttaaaatggacgatttattagtaatttcaaaaattattttaagtccaattaaatttaa

SEQ ID NO: 11896 - DNA, 3688 bp, Heterodera glycines
  unsure (1)..(3688): unsure at all n locations
ttcaaaaaaaccccgaacggaaagagcattttggaacttgggccaatttaggaggaagagggaattcattaacaattaagactcgatcattaaatttaaatttgtgtcgaactgtaccctttgtgatgttaatgtccaaaaaagtcggagcctggaataaaaaaattcggggtccatttccacggggtaaatcatttctaaaattaaatttgtttttaatttaaaattaaatcactcacccaaaagaggacttaaggatcagaccattttgcccgttttccttctgttcgatcattagcgcgtgccatcccttcgtgccgtctgtgccaacacatctttcagccaattgcttattcaaattgcgccttttgaacacttttcccactttccatccaaaattatcggccaatttgctctggtagcagatcagcagactaattaatgagggaaaattaattaattatcaccaaaattatttgcaaattactttttaacgtcctttcccattctgatcattccgttcaattcgcactttttccatttgtcctcggcaattctaaagaaacagaaagcatttgaaaattgatttgcattcatttaattacccttcaccgatggcatttgtcgccagaacaacaaaaaagagcgaaaagcaaattaaattcattttgattttgggaaaggaataaatttgctgaaaatgggtaaaatgattggtaaattagtgggtttagctggctttgcaaacgcttaaaaagccaaaaaagccaatagaaacggtgactcatcgtttattggctttatctttctgctgatcggaattttgtccattccatattcacaaatcagtgcagtgtttgggagagaagcgattcaaatgcctttttttcattttatgtggacaaaacggacaattttatccactttcacattgaaccatcgctaccacaaaaatatttaggaagaatttatgcataattattatataaagtaaaataaaatgatttaaaaaaaatcgtttatttattaaaatatactatcagatttgtgatataaagtataaaatatttctaaataaatggtcgatttattagtagggatgcgatttttagtcaaatgcttaaaattctgcgcacttattgcagagataagcacgaaaaacacattttaattaaattaattttttttcagaaattatggaaaaataacaaaatttgacccaaataaaattatattaaaagatggataaaaaattttaaattatacaattaagctttttgaaaaaatcgagttgataaaatatttaatttgtttattttagtcggcgttcgatcaaaattttttcagatcagagcagaatttttttagataaacttttgtggtcaaaatcagaaaaaaacactacaaaaaaggagcgtaaggtgatttcaaaggacataaggagacaatttttgaatttaaaggacttttcaaaagggagccggaaaatgcgacaccgagagaaagtttttcatttcaagaaaatgcgacactaagaaaatgcgacaccaaacttagatttttaaaaatattttaaagtcttgaaaatgagcatcaaaaccaaaaaagacttgttaattgtgggtaagttgattttgtaaggtaataaaggaaaagcatcttgaagcaccagaattagcttatgagtctttaaaaattttcatttgcttagaaagagtttcttttcatcaagagcttttgagtggccaactttatatatttttattgcgaaaattcattttaatttttttgaacaaaagaaataaaaaaacgatgctgtatagttttaagggctgccactgatcaatgtttcattttttacgggtgtatttaaaatgttcaggtcaattcatatatatttcctggactgtggtggcccgaaacgcacgaaaaacatgtttttagcttggttagaagcttctaggatggatttctatatccatatttcgcgatttatgtccatattttggcatttttccaaaaacctattagaacggcccccaacagctaaattggccgttttgacccctaaagacctacaatcaggtccaaaagttttacaccaaaaaatattttagtgaaaaacccgattttcttaaaaaaaggaatggtggcaataatgttttgtttatgccaaaagaaacgccaattagtgcactaattaattcccaaaacttccccgataactctcttagttgacaagaaaattttttcatgacccgaacaaccccctttttggcggtgcaaaagtaatgcaccaaaagatgtatgcacgattaattcaattttttatgagattttgatgctgatcaaacagtcttttggaccaacatgatcagaacacttcttcatggtgatctggaaagtcaaaaatagcttgaaatcggaaaaattttcaaaaaaaattctaggggattgaaaaagttttctggaagtttttgggaatttattagtgcattaattggcgtttcatttggcaacatttttgagaaaatcgagtttttcactaaaatattttttggtgtaatactttttcacttgactgtaaaaaatttccgaaacggacattttttagcaaaatttttaaaaaatattgattaaatttagatttttcttaaaaaattggttaatttatgtcaaaaataaacaaaaaagcgaaaatttcgcttttcaggttgatttttcgctaaaatgagcaaattttaatctgtatcatgtatatatcttctaaaatgatttttaatacaatatgcagccatttttgaaagttctactttgcgtttagctgatttgaagattttgagaattcataccttaaatttggaaaaatttatgtccatatttttgccattttatgtccatacccgctcccatccgatgaaagcataaatttagcgcgctatggccctcagccaaagaaatgaatttgcttagaaataaaaaattttaaaaaatttgttcctgaaaaagtctgattagtattgttcacgcttttcgaaattcccatttccatcccactcaacattaagttggttgcttttatgtcaatttagatgaccttaaaacaaaaagcatcggcggagcaccgcgaaaaagcaaaaacaatttaagaaagagttggaagaggcggcgaagggaaccgacaattgggcgtgcacggctaccatgaggctgcgcatgtagcctacatctggctgcacaaaaacaatggggactggttttacgatgtcggttcagtgacgggtcttatgattaagctaaaagagaaatttgcaggccgtgctcgatagccccacagagggcacaacaacgtattatgagggcattaattgcacgatcgagcaatttcaatgccggttggagcggaagctggccggcgtggctgccgagtgctttttttgcgaacacacgcagtacgacgcaggaatgggaagaatttgaaggagaacagggtgaagagggacatgatgatgagggtgaggaaaaggcggaagatgatgatgagtagggtcgggatttctagtgaaaaaactttttttgctcaattgttttgaagaaaggagctcanaaaacccatttctacattaaaatttttncgcttggacgtcacttttcgtcactagaaatcactattttagcgtttcgtcac

SEQ ID NO: 11897 - DNA, 1130 bp, Heterodera glycines
  unsure (1)..(1130): unsure at all n locations
tttttatttctagcatttgtacgtaataagtcgtttttttgaaaanncccatncaananggagagnncggncncccctttaaaaaagngnancgaagggcncaaaaaacgcnngcgccggcnncnannnacannnannannnnnaanagncctctaaaaaangnnnnggncgaananngaacannggcncgcggnnncannaanncangcaataattaatccgttcattagaaaaattccaaatttacacggggcggtttcaagacgttctctcaattgcattaacttgccaacctttaataatataacccttcttgttgatctcgtattataaaatccaaaatatttgacaaactttttcaaaaacccatgcatattttcatggaataaatgaatataatttttagaatctttttgctaccaaaaaataaaaatcctttatactaacggtgtttataagttacagctccaatttcattataagaattgcatttcggaaatttgaaccgactctcaaaatgattaagtttgtttcttcacagtttgggtttggaatcagttcaaagcaaacaattcataatgttctataagctttctgtttcccagtaacaattacgaatgtataggaatttaattgtctggagttccgaaaaagtttaaacttgcacagagtacggctccatgtgatttttatttctagcatttgtacgtaataagtcgattgctttaaaattcccattcaatatggagagttcgttttccaaatcaaaaaagtgtatcgaatggctcaaaaaacgcttgcgcctgcttctatttacatttattatttttaatagtcctttaaaaaatgttttggtcgaatattgaacattggctcgctgtttcataaattcatgcaataattaatccgttaatgagaaaaattccaaatttacacggggcggtttcaagacgttctctcaattgcattaacttgccaacctttaataatataacccttcttgttgatctcgtattataaaatccaaaatatttgacaaactttttcaaaaacccatgcatattttcatggaataaatgaatataaatttcaatctttttgctaccaaaaataaaaaatctttatacta

SEQ ID NO: 11898 - DNA, 3254 bp, Heterodera glycines
  unsure (1)..(3254): unsure at all n locations
agatatttgttataaatcgaaaaatcccatntagtcacgatgaacggcaacctaaatgcttttccgaagacaatcctcaaaacgattcgccccngaacgaggaaaatggaaatatacaagaaaatacgccgccgaacgatcagtaatccacgagcgatgtgagccttaaaccatngcataagttggggggagaggttgagcccaaaatgtcgcttccgaaacatcgcagccaaaaccggttatggtgaattactgatttttcaaaaaaagttttccaaaaggtcgctgaaaatttttttcgctaggacaaaaaatcgcttgatagttattgatgtgatgaaaaattatagcattttttgccaatgcttataaaaaaactaaaaaggttacgtatgctaaaatttttaaaaattgaataaaattttttatttatttcgaggttattctagaaccagaaaaattagagaattgaataaatcatggtttatacggcttgcttaaggcctacaagcggattttaagactaactgctttctattatcctacaaaatttcaaaaaatttcaattgtttcaagaagttatgaccaaaaatgttcatgaaaatttgcttttttgagtttctcaagtcataacttttttgagttaaggtccatttataaatttattaaataaacaacatcaaatgaaacataatttaaaataattaaaacatattttaaacttaacttaactaaatctttgattttaatatccgggcaaaaatggacaacaaaaatgatattattgcaaattttctgacacgaaaaatagataaattcatgccaatttcaaacgttttaaattttcctcaagtgtttccgtgtggcacattgctgccgtttcttcgtgcgcattcgaatagagttcagacgatctattaaatatatttaaaatgataataaagttattttaaaaatctttgcgcacaaatatcgttcgcccgagcttggcaacacagtgacgatcagtttattggcattttgtttttgccgcgctatttgcagagaggcgaaaacattggcaccgctggaaatgcctaaatagaaattaaatattttaaaatatttttatttaatttgaatttaccacacaaaaggccctcctccgcggccatccgtcgtgccattgcaattgcgtcatccgagtgaacttgcacaattccgccgccgtttttgtacatgtgcgtatccaacacggcgggcactgtgcccgtgccgaggccttgaattcgatgctttgctccttcgggacggcatccactgagcacggcactctccgccggctcaacggcgtaaaactgcaatatttgtgaatgcaattttgctatccgaataattaaatgtttgaattttgcaccaatataatccctatataaaacccatatctgattactagggatgggatttttatgtgctaaaaatcctgaaatatgtaataaaatatgtgctaaaaaatgccaaaatatgtgctaaaatatgtgttaaaaattggaaaaatcaagtgtctttttgcataaaaattcccaaaaatctcattctttatcatttttcgcccatacaacgcaaatcaaatacatttcaaagtgtttggggtaaaattgatctttttttgattaatcatttttataaattgaaagttccagcagagaattttgaaatccaatgacgaattaatgaattcgattttgttactttctacattcgaaaaaaaattttaaaaatttgaaaattctataagaattgtgaaaaagttgatttttacggtgtatttttcaattttcttgtattttcattgcaaatttttctcaaaaatgccaaaaccccgaaatatgtgccatatgtttttatgtgccaaaatgccaaaatatgtgtttttatgtttttataagtcgctctaaatcgaaaattgttcggagaaaatgttatttttgggcttctctcgccataactaagccgcagaaaaaatatgtaaaaacataaaaatcccatccctactgattacaattctttgtattacattgagtagatttatgggataaaaattaataaataatttttttaaatgttatttgataaatgcatttatagtttttctataagaaccgttatgcttggattcttttcacgcaaataacgcccaacgcctgtcatcttaataatgaaaaaacaacaaataatttattaaaatattttcatttattaccgttcctccggtgccaattccaaatacgcaaatgtccacttttccctgcgtttgatgccaaatttcaggccccgttgtccgatagtgaatttcggggttcgcctcattgcaaaactttaataaatttaattgaccaaattaataatttaatatttaaattttaaaacttgtgcctgcatgggaatgaaagaattgggaatttctcgtgccaattgttccgctcgctctacggcgccagtaaagcccaattttgggtctgtcagcaccaattcggcaccaagcgcacgcagcactgttctctaataaagtaataagaaataacacggcacttttgttgtcgggggtccccgaaaaaattccaatgggggggcttttttagagtttggaattagttgaaaaaatccaaaacccattgaagaagttttccacgacttgtgataaaacaaaaattgcaaaaccaaaggtcccccattgaattttttgggaggccatcagcagcaaaagtgccatttacactttaaccgaaaaaatttttataaattaaaaattaaatagagtattttctcactcgttcaattgtatatgacgaggacatcacagcaatgaaacgatagccacgaatggccgccatcgaggcgagtgcttcaattaattgacggatttattaatcattaacacaaattgattgctgattaattaatctttcatattaattaggaaaatagatattaattaatcattagcataaactggttgattattaataatcgttagcactaaaaggttatgatcacttaatgattgtgaaattgataattaattcattagaacaattaggtcaatgattaattaattattattgtgaccaatgcccgtgtttcctgccgtttgttcaattattgtgctgatccccggcttaattcggccttctttttccgctgcgtcgatcatagcgacgccaattctgtccttcactgagcccgaggggtttagccattccaattttactgct

SEQ ID NO: 11899 - DNA, 2096 bp, Heterodera glycines
attttcacaacactttgttagtcgcaataaacaccaggaagtgctgaaactgctcgaggattgccgtgaattgctcagcgaaacggagggtaccaaaatcaaatttcgctattaattttgttatttgttagtgtcatttcagcgtttttaccctttaagaggacaatgtacgcctctctgaacaggtcaacgttttgaaggaggaaattcgccgaatggaacggtgtaagaaaagagtcgaacatttgggcaacggcgtttgtccggagtacttcaaaaacattggtgactctcccattgggggcgccacgttttaacttttaaattccattttcagtgcttaaatttctggccccaccgaaagtgcgtgatgaacgtgtccaattgctgcccgtcctgcagacgattctccacttggacgccgtcgaattggaacaaatccgacgcttttgtactgcacaaacgccagatgagacggatgacggagaagaggagcaagacaatgaaacaaagagaaaagagattggggaagaaaacgacggggggtggacggcgtggattgggtggaagtgaaattggaagtgaaagtgacggagcccggaagtccagcaaaaattttttttcctctgaatgtttctctgttcagcactttctagtcgtgttctgttcttacatttttcatcaaaattccgggctccggtgatgacgaatagtcggggagatgggtgctaatggacggagtgcgaaagtattaaaaatgaatgggaagatgtgataaatattatttctatttatttttatctgctttgtcttcatcaattgactaacttacaattagtctgtttattgtacattatcatggaaaggctgtgttcaatcattaatttctttcttctatttcaattcaatttgtgtccgatttcaaaattccgagaaaactaattccaaatcaattgtttttagactgaggacttccattttctcgtgatcataattatcatgattttggatgtaaacttacatttttctgaaaaatttttatgttggtgttttttcaactgattagttaattttgcagccctaatcatgatttgttataacggtgcaatgccctgtgttctttcacttaaaaatgtatgtggtaaataaatattagactttgacaattcttttcaggtttcactggggtttataaccaactgcctatcaattcttggaccgcaaccaaaaaagacaaattaggcattgttcgaacatgaaaaatactgtacaaaaagtcggattgccagttttgttaataaaagtgcagttgaatcctcgcatgtatctgcttatacctaatctattttatattttatttgaaattactcattttcatttagagtaagtatttgtttcctcctcctcccactttttgccatgactgtccaacaacagcagcagccgtcctccactgccccccatgtgccgtcctcctccgcctcgtcgtccgttgccactgcaccgaaacgccaattccggccattggccgagtacagaaaggcactcgaagagttctcggcagagcgccagcagcagcgtgaagtgagtggggggggggggagggcgttggttgatgtggggacgagtcagcgaaacacgaccattcgacaaaacggtagcggactacttcagtctactcaaagtcaaataaagcaatgacgtggtaaaaatctacgtctcactcttcacctgcttggccatccgcgcccttcatttggaagtagcacgaagactactctgttgaagcattcctccgagcctttcggatattcacgggcagaagaggcataccatcacttatcatgtccgaccaaggtacaaacttcatgtctggagcaatagtcatcagagataactggaccgacgcgttagtgccggagtacatgcaacaactaatggctccaagcggaatcccgttggattttcaacacagcccacgccacttgaaaaggcgagatttgggaaatacttgtcggcatcaccaaatacgaactacaaaggacagtcagcagagaacttctcacattgtacaaggtcagcacactgctctgtga

SEQ ID NO: 11900 - DNA, 2438 bp, Heterodera glycines
ggtcagtcagctgaccccattcagaaccaaaagcggacaaaaaaaacaatgccaaatttcaaaagtttcaggttacaacggtgacggaaaacggaatgcgaataacgggtaaaaatggacgagaaaaaaaagggatgggaattgttatcaaaccgaataaattaaggcgctgatgaggaggaagaagcggaaaaggacgcgccaattcgagtggagagcaatttcattgtcagcgtaagcattgcggaaaataattgagtaattagaaaaagggtatttttaaaggtcgatgaaatggacgaaccattggcattgaaattggagagacaaaaccgaacggagaaaaaggaagcgatcggagagaatccaaagtgggggagcggagattatcgaccgagattataaatgaattcgaatttgcagcaaaacacaacgccaaattgacgaggcgcacaccgaaagttcggaagagacagagaagcagacgaaggccaaagaaagcgaagcgcaagaaaaacaatgagaaaaagccacactttctttgttttgcccttatttgatcggaaagggcataattaaacggaaatgctttaataaaatcaaattatgcaaatgccatctgaaaaatgagagggcgctgatctgaaataaggggggggcatgccccattttgagggcatttgaatgggattggagggaagggcgagcgacggattgccgagttggatcgaacccaaaaaaagtattaatggggaatgatagaaaaataaacaaattaaatgtatcatatttttatggccatacaaaaatttaagaacatttaaaagcatgaaaactgttcaaacttcgataagccaaaccacgcttgatatcatcggatagcccaaagatttctctattagttattttccaataaatttattattttaaagttagggacaaaaacttcgagtcttggttttttgcttatactttttgtgattgacaagatagtagaggatgatttgtagaactaccacttcaatgatgccaacagtgttaattcattaatttgatttatttgagtaaagaaaattaaaaaataattaaattaaatatttctatcactgatacttttttaagttcgattctttatcaaaaggaggtcgaacgggcatttttgaaggcttttaattgcgaaggaaaagcataacaattctcccgtggtctttgcttatttgtcaattggaataaattgcaaaatgtccttaaaattcggtcatttgtcctttcattcgttggccctttcgtcggccaatgaatttaatacgacggacttttggaggtctcttcgtcaatttgttttcgcatataaacacagaataaaaggcacaaagttggcccactcatccaaattaatgtcccaaaacagcaaaaacaggggcaattggcaatgggcggagacatttccaacgccggaggcaatgaattgcctaagggacactttcactttggaattttaactttagctttattgcatttgataatttatatttttggattattttgacaagaagataaaccgcaatattaaattcccttgggtggccttttggccttttcgctgggcattagccacagaagaaaggattattaagccgaagaagttgattgtgggcagagaagcgaaaggctgtgtctgccgtcctctgcgtgtctgccctgcctcgggcatttcgtccgtccgttgtctttggcattttgcgccagctgatgcgctcacaggcgcctgagtgttttcagccgccgccaccgccgccccccgggggacggacatttggccacaaagtcgggggaagtgcttgcggcggcggcggcggtggcggggcttcgcccatgtcacccatttccgttttccttttccattttcatttggtgccattcatttttagcaaaacgaaaaaagcgggaaaaaatcaaccaaatcaaattccatggccatcaataagcagggaatggaattcatttttaaatggtttatttatttttgccctccaattgcattaattcccctctctttccccccaaagtgccgtcctttccctttctttccttttttatttattcagtttttcgtccttttataatttaatttaaaaagcactgaattatttatgccacttttcgagaatatttttgcacagtaagacctcaaaaattgaaggaatgggaaaagagacgcgtcagatgaggccaaggcaatgaaacacaaatggtgccgttctcttctgccggtgtctccgccacctttcgcccattggcacgcgaaatgggcaagtccaattaatttggcaaatttaaaatatattttaatttaattagtttctttttgttttttagttgcttgtcgcgactgccttttgcatttggctttttctcatcgttttggttgtggtgca

SEQ ID NO: 11901 - DNA, 1938 bp, Heterodera glycines
aaatcagaatgttctgatcttatagaattacaatgaaaaatcagaaagttctgattttgttttaattacaaagcaagaatcagaaagttctgaacttgtataattacaatgacaaaatcagaatattcggattttgctttaagaacaaagatagaaaatcagatgttctggtcttatagaattgcaataaaaaatcagatgttctgatcttatagaattacaatgaaaaatcataatgttctgattttgttttaattacaaagcaagaaatcagaaagttctgatcttatacaattacaacgaaaaatcagaatgttctaatcatgcatatataattacaatgacaaaatcagaatattcggattttgctttaagaacaaagatagaaaatcagatgttctggtcttatagaattgcaataaaaaatcagaatgttctgatcttatagaattacactgaaaaatcagaaagttctgattttgttttaattacaaagcaagaaatcagaaagttctgaacttgtataattacaatgacaaaatcagaatatgctgattttgctttaataacaaagatagaaaatcagatgttctggtttttccttaaatcagaaattctgatcttgtacaattacaatgataaaatcagaatgttctgatcttatagaattacaatgaaaaatcataatgttctgattttgttttaattacaaagcaagaaatcagaaagttctggtcttatagaattgcaataaaaaatcagaatgttctgattgctgttaaaagcccacataatgacattaaacactggtgttacaacagcggttattaccagggttcgcagatctgaggctttagcctcattttgtggttttttgataggccaatgaggctaaattttcaaaatgaggctttttgtggttttttgttaaattttccaaaaaaccttttttaatgaaaatctgctaaaaatatggtcaaaattctcaatttttcccccggcggcgcctatcggcaccgccggaccctaaaaatcctttattttcttaaaatttttgcttaaaattgcaaaatttggccatttttgtgggcaaattctgttaacaaatcacattaaaaattacaaaatttttcccggcaaaagcatcccaaatgtgctgctctaacggcacactcagctccaaaatggtgccccttctgtcaaaaatttgctttttagaacggagaaattcgagcacggaatggtcaatgtaagtgaaaggggggtaattaagtgctttaatccgccgaggggtgctgccccaactctgctgatttatcatcatcattttgttgccaattttcactgaaaatctgttaaaaaaatgatccgcagtgtcccaaaaaatttattttgttttgtcataaaaataggtcatttttggtgaaaatctgttaacaaattgcactaaaattttcaaaaaaaaattttcctgcggcgcctcttccggttcattggtcccgatttttaaataaaattctaaaaaaaatacatttataaggctaattcagccgctgagtacgaatctgaccaacttttcaaccagtttcgagtcccgaacccaaacattaaaaaaaaattcaaaaatttcaatttcatcaaatacacctaagcattgataaggtaataataatatattctgtaatagatccaaattttatcaaacgatgccccaaatgtgttttttccgaagttttcaaaatgatttaatttattattcacgtcttaagttatgtaccattatatcgacggcaccaataaaccaccggaaagattgccgatttttgacccccaaagctgattttgaaaaatttcagttggcaaccctagctttaatacacacaagattttaaaaagcaactatatatgaaggtcatcaaagcgaattttgttgggcag

SEQ ID NO: 11902 - DNA, 1824 bp, Heterodera glycines
catttcatggttgggtgccactttcacatgagatgttaatttgtgggtataaaatttgatttgaaaaaaacaaaatgccaaaaacgccaccaatttaggtaagtgatagtcgcaccatgggtcacataatttatgtagactgggtaattatctatatgggattattacatgtattcattttataggtagttgttatttaattggtcagtgtttccgtaaatcaatgtgccaatttgagtaaatttatggccaatgatgatgatgccattttgattccaaatagaacagtcgaacattaattttgcccatgggaaacactgagtggtattgcagagtgatcagcaggcagacaaagaaacaacacacactctgatcagagctaatcaaaatttttgggctttttctcgattttggattacaaattttgaatccgaatccaagaaaaagtgaaactaattgtgtctatgcaaaacattttttgtcttggtcagtcacaaaaagcactgcgatcaatgcgtgaaggaaatgatcacctctgatcagtcctcactggccccgattgatcagccttttctccaatatttgccctcgattgatcaaaaaaaaaaatctcacttacgcccattctctatctgatcaccattttccaatcgtctgtgcttgctgatcagcgtcagatcagtccctcaatgttgggcggtgtgatgtacggcaagtccttggcatgcttctgctcctcctgctgtggccgatattcgccgtggattttgcgtcgatcgcgtgcccgcttttgcacaaagaaaatggcaatgccggcgaccgcgcaaccaatctgtggggccacaaattttggaaacattcattataaaattaaataaaaattaatgatatgatatgatttaatttaataaattttgatcaaaaatggcaacaaaaggaaagggcaaatccaatttaggtgtcccctctattggcaatcttaaaattaaaaattttttaattttcaagtttaaatttgttagaggtttttttccaataaaaaaaccataaaaattttctttgaaaattattaaaaaaattgaaaataatgctgtaaaatgacaactctaaaaatatagaaaataaaaaatttcggctttctttaatgatttcacttcggttgaaaattaaattttcaaaatttaaaaattctcaaatttaaaaaaattgaataattatgattttatttttgttttcacagttttgaatgcctaatttttctttccctgaatcagcagtctcccgggtcccgactttttcctaaaaacctaaaaaataagatttttcgggagggaggggggggggggcgagaacacccgttcctcagttgtcccggtcctaatagggtaaaaatgaaattttccaccgtaaaactcagtaccaaggttgccgtgacgaccaaaatgatggtgtaaacagaaatgccgacgtcctcctcgtgtgatggcgaaatggttgttgcttttgttgttgtcgacgaattttgcgacaataatttttcccaactttcaagggtactgttttcaaccattttttttgatgatgcctccttttttgaacaaactttgattacaaaaatgggattttagtataagtgaaagaataatggaaaaatgaatacaaattgtgtacagtatattgagtaatgaatgaatagtactactgtaatatgccagagatgggacagaatttagagagcaaatattaacatttttttgtggcagttaaattcgggttttcaataaatttttgaaacctcggaatttgttttaagaaattttaggc

SEQ ID NO: 11903 - DNA, 1580 bp, Heterodera glycines
  unsure (1)..(1580): unsure at all n locations
caatccgtcagtgggcaatccgtcaataggttattcataagcaaatttattttataagacacaaatttatttaaaaaccatggtacaattatttaagtcgctaaaaatgttgattaatattttgtaatattttataaaatttatgaaataatctttttaaagaatttggtcaattntagcaatgtaagtatatttattaaatacacnaatcatttcgcaaagatttttgatcattgctcaaaaaaattggacgaattgtccactaaacggggatgtccattactgacggattattccagtgacggtttgtccggactgcggaccccccgccgcccggcgtggagcgtcaaagtttttgttcaaaaatatcactgtgcatgaatgaattgaatgggtgtggaagtgatggattcaatgaatccaaaaaaaaaaaatggcgccggacaccgacaaaatgcggggagacattcattttcattcatcattcattcatcattgagctgctcttctgtgaatatgaatgaatgctgtttggggtgctttaatcgcactcgatagatcactcgggccgtaaatgcgacggcggcggctgtgatctccgtgctttttgtatggggaaaaatttgaataggacgaaaaaaaaattggtttttttaaaaacaaaacaaaatgatttttgcttgattctaatttgggtacatatatatcccacaggggtcttaattaacatttttatttaattggttagtcattaaaattcagtatgaaattttgaatgctgcgaatagagcagaggcatattaaatacggacaaaatgatcagttagaaaataacccctcacaatgggatgccaaaaaaatggacggagaagaacacaagtggcaattgatcagaaaagcctcaaagagcacaaaatgatcagtaaaaagcaagagagcattgtttagaaaaggcggcttaattgtgagtggtaggatgagaggcgttgaattcggggagtgatcagggaaaagcaagtgaccattgaccaaaaaagcctcaaggagcacaaagtgaccagcagaaaagcaattgatcattttgggagagagagagacattgaatgcaaaaagtgatcagagaaaaaccaatgatcactgatcagaaaaggcataattctaagtgggagagaggcgctgaattcggggagtgatcaggtgaccattgatcagaaatgcctcaaggagtatgaaatgatcagtcaagatgcaagaaagcattgatcagaaaaggcttaattgtaagtgatcagcacgcattgaattcggggagtgatcgggcagaagcatgtgtagtgaatgaccagtagagtgatcagcaccaaatgacgcctccgggggtgcgcagcactaagtgaattgaagtggcgcaaaaattttgccggctgttgaaaaatgatgacgcattataaaataaataacacttgagagagacggcaaatacaggaagaaaacacggatgacgacgaccactcgaaaaatatttcgcagattttgaggggtgtccgtccgtccgtccatcggacggggtgggggggggg

SEQ ID NO: 11904 - DNA, 1023 bp, Heterodera glycines
  unsure (1)..(1023): unsure at all n locations
atggggcgattgtgtgacttacgtcacttgccaaaaatggaattctttatttaccgcatttaatttaaaaaataaaacttaccccgtgggaaaagcccgcaaaacatcccgtaattatctaattaaatcgaacatcatcaaatgcaaaataacatattcaacaaaatgctttttaattacttggacaatgctgaacagtcgcaatgtgtcctcgtcttcttttctgtctttccgggggataaaccaattaatcagtcccatgggagctgaaaatcattttcgttgtaatttgcttaaatgtattggtgattttcttcgcattttcttacagcattcgaatggctgtgaacgattattttcgaccattttttgctgcgttttttcaatcggactgatgggtactgtaagcacgcgggcatttgtcatcggtattacagtagccttcgatgtttcgtttttgctgtctattaaaaataaaattgcaaaaattactgaaaatgcatactttttttgatccatcgaatgagttttggtcgcaaaatgaacaaataaattaacattgcactaaatccgactccaatgcttattaacagagccaaccaaaagggaatgtgttcaagatgaagcactaaaagataattaagaaaatttaatttaaaaatatttgttttgaattagaaaaatgacaaaaatcaccttttgaaccttcaaaaacaaccataaaagtgtaaaaagtgaagcaaagaaaatagaaaattggcatcgttcgaaggccacatttgaacgggtttttctttaatgaaattaattaaatgccttaattaatcacattgtccaaattaacccttctaagcacagcaaaatcgatgcacatgtaaataattgaggaaattgagccggaaagaattggcgaaacgacccaagaagcagcaactttggacacctgtagaaaaaaggaattccataattcggttgcacttttaaaggcttggccaggtatttattttttggagaaaaanggga

SEQ ID NO: 11905 - DNA, 1923 bp, Heterodera glycines
ctatgatttaatacttatcaatgttttaccattttttccgtttttgttttcatccattttaatatttgatttccttatgtgggccttttcatcattcattcatttctgattttgcctaaatcaccatgctccaatggattccggcatttcccttcatcagcagagtgaagcccaatgttgagccgataatggcatgcgtggaagagattggaagccgaaaaatagtggccaaaagtaaccagcaggcacagccttagaaaaactttttgtaaaaaggacaaaatggccgctaatttaaaatgacaaattttgaaaattataaacaaaagcgaggaaaaattggttagcataatattttgtacggtaattcctagttaaaaattttttttctgtgagtttcggggtcgtttgattatgatctgacacctttcgactcaaaaccatgaaaacgaattaagacaacaagccaacatttgaaatctggcctttttgttcgacttcggttcggaaattctgaatcaatcgaaatgaatgtcatattattgagaaatgaccccaaaaaccattgaatgccatcccttcaaaatatgtcattttcaaacaagcgccaaaaatgcatgtgactgacccccgaggattgccacctgtccgaccagcaaatcctgcggcgctcctcggtacaattcaatctcgacaatacctttccgtacagtgtccacaacgttgtagccttagcaaacgcaaaagaaaataaaataaattccaaaataattattgaatttgttttatttttaatgaagagattgtccaaaaagctaatttcattcaaaattaatttttaaaacaacataaaaggtcaatgaattctttttgtacaaaattaatttgaaatttcattacccactaaaactgcgccggccgtttccataatcgtcgccattatctaaattattttaaatattttattttcaattcactttttattttacatttgcttttcgcagcgtcaacacttttgagccaaccaaagtgccaaatgcatttgccacgtcgttggcgcccatgccaaagccgagcaaaaatgagcacataaagccggcgatgactgtccacagaaattggtgctgaatttttggaaattaaattaaaaaattatatttatttttatttacttgaaaatcattgagcgataatattggaactgttgtcattaatagcaaaatttacaaataaaaaaatgaaaagaaataaacaattaaaagcgatacgaggaaaaaagactcaattaaaatatgaaaaatgtgaaaaaattaataattaaggaatttcgtcttttatcaacaaaaaggaaaatccaaaatcaatcaaaaaaaaaagactgcacttaattgacactcaattagcgatacttttgtcggtttcatcattataaatacaaatttgtgaatgattaaaaataacattgttttccattgatcagaaatcgttacaaatcaaacagtcggccaaaatagggaacaatcacaattttatacaatagaatggtgtaaataataacaaattgtgtaattgttcctttccgtcgttgacgcaattgggaggacgagttttaaaggaaattgacaaatttaataatcaaaacgagtgcgttaattattaaataaaaattgaaaatttatgggttaaaaaagcgaaaatataataatattgaaaacttaaaatgttgtgattggagtttttcagaactgtcgatgaaattgaaaaatataattttttccttttgtttactctttctttcgctttttgttactaattttgatagtttggaacgctttcattttgaagcaaaggcaatgaatgacaaatcaaatgaaaacgaacgaaagtttatgggggtctacataaacaattccaattccgctg

SEQ ID NO: 11906 - DNA, 2842 bp, Heterodera glycines
acgaattgccggacggacgtttcgtggacccaaaaacgggtcgtgttttcaaatacgaccatttgcgaaaggaggcggccgatgcgcagccgtcggggcccaaggaaattgacgaaaaattggagccatggcgaaaggcactgcaaaaagtttgctttttggtactttctccaatttaggacactttttgacgaattttagtattatttaatgagaaaaaattgcggaaaacccaacgcgaatgatttgtccagttcatccacaatcaatctcaattgtttgtttgctttttgaggagttggacgagtacatttacgagcatttccatctgaccggcgtcgccactgttttcacgccgttgcagcaccaaaaagagccgaaactcattctatgcattgagtcccatcagttccagccaaaaaactattggtttgcatcaatgtaaaatatctgttgaattttcaaattgctttaggaacggtcgttggcgttccgaatggcattttcccaactttgacggctcttcaaaaacggcggggactctccaaaaatgcacgggcaaattgcgtttgcaggtgcactattatgaagacggaaatgtgcagctgatttcggagaaagaggcgacggtggaagtgaaaatgacggtgagtcacagcacaaaacgatggatcaaatgaaataatgggtaaaacaaaccgcaaaattagggggagggaagcagggtctaattagcgttttaattgggtcaaagccgaggctaatgaaggcgaacgcgtcgcctttctgcgcgttcggtgtgctatggcctcgtaaagtgttttctgactttgataagccgaagtgactttattttctttgtgttggcctccggtctagaacagtcggacaattaatgtcgaaaaaaggaaaaaagcacccaattgtttagaatgaccgggagacgagtgcccgtgaactgttgcgggcaatttgcgaagcggagtcagcttatcaggttggcacggtgttagggtagttgctgctcccttttcaatttaatggattcgtttccataaatttcaaaattcaatctaaaaagacgagttttgttatttttcttgcccaatccccccgtttagacctccatccaggagtcccaagtgcaaatggagagcaccttcaaggcgcttcgccgtcagttgcccgtcactcgctccaagctgaactggctgaacttccactccttccgcatcactcaacaggacatgaaacagccgccgacgcccaccgtcgctgtccaacaacagtcccagtgaaaaacaacaaatgaacggactgacggacggatgaatgacaccgcaactaattggagagagacactttcgcgtcctcaccactcatttgtttagttgtactcattcgttcttcatttcattaggcttattgggtgcgggcatttattaaccgtttggaaatggtgctttgcgattccttccattaaatttgtccaaatttggtttccaattaaccctaaatttggtgttaatgctccgtcgtgccctgcctaattattcgctcatttgcagaaaaacatttacttatttctacagtaattggtgtactaaatcataatctgcttgtgtctgtttcatctccttcttcatttgtccgtgtgctttttcttcgttttgtgcccttcgtgaacattcgccatccaaaaattaaggcaagtgaaggcatttaaccgttcccaagtcgacttttacacttacaaattgaattttaattatttgttttgcagaatttggcgctatctcacaccacctctccgactgatcagtgatcagctttgtcattccctgctgctcgtattgactcatctccgccgtttgcgattgatttttgatggattttccctttcttttctgtttgtaaaacataccctcccccactcttcagcataaattatttaaactgagaacaacaaatgcagaaatacaaatttgatgtgtcaccccaaaattggacaattcgtcccaaattattgcccatttcagtatcgatgccataaacaaataaacgcgaaatatgcacaaattgcaaaacatacatatggaatacgtcctataagcttcaaaccaagctaaaaacatgttttcgtgtatttttaggcttttcacagttcagaaaaaacgaatgtccatataaatacaaaccctattcatcacacattttcaaagtacatccttgaaaaatttgaagcgaagaaagcccaaatccaagaacgtacttgaatcaaagcatgacgaattcctacactgttatggccttttgttcctggacaaattttggcacatttaattaaagcatacaaaatgtcatttggtgattttaaaagccgtatattctacattctatgtacatacttctgagtcttttttaatttgattcttgctgtttatttaattgtgccattatcgacaattggtttattgcctgggactgaattttacgttttttaataggcgtattttctgtcctaaaacagaagcattatttttcagtttcgtttctcgttttacacatatactaaaaatcttaacatatttactgcatataatttttaataatgaagagacgttttgaaaaaattccaccaaatcgaacaacttcgacttctaaaagtaaatttgtattgattaatttaaatttgctaatttttggatctttctctgttaagtatgcctaataacatttagatatacctatatatgtatatatacatatatacataccggcgctacttaaaaagaggtccattttgaatatcatttcaacttttttttgcccaaaattattt

SEQ ID NO: 11907 - DNA, 905 bp, Heterodera glycines
cgcaaattggcacggaacgggggtcggcacaggcccgactgatgatgaccaccaagtcgcgcaaggtatcccctcttaggggcgggaccggagggtgcaacggtgcgggggggggggggggaagaactgcttcggtgttcggattccggcaaccctgagaatttgagttgagcttttcgagtcgcatggatccagaaaggaacagatttttggaaacccaaaaggatttaggttccgtaaatcagacaaataataaactcaatttatacaatgtgcaggtgcgttacgggtggtatgacaagggggcacctgacgaattcaagatggcccgagagggtgacccggacttcaagttcaccgacccggacgaaaggtggaaaattggaaaaaaaaacatacaaagtttttgtttccgaggaccaacgaaagaattttatgaagcccaaggagatagaaaaattaaatgcaatttttcagaagataaagggatcactattttgacatgttttaaggatttgcttcaacgagcgcaaagcgtgggcgggcgattttgtgatttgtgttggacagaacaatctgtgcaaatggctgtgaaggagaagcaatggccacattttgaagaaacgttaaatttccaagaaaaacgaatttatttttcattttcacattaattttaaattaattatccagtaataacattctttacaattttcttctgattccataaaatcaaacgaatatgccaattccgaacccattacgacttttcgaatcaggccgggtaggattaccgggattaaaatccacgttttgccgggagtttaatcccgacaaaggggtggttcaaatgaaaattattttttaaacttgttggaattaatgtgattttcccatgatataagaaa

SEQ ID NO: 11908 - DNA, 1462 bp, Heterodera glycines
ttttgagggtaatcaatcatttcggtagacagctgtcacattttattcaaaaaccgtgcaaaaaatcgtttggatattccttattttcgaaagtcatcaatcatttttttttttgacaggtttgcaaaattacgggccatattgcgaaatagttggaaccaaaaataatggagacatttaaataagaagccaatcaatcacattttattgacagttgacctaatttaggggagatattgcgaaataatttgaacaaaaagtcacgtgcagatttcgaaataatggaagagaaataaaaacccatcaatcaattttggttgaaaggtgacctacttttgaaaaagttttttaatttatttattcattttcgattttacttttaaataatcaattttattgtgcaattcaataattattcatgtcattgtttgctgctaatatcaattaattcacacttcttccaaattccgttatcgattttttttttcgcggcggcggcatcgcggcgcgaggcgagcggggaggaaatgcaaaaaaaacccgcactgttttggcacattttcaaaaaatgaatttttaatttcaggattagagaaaccgtcataaaaaaaactcaggatttgagaaattaaaaccgcccaaaaggtttgggatcaaaaagatttaaatttgcaaaagaaaaattgaatttcctccacctgtcacttttggtgacaggtggatgattgatgaccttcccgcggcgctgcgcggcgcggagtgaaaaaacacccgcacggatttgggtaaattaaaatccacaaggcggcaacatcaaaagacttcacccctcctataggcttgggattgtgcgggaaaatgtccccgggcggcaacatcaaagggctgcgcccctcccataggcatgggtttgtgcgggaaacacccgtgcgcaaccgtgcgctttcggggtcatatactactaacgtcaacgggtatcgaactcataacaaaaaatacagctagttttgaagcactaaccactagagaccggacgggatcgggatcccgcgggatttcttcgggatcccgcgggattaaattcgggatcccgacctcgggatccgtcccgagcgattttttaaattcatcgggattgattgggatcgggatttcatcgggatcccgaaccgagatccctcccgaccattttaccaatcccgcgggatcccgcgggattgaagtcacaataatttttcaaaaaatctccattttttaaattaagatcttgaattttaaattaaaaaatattgtcattagctaatttttctttaaaaaaatcccttaaaaatcccaaaaaatttttacaggtctccaaaattccactaaaattttcaaaatttgacgcaaaagttggccattttgtgacttttattccttcataaaaataattatttttttttaatttctaaaacattattct

SEQ ID NO: 11909 - DNA, 1781 bp, Heterodera glycines
ttgagtcccaatgtttagaatgccgcagatttgagtcccagagattggaatgccggagatttgagtcccagtgtttggaatgccggagaattgagtcccagagattggagaaaagccaagaaaatgatgcgagggcgcgaagcggccgagccagtcgattttatcattcataattctataacacaatcgtactgcctagcgggggatgcgccgaaggcgctgaccccgctagtccttatataaaaagtttggtgtttgtgtgtgtgtgtgtatgtgtccgtttttgaatttgtgtggcgatttgtttagtttttgcgttaaaaatgtatttgaaaaaagtagagcgagggaaaggtgggaaaatagtgcactgtctgactgtctttctacgcgggcagcggcgggtgagaggggcatacagtgaacagacgcgtgctgctgtgcagcagcagtctgttggacgcgtgcgtgtgtgtggggagaaggagggagtggggaaaaaaagagtaaattgcaatggaaaagaaaagagagtaaaagaaaggaaagggagagataatgggaaatttgtctcgcatcccttccttatttataacccatcttttattatataaaataattaataaaataatgagcacatttttgtgtttgtttgagtggaaaatccggtacatgaaggttctgttattgtgtgtaagaaaaaatttgtggttttgctgttatcattatttttttgtctaaattttcgtttttgttaattgatttgattttgatgtgaaagcttttgttttgcttatgtaaacgataatgattaaaaaaatacattagaattcgtttgaatgaaaaaggtttgttacttaaaaaagttttttgtacttttccttgcttataatatgaaaagaatctgatttggtttttgatatttgttttgaataaaaagcatgttatgatagtaataaaaaatgaaagaaaaatcctttgatggatagaaaaagcaatataaatgctacatctcatgttttgcctgtgttcgagtggaatatttatatgcaattgggatattgacgtgccacttgcgggatcaaatttaggtggaaagttttaaacaggtcagttttaatttgaatttatggggtgggggcaataattatacaccatagtgttttgatttatgggttatatttcaatttctggattccttttaaatagttctgtattccgttgctgaggttgagttccggtgattgaaatgtcggagaactgagtcccggtaattgtgttgctgaaggattgatgagattgagtccagtgatttgaattcgggagaattgagtcccagtgacttgaatgtggtggattgagtcccagtgattgaaattctggtggattgagtcccgttgattggaatgttggtgggttgagtcccagtgattggaatgttggtggattgagtcccagtgattggaatgttggtgggttgagtcccagtgattgaaatgctggattgagtcacgttgattggaatgttggtggattgagttccagtgattggaatgttggtgggttgagtcccgttgattgaaatgctggtggtttgagtcccagtgattgaatgctggtggattgagtcccagtgattggaatgttggtgggttgactcccagtgcttgaaatgctggtggattgagtcccgttgattggaatgttggtggattgagtcccagtgattggaatgttggtgggttgagtccccagtgattggaatgttggtggattgagtc

SEQ ID NO: 11910 - DNA, 362 bp, Heterodera glycines
ggtttgggtcccttggattgaagggttgttgggtggactcccatggattgaaatgtggttgggttacgtcccatcgattaaaattttgtggaatgaatgcccgagaatgcaaaatccccccgtacgaggccgcgaagcggccgagcgagtacctttggcgcagaaatgaaacgcaggagaatagagtcccagtgattgaaatgctggagggttaagtgttggcgattgaaatattggtggattgagtcccgttgattggaatgttggtgggttgtccccagtgattgaaatgctggattgagtcacgttgattggaatgttagtggattgagtccccagtgattgaaatgctggagggttaa

SEQ ID NO: 11911 - DNA, 4349 bp, Heterodera glycines
  unsure (1)..(4349): unsure at all n locations
aaaacngggcttaaatctcgccagtgaaactgctccagatttgaaaaaaataaataatttttttggcgaaatgtcttttatttagaatttgaagatggattttcagaattttttaaaatttatacgatgtaaactattaaaagatcataaaatccacctaaaatattcaaaattaaatataatatagcaattttttggttgaaaatacggtacttatacagtttaacccacattaatttttcttttttatttttaatgataaaaatgtgtttccaggaaaatccttattctattaaaaaaaaatttttcgaattttttaatcaaatcaaaaattttgaaaaaagcccggttctggcaggcgctcggtcaaaattttggactgggcttttaatgcatataatttataaacctaggttataatgtgcatacaattttttttgtggctctaatttcataattttgatcaacggacgacacccaactcgtactaggccaacttgtactgctccaactcgtactgtttttcgacaaaaaaaaccgtcacaacatttgtcaaagtcgaccaaattaaacattcttggtattagtcgatatcactaacagtttttctctatctatatacctgcaaaatacaagaaaattttattgcttttcaaaaaagtaatgaccaaaatcaaaaaaaaaaaaaattctcgtccataacttttttcaaacttgatcaaatttgctgaaacttggcatgtagatagagaactttaagggctattgaatgataccaataatattttttaatttagtcgactttgacggtttttttgttgaaaacagtacgagttggggcagtacaagttgggttcttcctaatcttagaactaagtttaaacctaaagcttaggcctagtctaagcctttgtacgcgttgtcgtgacactgaagctgtggccacacctctttgaataagttgatccattcgtcgacgtcaatgtcaattggtggattgtggtgaaaacaaatgcaacgcaatcgcttcgggcgtccatctttgcgcggaatgtgcaaccattcggtcaccgcttttcgagcaatcgcattttgccaatcttcataggggaacaaattgctggtttccactgatgcaatgccaagatcggagagaattgtgggcgaaatgtggaacaacatgtcaatgctgccacagccaatcaattccaggtggcgaatgtttggcacaaaaatgggcaacatttgttggaccagaaaatgccaatccggccgggaaaccactcgctgtacggaggcaggcagatccatatccaaacgcaaattgatgcctttgtcaaaaatgtgccgattggaacggagaaattcacagacaggagagcaaatgttgctgaaaagcgggagcggataatgtttaggctaatagtacggatggtacttaacaaaatttactaatgataattagggttgtaaatactatgattttccaaattttaagaaaggggctcaaaaatagcatttctacgttaaattttttgatttggtgaaggtctttagtgcaaggcagtttttaaagcatattttagtgcatatttgggcatttttcgagttttttgggcatatttgaaggatttctcggctttttagggttatttggcattttttagtgcattcaacttacaaacctactaatgattattggcactgatatcaaaaactataaaaacacattataggttttttccgatctgatttttcgaatttttgttcgaatcaaggattctgggttcaaatttggtcgaaatcaatgtcagaatccgaatttccgaccctgaaaagccataaaataattttatttcggaaaaaattttcattttttcgaaaagggttgggggagggggtaccatctgtactattattacccatttcaattgcttatatgcttttttgtttttgaataccgaatgtgaaggtccttaaagtgaattttgctgggcagcggacggtcgggcaatggaaattcttccgatttgcgttcgacaattattttcggttcgccgaagcccttgaaaattgtagcaacagtttttaaatgattttgatttctattcgaattcggaattagtcaaaatgagtcagattcgtgatcagcgacctcgaaaacaaccggaatttcaaaaaaattttttttttaaaaattccaattttatcaaaaatttcggaattccgatgattgtccaaaatgtttttggaaatcgtaattccgaccccaaaaatgtcggaattccgtgccatctctgtgggtaatatcaactaaattattacccaaattgttattcttctccaaattgtcaaatcgcttttgccatcaaaatgcgtgtccaccagtgcatcaaaatgaggcgaaatcagtgccaatttgagaccaagttgagcatggtcaaaaaacggcagaatgtccatcaaaacgtcgttacaaatccaactgaaacattaattttttaaattttccaaaacaatagggatatcactggtaaaaatgattttgggtttaaaaataagggcaaattccatctctaggtaatactgtcaatggtcgaaaacttgaattttcgtacttttgttcgaatccgggttcggtttgggcacttccgtgttttgctacctccgcctcgaaaaaattaaaaaattcattaggttaggttaggactaggtttagggttgcttcgacctgggctctcatattttacaaactaaagcctaagccgatcgtgatcaatgtgaccgtgaaagtcgcaatatgaattttttaaatctttcgaggggggtgggggtagcaaaaccgaaatgcttattttcttaatttttaatccaaaaaaaagaattgactcacattttcctcaaagttcttttcattttcatgcccaataatatggcagtcacaaatgaaccgtgcgattgttttgttgttattttacaatgtcagaaggaatgagaagggaaaggataaacaccaaagtgtcgtacataaaaaaagaataacatttaagaaaaaataacgtaaataattaaattctgggaaaagaaagtacagcaaaagtacaagaataaaatataatatttagtttcctagtccattagaaaatttgccgagtcaaaaaaaaacaacctttttgtggtgcaaaagtaatgcataaatattgaatcgaccaaatcttaaatttaaaaggaataattttggaactgcgctgcctaacggcggtgcttaaaatccataacgtatgatgagtagggatggtaattatatgcacataaaatcgcaaaatatgcgcataaaaagtgaaaaatatgcacataaatttttccaaattgagggcaaattttcaaattttaatatttatttattttgaagaaaattgagcaaaaaaaggagaattttctattttctgactatttttggcataaaaaagagggagaaaagggcgttggctttggaaaatagctgataaaaaggagaggcgagcagacgatgagtgagataaaaatagtggtaaaaatggacaactgctgcattgggagagtcataaaggggacacaaagtgttcgcacagcatcgaatatttccttcattttaggcgtcattcttccccattgcacggctttcttcggtttaattacccaagtttgaggtacttggcgtatttaatcataattcatgtggtaaaaaatgcatttaaaaataaaaaaattcttgaatttgcttctgaattttttaattttaaatagaaaattcctttttctgaaattcacaataacaatttggcgaagaaattcattgaaatttttataaagcattttgattaaaaatgttggcgggtttgacaaatttgtacaccgactattggatctcagcagcaatgagaaataacaaacagaaaagagggagaaaagggcgttggctttggaaaatagctgataaaaaggagaggcgagcagacgatgagtgagataaaaatagtggcaaaaatggacaactgctgcattgggagagtcataaaggggacacaaagtgttcgcacagcatcgaatatttccttcattttaggcgccattttcccccactgcacctctttcttcggtttaattacccaagtttgaggtacttggcgtatcctgcccataatatctgtggcatggaataaattttggaactgcgctgcctaacggcggtgcttaaagtgcgctaaaaatgatcaaatgattatcaatttttatttttcttaattccaaagtgaattcgaaacgcaaaaatttaatcataattcatgtggtaaaaaatgcatttaaaa

SEQ ID NO: 11912 - DNA, 1497 bp, Heterodera glycines
tagggctaatatttatagttgctaaaaactgccaaaataattaatttttagtttctaaaaaagctccaaaatagttgctaaaaataggtaaataattgctaaaaagttccgaatttaggggtgtaaaatcgtaaattttcttcaaaaagcaaaaatattttgccaaatcattaaggatatacataatttcataattaaaaattatcgtcaagaaaaaaacatataaattttgaaggtgaatttttgagaaatttttcatttctcaggggtgtttttaaaaaaaaaaatttcgggtcgatctttggatgtattttttgaaaaattaaaaaatggtaaatctgcgatttgtctgtactaagatttacttaatgaattttgatgagtaactaaaatcacatttctacatagaagcgaaatcgtctgcatttactgtagttagtattatttaaaaaaacaagtgttttttaacttcataccaaaaaatttaaatgcgcaatttcactttctaaatttcaatttttaacatccattttctttttttttcaaattattttatattttttaatgataatacataaacattttaatttttatttgagttattaaaaagcgcaatataactaaattattaaaaatacataagcttaagaaggcacaaaaggacagattaataaatattaaaaagtgagaaaaatcattttcacatatttctttaaaaatatttataaaaaataatatatattcgtaaatggaaaaaaatgataatttcgaattagtaaaatttacaatggtaaaatacaaaattttaaataaagaataatttacaaacaattaattttttttatattaaataatagaaagaaggtaatgataattaagcgaatatgcatgttaaaagttttaaaataagcaagtttatttattgagggatattcaccataaaatagaaaaaaagataatacataaaatgaagtaaaaataattaaacagcagttatttatgtttagataattttaaaaggaacaataatctaaaataatctcctctacgaaggaaagcctttacttctgaacagcacaagaccatgtttttatgaaatgaaattgaaaaaatcgcaatcgtcgtggggtgggtcgtaacgaagggggggggggtgttcaaaatagaaaaaaaaggtcttcgcgcctgggaaaaataggggccgacgtaagaaaaatttgtcctggcgcacccccccccccctgcgccaaacgtccgacgtatgggggtctgactggcgcaccccttgttattgtatggtcgagtgtgcggcggttttttaacgcaatactcgatattcaaggctaaacgattttcgcgcattatacaagaagaaaacttttttggcactgaagtgtctattttcactgggactcagttgccccagcgcctatatgacaccggttcgaatttataccttgttgtttacacttacctgatcaagggctttcgaatgat

SEQ ID NO: 11913 - DNA, 2359 bp, Heterodera glycines
ccacggctcccaacttctggaatgagtttcgggaagcgcaacagcggacgaccttttcttctggttgtaggccggggttttcgaattttaatccgagtttcggttttttccatgttcaaaaactcagacggactctgcgttatgatcgcccaaattttgccaaacatggtagcactgttgcggcttcgcctcttcgtcagtgtccacgtttactcctccatgttcagccgtttctttcaaagaattgaatataaacgtgccgaagagaccggagaaagtgtgttgtacaagtttcatctgccaaatgagagccataaaagggataaaaaagcagcacaaaacaacaaccagatatcgtcggttgaactggaattggtccgggtttttggtccacaactgatagacacaatccagaaattgcaagaaaactggcgatttctcattgtcgtcaccattcaaaaccccgcctctgtccgagaatttatgtccaaactcatcccattggcgttgaacaaacataacggggggggggtgttcaaaatagaaaaaaaaaggtcttcgcgcctgggaaaaataggggccgacgtaagaaaaatttgtcctggcgcacccccccccccctgcgccaaacgtccgacgtatgggggtctgactggcgcaccccttgttattgtatggtcgagtgtgcggcggttttttagcgcaatactcgatattcaaggctaaacgattttcgcgcattatacaagaagaaaacttttttggtactgaagtgtctattttcactgggactcagttgtcccagtgcctagatgacatcggttcgaatttataccttgttttttagacttagctgatcaagggctttcgaatgataccaaatttgttcgaatttgaccgttttaaagggtcaagggcacccttttcacacaatttttcgagttttaaaccggttcaaaaaccggttttttggcatttccgcaactcgaggcatatttttccgtgcatagctcctcgagacgaatcgattggtatatcatttgacccctttttcacggggcgttcactacagtttatcccaaatttttaccggcggtaccggtactaaacaaaccggtaccggtactttgatttttgaaaaaaccggtaccgctcaaccctactcaaaagttgtagtcaaaaaccatgtgctcgtacgaaaacggcctggcccgacaaatctttaccattgccaattatggcatttatttgtccctgttcgaacccattttacgaagatttgcatttattgcacaaaatcgctttttaggtgttttcggggtcataaaacccgagtttttcgattttttgttcgaatccggattcggggttcgatcattgccatggcattaagcagtggatgaccttaaatgtacgaaaaaatgtttttagcttgttttcaagtttctagggcatattttgtcgaaaatttttctcctttctagcaaatttttgttgttgttatccattttttggctcgacaatttcttccccgtaaaaaccgcagccaagcggactcgaaacccagaccccgtttttgtgacccctagggtaataatcaagaacggatttatatgtgctaaaaaacgccaaatatgtacatatatgtgccaaaaagccccaaaatatgtgctaaaaaccccagaaaacctaaatatgtgccaaaaattgaaaaactgctcaaaaataagtgaatttctcaaaacagtctcgtttttttatcaattccgctagcacaatgctaatcaaaagcattataattagggcggggaattatatggatataaaatcgcaaaatatggccataaaatattgaccaaaaatcgcgaaatatggacataaaatggcaaaaatatggatataaatttttcaaattgagggtataatttcccaaaatttctttaaatttgttaatataaagtaaagaccttcaaaaatggataaatatggtattgaaaatcattttagaagaaaaaaacacgataaagttaaaatttactcatttttagcgaaaaatcaaccagaaaagtgaaattttatcttttttgcttatttttgacataaacttattaatttttaagaaaatttaaatttattcaatattcccgagaaaatttgacgaaaaaatgattttttttggaaaattttccggtttggtctaaaaatagtttaaatgatcaaattgaatattttttggggacattttgccaaaatttgattgccaaaaaaggaactttgtaaaaaaaaattcaaaatatctcaaaaaatcgccaaaatatgtgtcaaaaacgatgaccaaaaccccaaaatatgtttttat

SEQ ID NO: 11914 - DNA, 920 bp, Heterodera glycines
  unsure (1)..(920): unsure at all n locations
taatgaaggaatggcttgagtggtactgtactgatccctacaagggacattanaataatgnnaaagataaagnntacccctttagaattaaantgnntattagnataatnatngntatnattttttnttattttttgttnantgatttttntggaaaatttgaattgaaaattataaaaattgntgaaatnnnggngantggggtaagnanaaanattgnnaaagagagaagnantttgagtagaaaaggntgnattttttgataganggnaaaataaaaattnntaaaattttantatttaaattttaaataggggccaaatgttcgctcaattcccatgacattcgttgtgactcatccgtcgccatttattcattcattcatccaacagtccccaaattctcttaaattttacacaaaaaacattccaattattggttaaagattttttgaacataaaaaatgattgggagaaagtgacattttttatgtaaagtttagtaatgggaaaaataaaagcgatcgatcggagagaaaggaaagtttttacgataaaagtgcttaaagcaaagtaatgacttttcatagctaagctcttacgcccattcttccactaattaattaattaattattaatttcgaagcaaatatcgacaaattggggggggggcggagatgaacagatgcaatttcgatttgttcaaagtgtaaaatgtgaaaagtctctccagcgaaactgctgctgatcgttggaatcgacgaaatttggaagaaacgcggggaaagaacgcttttaggggtcaaatgaattgtgaattgcagcgtttgtaaatggggcgattgggggggggggagcgaaggtgggcgagggatttggaatggtccatatagggggggggggggatgacgagtgacgaac

SEQ ID NO: 11915 - DNA, 2874 bp, Heterodera glycines
  unsure (1)..(2874): unsure at all n locations
cttgcanntgcctgcannggtcttttttaaaaaagaaaaaaatatatttaaataatcaataattattaatttatattgtttattattattgtataacaaaaacctgtggcttgaacatgtcaattcctatttgtgatttatttaaaatgacagtaataatgggcggaagacataaaacggagtttttgcggcagaaactcacgccgaaaaagacaatttaaaataataaattgggcgaatggcaaaagaaatgaaaattaaagttaggggcccattttggagtcattcgcacgtgacaaaatatttgaatcattcattgataaatgggctgagatttatatttactaagtaaaatagcaaaaggaatgaatgaattaattaattaattaatggagggaaaagtcagcgcccatcccaaaattgggggcctttccgcgcacttttgaattggcattagcagcagaagaacatcccttgggttgttgttgttgtcgttgttgtacagtgactgttgagcttaatgactgcaaattgaccaaattgtcgaaaaattcactcgtcgaaaaaaagaaaagaaaggaaaagcagcgagaagaagcgacaaatacacgcaaagaagaagcaatggaagttaatgtgaggcaattccatttttggagaagggtggcggtgatcaaagaatgggagaaggggggcacaaatggagggggggttataatagggagtttcttaaatcccccaaggggtaggaaaacaaaaagtgttgtaacgcatatacctaaattcataacttggctcatttcaaccaaattaatattttaatttaatttaacattaaaatgttatattttgccatgtcaatgcatgtataattatagtcattttaaaattttaaagttattaaaatgtaattgatccaaacttattttatatattcgatattccaaagaattgtttaacttaataattaaaaaaaattaattgattttcaaaaaatatggccaaaaaattctgattaatgcttatttgaattatgtatatatatttttatattttttgtaaagaaatttaaataattatatattaatttgcaataaaatgttgaataatttcttaaatactaaaaactggtcgcaatcgcttttctgtgcttttattatgcaataaaggcatcatcttgccaaatgtcaatgggcgagaagccgacgacggtgaataaggcggggggggggacccatttttggacaaaattacgctgtgagcataaaactagtagcgaagcagttgaatgccatcgatttgacataaattagcaaattaaacagcaaatgaacgattatgtcgaaggtgagcagtcgaaattccccgttaattgcctcaattatttaattgctttactttttcggtcgactcgccggccgtcgcatttggtggtgtccgagtggcgaaggtttggtttcgaattgccgtaattaaattatgcctatgttttggcatacatcaattaattaataattaatgccaggttatttggcttattgtccccagcccacggacttcgaccagtacacttactgttgtctgtactaccatttgggtgttgaccgaccttcgtgctgtcgcttcccatttcataccggtaatgggcaagtcattttgccagctttgaagttttaagtaaaaattttaaaaattatcccccccccccccttgtgaaatgccctcaggcaaaaagacataagagaattcagcatcaattagcgatgcattaattgtaattcattcaggtgtgatcattgcactgtttgtttcgagtgttgtcgcctttttgggtaattacggtcaatttacattttatctaatttcattttagttaattaattattatttttagttctattgtttctaatgtgttggttttgcccaatttgtccgttggccaaaaaattgagggaaagaaaagaagaggaggctgaaaatagtggagaaatggacgaataaatgaagagaaaagagggaagagagaaaaaaagagaaatgatcgaaaaatgaccaattgacgatcagaagaagaacagaaaatgagaaaataaagtgccggttttgatattccgaattaattagttattgtttgttttttcattttcaccaaaattcaaattattttttaaaatattttaaattattattttttgatttttgtcaatttttcataaaaagccattcaaaggaatgaaagcaatcggcggatgagtggccacagaattgtgggacaatgacaacgaaacaaaacaaaacaaaagggcgtcgtcacaaaggtcgcgcgccaattcattcttcgcttatcgatgaattcattccgcgatcaatcaagctgctaattgacacactccgaagtgaccaaaaatattccgagaaaagcgccctttttcattttaaatttattcatttttaaagtaattaaatgacgaataaaccgcagttcatccataatccaaacatttctcattagtgagtgatggttcgaattcgaattcggcactcactgctcatttaaatgacgaacaatcgaaaaatatttacaaattaactattaatgtgttagtttccattttggtgtgtctccgcacacattgctaattaatttcattaacggaaacgacgaaacggtgaattgagagacagaacagacactctttgaaggtgatggttcagcgacggcggttcatttcaatgatcaatttcttgggtttggttttatttttaattgcatttgcccattgattttccttttttcttttttctgctgatcttttggcttttcctttttagcatttcctccaaatgaccgtctcttataatcagagacattat

SEQ ID NO: 11916 - DNA, 3146 bp, Heterodera glycines
  unsure (1)..(3146): unsure at all n locations
aatagtctttgtttgtgttaacccaagtttttagctgaaaatacttcggtgtgccgagctgaatttaccgttatcgacctcaatgttctgaacggaaacatttcccttttcaattggtctccgtttttctcgttttcctattttttccttttttcgcaaatcgaccttcggaaaccgactcattctgcctatattcacttgatttctccaataaacccgagtcgcgcccagatttctattcacccagtgaaatgtgttatcacaatccctcgcttgatttgtttttgcgatttccctccccccccccccccatttttgacttcattcgctaaatccgtccgggttgggccggctttcccccccccccccccttttcctcccaaaatgtcgtcgctttttcactttctcattttactggacattcgcttttgttttccctccgtttttgttctcgtaattcgtttcatacacttcgattcgttttatttttacatttgtttgtccaatcgaagaataaaaaataataaaatattttaatatttattttaaaagtttcgccgaggcaaaaaaataataaaacaaattatatagccaaaagtattctttcgtttgccattttcttttcatttaaaatgattagtaatattttactttatttcaatagatataattggtgatttctattgctaatttcatccaaacttattatcagatgatcagcaatgaattcggactcaaaactgttttgcattttcacaacaaaaacattttttctcataattttgcttttggttggtctgtctcattctttcccttattcaatcacaactctcttcccctatccatcgccctctttttttctccaaatctatattcatttttttctaccttttctctcgccgtcccctcctttcccctcctcttttatccacccttttttcttcatactcttgtctctctctctctctctccctcccccctccaagtttatacttttcgtactgtatctgtgttgaacgttttttcaggtaatcgttggccatcgaacatctgcttctttaattccggtaccacggagttcggcgcccactgatcaagcagtaagaccggcacaccaaaatgaaagacatttaaatcgatttaaaacaaaaaatggtccaaatgagtggtgccattgacttgtctattgatgtgatcgctttttgtctttttgtcactccttcgaatgatcgctttgatcggctgacattaagcgggagggaagaaaccccaagcaatgggcagaaaggcaatgccaatttcttaatgaaccatcgttcctcagctcaacaatttgtattaaaggcttcgtaatgataggggggaacaaatttgcttctttatctctgcttgattagtcgtggcgctgtgctcgtggtttgtcaattggtctgttgtgtttgtttatttgttttctcttctttggcatttcgtctgtttgtctgcttctctacctttccctttatttgcttttttctctgctagtctctccttttccttcccatttgtccgttcttttatctttcgtctgtttgtctgcttctctacctttccttttctctcactttctctgctatttcactgctcttcttccctcttcctttcctcttttccgttcttttgtcttacgtctggttctctacctcccttttctcttcttttctttgccttttttctatgtatctatctatctcactttccctttcatcctgcctttcctttccctctttctctgctcgtctactatctctcttcctttctctctcttccatccactctctcctaacattgcttttctgatatttattcctcttcctctgatcagatccgtgtcatccgcgccttccaatcaggcgtcgatcgccagcccgattctcacacacttagtggaccaagtgctgcccgactgcgcgagatcagccgacaactcaaattacagcacgagagggagggacggagtgagtgggcagaatactgtaaaatacagtaaaacgagaaaaaaaggaataaggatttcggatatgcaaaaagcaaaagtaatgaagcgtaagcatgttttaactcacatcccgaaaatgatctgtactanaaaagatttgtgtgtgtggttaagaggtttttgtaagatagaaaagggaaaaggattggaggttcgagtccgccccacgacattaatatttttattttttattcaaaacattaaaaaattaccatttttaaaattgttttggaggttttaaaaaattaccattttttaaaattgttttgaaggtttttttgccaacgaaattggggaatatctttgtatcattcgaaagttcttaatgatgaaaagctttttcaaaacaaattctaagcaattgaatgcatcagaaaaaagataaagcgtttaaaatttgttttttgaatatttttttaatcgacccattttaaaattaatcaacctatcattagatgcaaaaaattttaaaggaaaggccgtttttagttcagacaattgccatcttaattaatatgagcctaattaacaatagttttttcttctattagttttcggttgcaagttgaatattgatttttgtaactctgttcgctgttcctaattatctgctcatgatggtattaaaatcccagaaagattattcagaatagcattttcattatttgggggtaatttttgaaaatttaaagttacatttctcagggtgttgaaatttttccaaaatttgccaaaactctaaaacacaaaaacggcgaaatatgcatttattctcgaaaacctccaaaatatgcattgttttaatgaaaaaagctatttcgagcctttcttcattgcatatgcacagaaaaatctgcaaaatcatacaacgcacagccctagtgataattaaaataaaattttctccgtcacgattatcgtgaattttacgggttttcacagtcactattcacgggttttcttcgtcacggcccacctcctcatacttgtccttatccgtcccccctctcagctctccgttctcggtccgcttctcacaatgagacgccgtacactccgcggggctctcagccattggtggcaccgtcgacggaggcaatcagtgcag

SEQ ID NO: 11917 - DNA, 592 bp, Heterodera glycines
cgtacctcctcccctccccccccctccttttctccccctcccactgtcttgttctctctatttccctctcccttctccacactttcttacccttgcgcactttttactttttctgatcgacccactcgtaggccattacttttgagaatgcggcgcacaaccacaaaaagtaagaataatttttttaaccgtatagccaagaattggaacaaattaccaattgttccaattcaggcagataaggcaaatcaattcagggcattgctaaaagctatgtatgagttctaagggatttattgacatttgcattgacattcattccattttattttattttactttacatttcatattgttgtatttttttttttgacattatttattttgatttttttttatgcgccacataagagcactaatgtgcctgtggtttgctcaataaatataaaagttgttctctctatttccctctcccttctccacactttcttacccttgcgctctcttttttgatcctgaactcctttccttcacattgctttccttctttttcacccatataatttattatcatttatcatttcttccctct

SEQ ID NO: 11918 - DNA, 3715 bp, Heterodera glycines
actgcctgttattttttgtttgaagtaaatctttctaaatctacttaagggaaggaatttttgaaaatgtttcaaaaataggtaaaagataaatctgcttgatttttggaaagaaaattcaaaaaaacttcactttttgtcttctttggctatggagttttgtcaattcccgcatcatccacatcttgtgaacgaatttttagccgtttttcaccgctggtttatgattatcgtcgtaatcgcttaaacgactttttcgtcgtttgaatttataacgacgttttttcgttaaaaaagtcgttttgtcgttcactaacctggatccaggcctggatttttcctgggtccaggtcatttttcggcaacctggatttttcctggacctggattttcctggatttttgtccaggaaatccaggtcagtttggaaatccaggtccaggcatgaaaaacctggatttcctggataaatttttttcgtctttttatggcgaaatgtattaaaaatggttgtaaatcaaaatttatatttttttaaattttcacatgtaattaaaattctttctttgttttttattttagcattaatgaattctttaatttggactatagggttattcgaaaaaagtaaaaatggcaacgtcgggatttgcttagtgtgcaaggagcaaaacagacaaaagtctgaattttcaatcaacgacagctcaacgaagagcctaattgtccatctcaattcgtcgcaacacaaaggatcggaatacgacaaaaaattccagcaacttgagacagaatggaaaaacgcaaaacagaaaaaacataaggagcagccaaaaatcgctgacgtgatgaacattacttcatcaggtaaaaacggccattaatttaattcattatcagtcattaggaacgatttccattgccgacaaaaaataatgcattgcattgtctgtaacaacatttcatttaaatcaattgaccatcctacgtttcatgctcttatgcaacaggaggttaaatctgaaagccattataggtgtttccgaatccattggtataaaaaataaataacatttcctaattaaggaaagaagttttgccaaaaatttacgaacgcgttcaggccaaaattaggagtgatttggaacagtgcacagtgttgtcgttcacaagtgactgttgggccggcacttccgataattttattaggtatttttgttttaatattttaactatttttatttagcctgacaccgcatggcatcgacaaaaactggttttacaaagagcggattttggcagttacaaatcttcctggggagcacaccggtttagcaattgcgatgaaactccgtagcattttggaacaatggcgcctcgaaggagaaaatgtgcattgttttgtgactgattccgcaaaaaatatgtgtcgggtataaattatcctacaaaaattttataataacataaaaattttaaggcctttaaagaagttgacgaaaatggcagtgcaattctcccctttttgaatgcaaattgtgccgcccatttactaaatttggttgtgaaagaagggctaagtgccgaccttgatattgaaaagcttttcgttaaatgccgtaaaatcgttggccatttcaaaaagagcaacaaagcactcggaaaattgcacgaaattcaagaatttcttgaaattcccgagcattgcttgttacaggtatgtataatgttattagatattggtaattcttaaagagtgtatttttcaggaagtttcgacacgttggaattctggtctgatgatgattgaacgactttacgagcaaaaaaaggcaatcaacgaatatgcataccaaaactgtgactttggtctcactttaacaagcgacgaatggtcaattttagaagaacttattgcgggtattcttttaaagcaaaattggtagaaaaaataaataaaaaacaccttagttttgaaacctgccgaagtgatgaccaaaggattatctaaatcgcctatttcggtggtgattccatatgcaagagttatgcatgacgagctttacgaaatgaaacttttttcaaaaaagttgaccaagttcgaacaattatgtaccattcgttacgtacagacatcatataagcattttctattcactttatgccagaaaaaagtcattaaacacaaaatttttgtgggcaaaaaaatacgaaaatctgagtaaattcgaaaaaaaatccctagtgggctggaaaaaatttttcgtagaagtagggccattttgtagagaattttgtgctctttctgaccatcatatttgtcttctacgaaaaatttttacggctgatatggaaatggctggtatggaaacggcggtatggaaatggcggtatggaaacggcggtatggaaatggcggtatggaaacggcagtatggaaatgggtcgatcccaaaatagtgattactagtgatgaatagtggcgttaaaacgaagaatttccgagctaaaaatgttttcgtgcatttcagtcgaaacaaagccgcagaaaaaataattaaaaaactaaaaatccgttccctactaatcacactgtaaggccgcgaatggaaagactgattcttgagaccgttttgttttcatgactttcgaacaaaacttttctcccaaaaaagtggggagcataggcagtatttttcgacttcagggtttgaaattggtgcaaatgaatgtcaattcgtgatcagcagctatcctgaaaacccttgagggtaatactatcgatggtgccccccccatttttggaagaatttttttttgttctgaaatgtcgtggaaacatatttacggggggttttcagggtcgatcgatgatcgcgaatctgacatccattttgccctatttcaaagaaaattcaaaattttgaaaattcacttttagttcaccctctaaatccactccctagttcactaagttattgctcatgaactgtacataaatgttgaagaattttttaagtcattgaattcacagcctttcttccatctctcttttattatttcgcgaatttttgtgtgaaatggactctacaaaaccgatcgtgtttttgaaggtcagcctaaaaggaaagccggcaacagttgtagggcgagtcggtgagttgtaagctcttctgtatgaatgattaaaaatggcttatcaaaaattctgggtgattgtttgtattttttcagatacgattacgtccgttttgtcagaagcttttgcctctaaaattggtgacattgattcgaacctgcgtggccatgtgacgctcccaactgccgatgtgcccgttgtaggatggtaggaaatgttcgtacttgtcaaaaaaaatttaatttgttagggtggatgacgtgtcagtcgctttgctcaatgccgaaccatatgtctttgcacaacgttttggcgtcgtggcggataatcacatgatcgcgtaagtttttgaattaagttaattttctgtgcgacatactgtaaatttaagcttttgcgaacgcaaggtcgatggcgtctttggagccgacttactcaaacgcatgggcattttgaacgaggaacagattgacgccattccgctcgcttctggagatgttcctgaggaataaatgatcgtttttgaccgcaaaaaaagttgtgaagttttcagttagggggtcaaaaatcgaaatt

SEQ ID NO: 11919 - DNA, 1771 bp, Heterodera glycines
ttaaattttattttaattaaattgtttttttgctggcctaatttttgtcattaaaaaaagcttcaagactgagtttaatcatgattatcccgtgattgattttttaaaattttatttattgtaatttctttttaaatttaaaataatttttctcttttggcataatttttgtcattaaaaaagcgaacattttatcttataaatttttttctcttgaaaattacaacaaaaatgggtcatctcaccacccttttcttcatcgtccaatcctcttttctggcattagcaaacatttatttatttcttctccgattggggctcgtttttgcagcgatttacgacgccaaaaattggatccgtccgtctgttgcagaatttttttcggcaccgatgggaaaatgccattttttgctttggcatcccaaaaagtttcgacaaacattggcaatggcaccggcacacaacagtttactgacgaaattaataccgccccattaaattaaatttgaaggtccaaaaaagtattttaggatcgaatttagaatttacaaaattaaatgccaaaaatgacattaaatttaaaaattaccgggaaaattctcattaaatcttggtgttattatacaagtctttcatttttagctcagctggctatttcgagagtaaattattattttttattatcatttttaatttttaaatttttattttagttgtttaaaatcaaaaatatttaaaaaaaattaattaatttactttttttataattaactttcatttaaatttcactttttaaatattaatttccgtattttcaattttcttggcatttttgccttttgttgttggagatgctcaaattgatcattagcaatagatcactcgtccatccactttcacaaatttccaattcacacaatgccctccaacccgtcgatttaaagggtgcttcatctttgggcttttcctcacaaatcactcattagccccccggggggaaaagccttggccatggattctttggccattggcaatccgccgatgacacaagtcaacaacaatgcaccacaacacattgtgtgtagaagacaggcgccaaccgcacgaatttctgctaacattgatggatcatttgcttcttggcctcacccctccctcctaaatttgatttaaaaaaatttagggccaaaacttttcgaaaatttatttaatggatcatttgcttccccttggtctcactcgcccctaaatttgatttaaaaaaaacttataaggccaaaaattcttgaaaatttacctctccatctctttgcatctttaaataagaaattccagaaatttttctataatttatttaatataaacaccacaccttattaaaatttaagtttgcttccttcaaaatttccaataaaaaaattgaaaaaatatatttttaaattagttttttgacactcaattctttcgtatacttaactaaaatattcattcccaatatttaattattgaatatttttaaaaaatttttcctaaccctctattgaaatgcgaaaatttaaaatttgaaaatatttaagcaaaattaccggaagaaattttcgtataaaaaattccatgttatgaccataattttcttctactcccaaaattttcagttcattcatttttcttggccatttctcaatttttcatttaatgactctgtccccactcattaaaaatttattttcccaaaaaccataaaaagaaacaaaattgcgaaattgtccca

SEQ ID NO: 11920 - DNA, 3199 bp, Heterodera glycines
  unsure (1)..(3199): unsure at all n locations
gaagaagatcagcgtatcggcacgtcactcggttgacccatgttcaggcggtcatccccgcggggttgccggtcgaacgcatctgagccaaagggagggacgacgtaaaggggaaactggacagtgacaggagagccgacctcatccaattcccgctgtgtctcctcttcgatcaaacggatttccatcagtgtcagtccgtaccagcggtccatccaacagaacaactcgcgatggaatttgcagaaaaggcgggggtattgctaaagggatgcacaaattggaaagtgtactcggaaatttttacactgccaatgccgattttgaataaattttaatagcccaaaaactcaaattgagtaaaaaccgttcagaaaacgcgtcactaatttatatttttcgctcaccttttgcacaaaagtctcgaccagtttttggaagccgaaccacttgaagttgatagtgaccagtttgtaagcgcacatcaccggctcgcagttggtctgccacgactgcaacaacggacctcggcctgtcctctccgagtggaacgtcgagggttttgtgtcttcacgaatgtcggctgcatttataaactctttgtcgttcgcgatgtcaatgcgcacgacttcgcgtttacttagcatatccgtcgtcagacagagcgcctaaaaatgggtaaaatgccaaaataacaaattgaagcattattacgttttcagtggtgccgcggtcgttcagatgaatagtttcaatccgaatgaaaaagctgtccttcatgaagtccgggttggtcagctcggttttacagtacggatacgcattccacgcgtgttcatggaccgacatcgaaccctttggcataatcgccctcagaagagacggcacttttcttgaaaacgctggattagttgccgtacattttgccacttcccctcccccaaactcacgaatcgaaatggtaaattttatgcgtatattgtccggaagagaactggccattgaacagactctcaccttcaaaaggttcgttgcgcaacacctgaacaccttctccgccgcccgtctccttaaaagtcgtataaattgttcacactcctcctccgccgacggccatcggttgacaagcggttcaagagcttgaaaccgttgtttgttgcctacacttttctgtgcgcggcgttctctgctgggtgcttgaacgccacaacattcgcatttgtaaatattgccaattttttccggcactaaaaatagaaatttaaaatttttttaattgtgtatctgtgatcagcgaaaccattgggactgactcagccaggggctgatccctgcgaattttcttagggttttcaaggccaacgacagaatgtgcctaagtctaggcgactgggaattgtctttgatcacttttactgtgtttgtttgggttgatcaaaatgtttttttttctaattgtacaaatgccaagattcactatctaattaaaaagacctccccccaaaaaaatttctcattaaatgccaacaaaaaaaatataaatcaaaaattcctaaaatttacaattaaatgtgccatatttgtttcagatttaaattaaagtgatgattttgtttttacactaatattaataaattttgattgtttgcttctgtaagtgccaattttcgagaatgccaacctgcgtattccgtgttcaaccaaacacattactttcggtaattggacacatattgtgtttaataatatttaattttttcatttaaaaattgatttattaagctgtggtacaccatcggttgcactttgctcaactcctggttactgtacctggcctttgtacggtatcgactgtacaccgacatgcaatggtgagcagtgagtagtgatcagagaaattatttttggactgggttaattttaaatttaaatcaaactttacctaaaataaagaaatattaagacaaatatataaataatatatctaaggaatttaaatggaaataaaaaaaaataataaatttaatttaattttctaaaagatgaaaatgccattaatttattgcttacttcaaaaattattagcttagaacccacaaatttgtggattaaaatatattttttgcacatttgaggcctgccggcgcatttcctcgcgtttggctcaccgcttacatatcattgctcggcacttgcattccaattttggcactatttttggtgtttggccttatgaaaacggtgttttgaatttttcaaaaactttattttaatttgaaaaatcaccacacagggcaatttggccggtgacaatgatcggttgggtgcacgtccaaaacggaccattgagctgatcaaaggcggcatgggcaacaccgctgtacggcaccggaattcgaatggtaaagcaaaaatgccaatgccaaggaaatgagtttaatacagagacactcgagagccgagaaaaagccgactcgaaaactaagacagagaaatcgaattgtaattgaggattttaagttcgctatgtccgttataaaaatgcgaaattacggaatatttcagccattcttttttttccaaaatgccaaatttgattttctttgaaataccaaagtttgaataattttgtttaagcatatcgcctgtgccattgtttgcgttcggcatggcttcatgcgccgccggcaccccagtgtttgcatgtgctgcttgcactgctccaactgttcgtccagcaagcaatgcttgcgcaactctaccgatggggcttcatcaactcgggtgattgaatgtttaatatcttttttaaaaataaatttaattatttctaaatttttgtggatttaaaatagatttataattaaataaataaatttatttatctaatgattaatttaaggtaaaataactttattatatatcattaaattttatatgtttaaaattaaaattaattaatttttaatcttttaattgatttagggttaatttttaatctttatggattttttaaattgaattacagaaataacaattatttttttaattagtgatttaattttttanaaatttcaaacattattanantnntagtnnatgcttattttttaaatattactttatttatcaaattanattnaatttnnattttgagttatataaatgtaaaaaaattactttttttttgagtctaaat

SEQ ID NO: 11921 - DNA, 3202 bp, Heterodera glycines
  unsure (1)..(3202): unsure at all n locations
ggccggaaaaattttggaattttgaatcagatttgtttatagaatttgtcaaaaaatgatcaaaatcttggtttaatttggcggtttcggctgttaaaaaaaaaattaattttaagttgaaatatttcctattaattaaatttcaattgaaataatgtaaagaaaatattaaaggattcccgtttcgttggggaattgaacccaagcgaaaaataatgaaaggccgaaggtttagccaccagaccacatttaattttgatatttccaaaaataatgttctttggttttaagagattaaggaagcagagaaagagatttatgatgttttctcgcgtaaatttaaatatttttctgactgctcaaaagttcaatctttaggtgtgtattttcgcctctcgtcccaaaaaacgagaggtgagaggcgagagtcccaaaaatgacgagagttggcgagagttgtcccacccctgttatttatatattgtattagcatgatataaccttattttgtattttatgctgatcatttccaattctatatttaaaccagttttacaaatcttaatcatcttaatcaaggtacgttttttgattaactcgttcataaattagaggtctaaattcaaaaaatgtaaaaaaacttacagaaaaaaactaaagcgcaatctacaagaaaaaaaaattttctttatataatttaaaaaacgtttgtgtggatctttttcttaattgttgattcattaaaaataaggtgcaaaatacctaatgttattttttttcttggatggcagaaagagacagacagagccaacaattcccaaaaaatcaaagaacataagaaacaatattcttgctatttttataatatggattttattctttttaatttttcgttcatttttactaacaaatttatcaactacatgagctaaaattccaatattttattagatgtcaaaaggccataattattttatgttttaaagaagtggatcaaaaattttttttgttcttttatattaatttccttctgccaacttcttataaaataaccaatgtaaaaagtataattcatttatttccaataattatttggtgaattaaattcgatagtatcaaatgcattaaattaaaaaaagataatgaattgtttaagcataattcaatatttatttaattaaaaacgatacgctaaagaaaacgcaaatttaaattgtaaaaatggatttaatacaaaatattaaaaaaaacaaggcaaatagacaatattaaatagtatacttagataaaaagcaatcatgaagttcgagaaatgttagatgccatttacatttattttgtcaagagaagtcaacaggagcggcatagacaggtcaagtaatatagaaaacaagcatggcagagtgaaatctatacgctgaatatgagacatgaaataataataaaaataaatcggagatttaaattaaatatgcatcaaaaattaacatagttaatttataataaaaaaaagataattaaattaaagatataaaaaaacaattaaataaatacagtaaatagttttaaataatgaatgataaatcttaatagtacttaaaacattttaaattaaatcgtgaacaaatttctttaattaacaacattgagcattattagcacatacaatttagaaataaaaaagaggtcgcttctgaccgtaaaaaactttacaataattatctcggaaagtcatacgaatttcgaagctaaatttttcttgataatataaatttactaataatattataaaaaagtcaattaaatgaaagatataaacgaaacaatcgaaataaataaaggaaataatttcaaactataatattacatttactattctatattaatgtcagataaaatcttgaagcataaaatctatgcatatgcaagaagaattttataattattccgacaacatctaattaataaatgataaaaagataatgccgctacaaaaaataatcaagataaaattaaaagaaaatagaatttgatattaaaataaatttaatataattctttgaatataaataatattatggacaacaatcataacccaattattaaaatttaaacaataaaaatgtattagattacaaacaaataaatataaataatattaaaaaatattaaacaaaaattttaattaattattggtattaaatttcaattaagaaaatcgggaaataataactccaagtaatattattcaacctttgtaagtttcattgaaaaataagaataaaatataactaaaaataaaaaacccaaaaaatgattaaagttttcaattaatgaaaaacagtcagctatgggaaattgcttgctataagcacgactctagtgacgattggctctaacaatttgttttttgtaaaaaataaaattagaatccaataatttttgcaaataaaagaaaaaatccgtttttgtatccaaaatttatgaaatgtttcttcttgatttttaagagagtcttcatagccaaatagcaaaagtcaataaaacctaacaataagaaaattcaaagcttttaaactttgtctcaccacgtatatcataaaattgttaaaatgaaaagcaacaaaaagataacaatataaattggtggaattggttgcacaaaaagataaaattagttaaaaaatggtggaaaatcatttcattcatgaaaaatacacatataaaaaaaaaatttctataaaaaaattgtattaaatttagtgaactatttcaaatacataaagataaacaaaattcctaattatttctaaatttagatcaaatataacattgaaatccaatttgaatatttatattacaataaaaagacaataaaaaacaacaactaaactataaaaatatctaataaaaaaatcctggattaatggccacaatggtcaaaataattaaaaaagattaaatagatcaaaagactttattattatattttgaaaagatttaagctgggttttggcaatttaaacaaaaaacatttactcaaattgtcttttattttttaagaatgtttttaattgaaaataaaaattaaatatataattactcaaataatttacatttaaatgaactanataaattattaggaattanacaattaattggacgaatggtaaatataaagtaattanaaaactaatttaat

SEQ ID NO: 11922 - DNA, 1932 bp, Heterodera glycines
tttaatgtataaatagaataaaaccttcaaaaagcaaaccatacttcacttatttattttatttaaaaggcaatataaaaatataagcaactataatttgaaacaaaatttttaaataaaaataagattttctaatttttaaccaagagaaatcccagcgctatttggatcgccgagtcatcccaagtaattataaaaaatcattttgaattttggatattcacacaagatttggactattatataacaataaaaagagaataaaaaatacaacaactaaatataaaaattttttaatagaaacataaagcatctattaatgtcacaatataataaatattaaaaatagataaataactgtattattatatttatgagaatatagaagcttaagctttacaattcaattaaagaaatattttcttaaagtgtctttcattctttttaagaattgttcataatgagacaaacaaaaaagctttaataaacttaacaaaaaagaaaaacatttaaacttaaaagcaaaaaaaaaaatgtaaaaataatttcaataaattcagtaaaactttaaatcacatgggacaactctcgccaactctcgtcatttttgggactctcgcctctcacctctcgttttttgggacgagaggcgaaaatacacacctaaagattgaacttttgagcagtcagaaaaatatttaaatttacgcgagaaaacatcataaatctctttctctgcttccttaatctcttaaaaccaaagaacattatttttggaaatatcaaaattaaatgtggtctggtggctaaaccttcggcctttcattatttttcgcttgggttcaattccccaacgaaacgggaattctttaatattttctttacattatttcaattgaaatttaattaataggaaatatttcaacttaaaaattattatttttttaacagccgaaaccgcaaatttaaccaagactttgatcattttttgacaaattctattaacaaatctgactcaaaatttcaaaatttttccggcccccgctcccaatgttccaaaatttttttgaaaaagtagcaccacaaaaagagcgatttaaaaacaaaaaatttaagagatttcaatttattaaaacaatagaaaaataccattaaattaaaaaataccaatcatttacatagagaaacatttaaaagaatttaaattatcattaatctatgcattttaatgaaaattttttcaaaaaattttctcggaaaattccttggtccggggtcccgtcttttcttgcggtcccggtcccgtaaatatatttcatgaaaatatttatataatatttttaatctataagcttttattttcaagaaaaaattttgaagatttttttagatttcccagacccgtttggaccccgacccggtttaaaaactaggatcctgacccggcttttccagacctggcaatactcggacccggtatttgcccagatacccgggcctgtaactctaatttaatatacgattttgaaattttttggagtaaaaaataaggctacagaaaaattgaaaaacaataaattattaaatagtttaaagatttttccagataacgataaatttttaaacaaaaatttttattgagaaaaaatattaaatattgggatttttttgaaaattttttcaattcttaggggtattttctgaaaattttttcgggtcaaaaacataaactgatttatagaaattatttttaagttttgaaacaaatttacttattttaatgttttgattttctgtattgattgattttggtatattatatttaattttaatgtttaatttaatttaattattatatttaagatatttgattatcagaagtccttaatatcaaattttaaaatgagcatcacactgagacgagtgaaagat

SEQ ID NO: 11923 - DNA, 1472 bp, Heterodera glycines
  unsure (1)..(1472): unsure at all n locations
cagaagtctgatttttgcaaaatttaaaatctattaccttttaaaacccaaaatcgaattataaagaaaaataacaatattatttatatatttgaaaaaataaacatgaaacattttttttgtctgatgctcacttaaatatttcgaccactgatttgacgaattaaaatgttttgtaaacgatgtctgacgttaaactggtcgatttatacgaacaagtctggagagctacatatgttcgaacacaagagggaataagtgccggtcggggtcgctttcgcgtggccgtcttttgagtgggtgcatattagagaattcattactctatatattttaccaaaatttattttgatcttatttttctttcggattttgatcatgacactgtattaaggattctcatttatggaagatcttctatggcggattgagcccatcaaatgaaagccctgggcttcattttgttaatttgaattttcagatttttaaattgttttctgacttaatntagaacattatcaatttccccgttgatatttcccgaaactatgagattcgaccttatattgttcccgaattttgttattttttgttaaatttttgaattttataaaattttatttattttttccatttgatgcacattcgaacaaactgacaaattattatagaacgtacaagccgcaagaaagaaaaacaaaaaaaagttaagaaaattatttgaattcgggttcgggattcgaaataagtcgaaatggatattcggcactatccgccaagttcagtcttaaataggcactcacgcgaaaacgacccccagccacgcgaaattattcaataaaacgccaaaaacgcaaatgcaatgggcgaaaactttatataaaggacgaagtcttactgagaaatatttagtaaataaaaattatatgttttattcaacaaaattaactaaatttgtatttcgataaagagagaaaaatatatataatctttgttgttttcctttttttaagttgatttttttttaaatttttctttcggtatctgttctcattcttgataaaaataatttctggtccccatgttgtactgatcaattggcgtaaaatggcggctttaaacttttatttttacccattttttattttcattgtcgcagttcaatgacagttgttaatttgactaaatatgttttgtgcaaaaatatttgtaaacaaaaaggaccgtcatttagttgttcaaatggggcacataaattgcaaaggtggcctttttaaatcctcaaggtgatttctatggaaaatatgcttttaaaggatgctaattattgtttgtaaagaatggtagattttttcagcgttttttttaatatgaaagatggcgtcataaattacataaatttaaagataaaccgtaacaaatttctttatgaaaagttacaaagtcatatattttcatgaaaattttatgga

SEQ ID NO: 11924 - DNA, 4067 bp, Heterodera glycines
  unsure (1)..(4067): unsure at all n locations
gattcgggacaaaaaaaagtaaaatntttctattcgcttcttccctagttgtacgaaaaaaaatttaattgctcttgacagcttataaagtaagcgcttagcaaacatttattgttaattgctttcgggataaagccgaaaattgccagcggggacggaaagtgggtttaattagtcgtatatggattgtaaatgggatttacaaatttaaaaaaaagtaaaataaatataaatgattttaaaaaagtcatttagataattagttgatcacattaatccaaaatcatataatattagaagtgcaaaaattattgcatattatgcacagataaagtaaatattatgaaatcatgagtgtaattatacaataattgcatgtgttaagcttgtgcacctcagaatttgcgcactattaattatagttaaagcgtaaaaaagataatggattttttattaaataatatttttcaaaaattatttttccaaaatttgggatatttaatgtaaattgattaagaaaatttttaaaattttcttgaatttgcctcttctcatatccagaaagatgcgctgctttatttgtgaattttgtctcctccccccccccccccctttccgcttgaccggcaaaataatttgtgccggcaaattcatgtcggcacaattatttgtccattagtgatggatgacccctcaattttgttacagaaaatcctaagaaaattgctttttcgtgttcacatttttaaaagcgaaaaatttatttggtggcagagaaaatttattttaattgaaattaattaattaattttttaaattccaaataatgacaaaatgtcaaaaaataaataaataaacggaaaaggaaacaaattgacaatgaccaattggccaaaaataaaaatgagacaggtcaggggattaattggattgacattatctcgctgaagaacagatgtgcggaatctcggccccactcttggctgtggggattatgtcaatcttcgtcatttattgtgcccttggggccaccaattgaaaacaaaacgaagtgagttttggccctttggcctttaaattctgatgcataaatttggagattcgtatcaatatgctcatcggttattatcagataattaaaagaaaaatgaagtcaattaaacaaaaaaataaatgataattgaaaaattttcacaaaaaattcacaaaaaataatttctttttattcaatttaccatttcactgttattcaaattgcttaattaagctacaataattacggcccccatttatagtgtcatttcggaggcttttggtttaacaaaggaaacgcgcacctttgattaatgtcctcggctcattcaggcgggggaggacaaggaaaagcggaccgagacagggaccgcccccgcggggccaaatcatatgggcaaatatttgttgggggaagggacacggcagaggcaagaaaagccggctattactgcttatgccgaatgaaaatagaaatgtttacgggaaaagccagcgacgggcctaggaaattagggttttcgatgtctagggggttcccgcggaaaaaatagatttcaacaattttttttacatgtgccctatccgggccgcaaaaagtatccttgaacgtttgttttaccgtcctttagaaaatagttgcctaactcgcgacatttttggggataggacctccgacttttgacttattccgaaaattttttggacccgaaattctgtgctggcgggatcttgaaacaaaagtcatggatggattatgatgatggcactcatttcgtattaattacaccatctcgaaatccgattaagatgaaagggcgaacatttatttatttatttctttttgctgtgctccgatcgtaaaaggggggggggtgggaatagggagggagatgagctgtgattgtgagcattttctgctgctgatcggagagatacgaatcgcgggatgaggatgagctgtgaaaaagatgaatgtgaatgcataatgtatacgattgtcattcctctaacaattagcacttaaccacttagaaaaaattgaattgaaataaaaaaatattttctgtaagaaaaaattgaattgaaatgaaaaaaaatttttttgtatatttttataattaaatttggtaattagagaaaaaatattaaatacataaggatccttaattgctctaaaaaactcacatttgaattaaaaaaagggatggtgagaagttgtgaaaaagatgaatgacaatgtgtacgattatcattttagcaattcaacttttagccattttgcaaaaaattgaaatttaattttgtatatttttataatgaaatttggtaatgtaggaatagagaaaatccattaatatacataatgatccttaattgctctaaataataataacaagaaaaacaactcttcttaagatataaaaaaagacgggaggaataatgaatattttttttttcgaattttgctagaaattttaaaaaaatggaaaaatgataaaaaaaaaattaaaattatgccacgaaatgatttttgaaaaatatgtaaatcttttggtgagaaaatggcggtgtggaggagaactctgctgaattgagtcaagtgttttgagccaacacacttctgtgccccccgcaaagtgggggcctcctaaaactgaattatgccgagacaaaatgaccattcgatggacaaactttcaatgtcaatgtcaattgacgtttccgccaattaacgcaaatcaatcaaaatttgaaaatgattgcgtgatgaaaggttgaatttattttttagtttaaattttgggattatattaaaaaaatttttgtttggccagggtccaacacctacgatgtatgaccattaattaaaaaataaaataagtttgaaaattattgcgtgaaagggttggatttcatttaaatttgacatttcatttaaattcaaaaatgttaggcgtgtccaatttaggtaattggccaccaattaacacaataaattaattttgaaacgattgcgtgaaagatttggattatctttgaaattttaaatttaaatttggcatttatattaattccaaaaatttgtttggccaatccatatttacgataattggccaccaattattattattattatttcaaagcgaatgcgcattatttaggcgaccaaaagccgacccattgacatacaaacaatgcctgtacaaataataaattatttaaaaatgcaaaatgttgttgtctggaagcaccaacagcaggacaaatagtggtgtgcgaacaaaaattaatttgggaatttttgcattttcaaattaaattttttgtttttcgatttccaaagttttagatttattttaaatttttagttctattaaaattcattttttaactctattttacacttctctttcgaagaaaatcattccaaaattatgcacacagtagagatttcttaaaacggatttgtggggataaaaaaaaccaaaaataaaaaaggggtttgccaaatttggtgacaggctaatactttttcgcaaacctatcagggatatgtgccgacccaattcaaaaaattcaggcaatcggaaatcggcattccgacacatccctgattcctattattttttgtttgttttttaatggtaaattatttaaacataaaatttattggggcctctaaaaatgggtgaacaaaggaaaacatacatacataagtcaatttgtcatcatcatctttttctatccccggcggggagggcacacaaaagatttttgggacaaaaaaatgatgaattaggcgtgccgccggcagtaaatacgaagcactcgccaggggggtgacacagaaggatttaggcaaaatgatgttgtcacgcgagtaaacattagcagaagggattttctagcagcagaagcaggcagcatgaaagcaaaatttaaatggcaaaaaaaaacagtaagaatgccaatataattttaatttcgaatgaaagcattgccgaagctcggagaaaaaaatatataaattt

SEQ ID NO: 11925 - DNA, 4281 bp, Heterodera glycines
  unsure (1)..(4281): unsure at all n locations
agttttcaatgttagaattggcaaagttaaaattttctccatggtngaaatnggtnantgtngtaatnagnnattgtttaaattagangaaatttatgtaaattaatntttatattngggttnggggtnnaaaatgggtggnggattngntgnaaanaaagtggtggananattaaggntgntaaatttnnnganangaggannaagaatgagaatnnngagnagaattantggatatttgnngntgannnanaaattgtnnaagnnangttttgtnnaagnnaagaattgtnnaaaagagtaaaaanttangaattataaaagtataaaaaagtaataaaaaganggaaaatgggtatattttagggttttaggggtggattaattaaaattagaataagtttaggggtggtatgtgattggaattagatacatagactcagcttcacacattgaaaaaaataattttattaaacattcaataaaattcattacgggacatggacaattgaatcatcaaaattttcaaatccttcaattttcctgcatatccctcaatttgagagtgccggcggaattggaaaatgtggtgccgaacgatttcgtcctcccatgctgtaaatgaatctttttattgagtttaaacggtttaattgattaaagaattctgcctgaaggcgctatcgaagtcgatagcggactcaacaaatattgaacaagctgctcacgtggactcacagtggttggccatgtaagagttgatggtgccggtgagccggtgccgaactctaggggtagccgcatagcttgttccgagttgatagtcgaaattattgtcccgagtgcagctaaaaatttaaatttttggaaactaaacgcataaatttaaacaaacaatggttgccgatgggtgaaaaattgagtcgattatctcaaaatgcgtcaacaccatccaacatctggcgctgtgtcaagccgatatatgttcgagagaagtaaaggaagaacattggcattccaggagaagacggccaagataattgagaaaaaatcgatttgtgcatcttcagcgatttcctgagtggtgtgtgaatctaaatcctgaatagtttggaaataaattttttgcggcgcttcaaacatacctttcaaccatagacaatctcacccaaaattggtttttccgcgctcaaaggtcattgttgaaagttcagcctcgttcaaagtctgttgttcaacattgtcggaagttatcacggcatgcagttcgtcaatctccactccaaaatttacggcctcctcagttgggtttgaaatgctgacaaacaaagcttcttccgacttttttgtagactttcaagtttattacgaatcatttgttcaattaatgaatagcaaaatctgaagacaaaaaaagcacatatttttaatcaaatttggagatttttcttattcgggtgggtctagggttaggcaaggggctatataaatgtcgtattggtattcagcgaccctgaaaaccctaaaatagacccgttttccggctttttatgagctttttagacttttggacacttcgtgggtttttactcttttggacaattcgtggcttggacaaaacgtggcttggacaattcgtggcttggacaattcgtggcttggacaatttgtgggggcgcctatataggtcataaaatttgaatctagttgaagggtatttcttcccttcaagaaaatgaaaaacaaaaaaaggtatgccaaagttgacttttctctacttgagacagataatctcgactacttacagaccagcttaaacgtcattaatttcaatattggaagtatttgaaaatttatgaaaatatatgtagattctaatttgttttctttctttttttggcatttcagtcgcaaagtttgatatttcggtccgcaaatgtagcactacgctatttttatgccattattatgctataagaacgatattatgtgtaatagtcatattgaaaacaaagttaaccccatttattcaatgctttattttctcatgagaataatcatagaaactgaaatacaatcagttaaattaatcataaaacttcggtttcgtcacccccctcccctccttaatttataaatctgattttttcatctctaaattctcatcgaatcactcgcaagctttcataaatcccttcccgaataagtcatcctttatatgcttaaattatttaaaatataaatcatcattttgatttttctaataggtaaattaagaaaataaaagccaaattctggcaaacaaattcgctgttgttctttcaaatgcgctttgttcagtcggtggtgccaatatttctattacggagtcaatcaaatgctgtgaaagtgatctttataataaggggatttaaaaaagaagttaaactcgataaagagatcatcaaaataaatccttttaacaaatttagctgaactcaagctattaaaaattctttgaaaaaactaattaattaattgagatttggtcgtttttataattattttcaacggcttttattcggccctacaaaacagcgacgtttttttgctgtccaacgggtgttttggcgcccggcgcttcgtggaaatgatggcactgatcgaatttgcgttcaattcggttgccaaacaccgccaaatgttcatttacgtttcaaaggtgttggacccgcactttgacaaagtgatgccacccgtattggccaaagtgagcgccaaagggcccgtggaaacgcaccaaaaaatgccatttgcctaatcatttatttgtgatttattatttttataattgccaaaatttaattatttttaaaaatcgataaaaaaattcttctccatttgttttgtcgctcgctcgtctcatcatttagtttaaattattcaaaaaaaaataataaattcaaaaacactgtagggatatttgccattttgttgttcacaacagcaagaagtacggaatcggataactggtaatcacaccggaaactgtgacccggaaataggggaatcagtgtccccgtacggtgagaaatgtatgaaagttttaaatttaacacagataaataactgattaagattcttctaatttaactaaattttccaaattatgaccaaaaaggacaaaatttacctaaaaatggaaaaatgacttaaaagttaaaaaaagtgaatatatttttattttttatctttttcatttaatttctttttaaatttttgaaatctttgaaattattatttttagatgaggcgttaaggaaaaaatcgaggctcatatttttgtataagattttagggtttttgattttataactattctaattgaaaacaaaaatttgtaaaaatatttttcactaagatattagcgattttttagacttattcattatgtaaatttatttcaacggttttacttttttatttagttcatttctccatttttgctcatcggtcatttttactattttttgttctcgttgattccctaaaccattcatccgtttggccgtgtgcatattgtagcggcattaatttcccattttagcctggccaaacccctcaaacggttaccatggcttttccatttaatttaattggcattaaatcaaaacatctttttattaccgaaaaagcgtaattattcatgtaaaatcgtaaagtagatttatttcgcttttctcattaattttccgaagaaaaatccattaagcattcatttgatgagcatttttggcgtcttctcatttgcccatcctctcccaaataaatcaccaattgaattattatttttatttaattcaccaggatttaattgatttttattgaatttttattcaccaatttttcatttattcaatttttcacttatcttttattgtaaaattataattttccaacctaacgaatacaaaaatattttccttatatattttttcgaataatttaaccaacaacagatgaagccaaactctgtgcaccaaatccgccgttattccttcaaatgcgccgtgtgcagtcggtcgtgccaatatttttattacggcgtcaaatgttgcgaaggtaattaaataaaacgcaaattttaaaatgaaaaataagttacagtacaaaacaaagctttacaaggggacaaacagaaaaaaaacattgaaattcaattaaaaaaatattttaatatgaaattaaataaaaaatcagaatgacaaaactaccaccttaattgggtaagggatttggtag

SEQ ID NO: 11926 - DNA, 3190 bp, Heterodera glycines
  unsure (1)..(3190): unsure at all n locations
atataatttttgttaaaactttctcaattttaccaaacttccctgggttgngtgatattttaattgggaaaagtctaccccttttttgaaaaaggnaaaaaaatgatggaaaaggattaaggggttttagtaattgatgaatangatttaattaatagtgattntgnantggtaagtaaatnnggaggtnaagaaaaattgaaagaattgatagtaaaaatgtaaaaaatggatataaattaattattaggatgtngggnaatttgttttttgtttgttaaggagatataaatatatgtgataatggagagatggtagtgttgtnagtagtgttngggttagattagttaggaaaaataattatggtgtagggaagaggtgttattaaaagtgnaaataaaaattatttttaaatagaaaaataataaatatttaattaaatgtatatttttagttttatgntaaagggtttttttcgcaaacttccttgttaaagcgttagtaaatactcattggtgccggctgctgctgcggctggacaaaaaaaagtttaagacaaacattaaaataaattgcaaaccccagcgaagaaacgaagaaatgcgtccaaatccatgaaaattttttgtagaaaatttgtaagctaaaatcaaaaccgaaataagaagagaattttatgtgaaaaaaggaaaacatatgtatgagaatgattgttaaaatgatctaatctggccatttttatgcaaaactgctaccaaaaacttttattcaaaaaacaaacaaatttttttttgaaaaatcgcaaaaaatttcgttttatgacttcaaagtgcgtgcaacattttcttaactaaattcaataaaatcaaaattttctggcatcgccttcggcaccatggcgcccaaagttctaccattttcgaggggtcataattagggattccaattatatggaaatccatatttttttcctggactgtgggaggcctgaaacgcactcaaattttttcgattgaaaattttgagtctaattccaaaaaaaaacaattatttcagaaacaattgtgaggaaggggaaatatacaaacccagcttgaaattacttttaaaatgatttgctttacacacacatatatatatatatagtgtgtgtgtgtgtgtgtgtacctgatccatcaaaatccccgccagattcttaattgctccaataatcccaatctccaacgatgttgtgccaaccggttcagtcggtgccttgccagtgccaagcgaaacaaaacactccagctcatactggggttcctgaaaatgtaaaaattgaaaaaaaactaaataaaactggtcaactgctgcatacattgtgttgttttgccaatgcattttccttgcttatttcatccaacagttccaggcttggaatgtttgcgagcagacctcaaaatcattattttatatcaatagtgaatgggaggggggaagtttgggtgcaaaaacggtattactttttagcagggatgggccaaattgaaaaataaaaagcaaaatttgcgaaaaaccggtgccggtacatttatttttgaaaaaaccggtgccggtacatttatttttgaaaaaaccggtgccggtacatttatttttgaaaaaaccggtgccggtacatttatttttgaaaaaaccggtgccggtacatttatttttgaaaaaaccggtgccggtacatttatttttgaaaaaaccggtgccggtacatttatttttgaaaaaaccggtgccggtaccgctctacccttagtcataaccttgttcaaactgtatgaaattttttgaaattttggtctatcgaatgatatcaagaatgtttaatttggttaacaatgacaaaagttatggacagtttttttgttgaaaattttcatttgatggtttttttatataacgacatagcaccaagccaattagttaaaaagcattactaacgatttcataaccattttgaaggcaaattagcaagcagctctcggcttgagaatcagaattataagaattatactctgttgagtacgctgttaaaattttgactgccaccactttggtgtctacgcttttgaacaaaagtgttgaagaagcgacgaagatgaatatgatgaagcggagggagaacattatcagcaggacataaattggcaaatattaattctccaaaatttatgtttgaatattttgtcgaaaattttattatttattatttaatttattattctccttatatattgttttattcaactgtttatcggagaaatatattcaaaacataatgtggcgccggatgttgttctgcgaatttttctagcgcataattttaaccgggaaaatgatggcgcatttgattcaattatttatttgcatatcaataataatgctttctatacatatattacgtcaacataataaattttttaaattataaaatatataaattgaatttttaaggaattattaaacaattgtataaaattcaccttaagaatttaagtatgtaaactaattattagttcatttcacgtgatcacagcgaagagatttaccgctaataaatgccaatgactatcgatgattggcactcagccaagaaacttgtcattctcacagttataaaaaaaatcgctcaaattctgaatcatcaaaaaagcgacgaaaaagggatgcaagccaaatgcctcattgatggcagctgcattcgctggcgatgctcctcgcgttggcattctgtgccggcgacataaggggcggatcttcagtaaaaaaagtcgcaaattgccgtcgaattcaagcgaaattgtccgagaaactaaaagaggaaaaacggctcccggaaaatgggtacttatcctttttgtgaaattttttgaccagtaaactactgtattgtcgtcggcaataggtttctttgtcccctcccccccccatttttcgaaaaataattgaacatttttaaaaatgtgtgtaaaacctgggaattatcgaaaatctgacacccatttctataaattccataaaattaacctagaaaaaatattataaaaaaaatttcagggggtcacaaaaatgattggcacctgaaatgcatcagtaaaaatgtgtcagtgatacaaatattttaaaataaattctacatataacttatgtatgt

SEQ ID NO: 11927 - DNA, 3684 bp, Heterodera glycines
atttttcgaaatcacccaaaaaaaattgaaggtcttaaaaaatagcgatttttttttcataaaaatttcttattaaatattgcatctttgttaatttgaatccatacaattgcatataatagagttcgacatttcgaaaaaaagcagcctgaacctgggttccacattggacctggattcctggagaaaaatcaggttccggaaaaattcaggttgccgaaaaatggcctggacttgtgcccaggaaaacccaaggcgttggatccagggccaggtcgaactctacctataataatttaattccttttttctaacgctccgtccaaaaaaaaaccaacctttttcaatgccatcgccgccattcccgtcatcgtcgtgccattgttgttcaacaccaattatttggtcatggtgcaacaaatggcgtcgtccgtccatcagacggagtccaacggcgccattgccagcgccgcatttgagcgacaaaaagcgttttaaaaatgggaaacgactgccgccggcggcgccgccccggcgctcgtccaaagagcagaaaaaacgcgtcaaaaaacggctgccgctgtttccgccgccgccatcaaacgggacgggaagacggagcagtaacagaacggacagcaacagcaggaagagaagggagagaaagagacgccgggagggaaggcaaaaggtgggagaacaacagctggaaaatgtggcatggcaaacggtatttagcatggaatgatgaaaacaatttatggcacttttttcaattttgggtaagggatttaattttttttttaaatctagagttccaggctcactgataaaggacatgttacgttttttgattaaaaattttatgaaaaccaaaagggtcttccccatttgtttttctatcgtgccccctataagttaaaaagtgcattttcgcatttattttcggatgcaattaattgcatttaaaaattggtgagattttctgatgataaaaaaaaatttacaaaaataattgctcgttggatgaatgaactaaagcgaagaatttgtccatcaaaaagtggtaatttgcttgcatttttgcattttcacggacctatttgggccagaatttttgcagtttcttatgatgatgcaggaacagagaaactgcgacgaaatccctcctgtttattcggggaaaacacaaaatcaaaattttcagcaaaaaaatgccacgggtattccgagtaatattcaaattacggagacatttgaaatgcttttttttacccaaaaatggatgacaaagcaaaagcagttgacgaccgtcgcctgagccgcaatttcgacgcgacaaaacgccggcggtgcgccgtgccaaagtggtggtgggtgttgtcctcctcctcctcccccaatttggcgttgtcggcgacggcactccgtcgttgacccgccggagcggacaatggcgcggaggagggcgcaacggttgcggaaaaagtgcgcaaacgaagcgacggatggtgacgcatttatggggactttttatgatggcaatgcatttttgccgctttttacattgttttcagttcctaaattggcatataattataaaattcgatattttttttttgtataaaaatttgtcatattcaaatttgtagcagtatgcactcaaaaaatgtaggcaaaacagtcgaacagctgagtggtgccaataattttttttatacgttttattggcattacgccaagagaaagaaaattaaaaaaaattttgaaaaaatgattttattgctgacagaggcagccgatggatgcaccattaccattttaagcttttttggctccggcgataaaagttattatcagaaaaaaagatcaattaaaaatgcaagcaaaaatttgtcaattttatgcttttttcctcttactttaaacccccgttttagcagggagaccattaaagtatgcaaaaatcacaactaattgattgtaagcccattaagtgattgatgtaagtttagtgtaatttttttggcattaaaaaaataatcaataacaaaaaacgacaaacaaaacaataataaaaatgaaaagtgcaacgataagcccaaaatggtgatcgatcagccgaaaatccgactcaaaaagcgcattccaacagccattttttgatcacttcttccgccgccattagttgtctgttgttgatcaactttagctgctgctgctgttgtcggtattcgctgctcaacaatgcgtgccatttctctgttccgtgtgtgaatgttgtcgtaacggagtcggatcaccgtgttcttctcggccggcgccaaacgcttccgttttgggatatacctaaacagtgccgatttgaatttgtaaaagggatattctgtagagataaagaaaaatgtggggttgcctcccccaaatacgaaatttttttcgtcccgagtcttacaacttccgttttatctaaactgtgccgatttgaatttgtaattttttaatttcatatatatatgtaaatcgggctattttgattcatttccggcaaattagctccgctcaaattgggatactattacaaaaatagccaggattgcctccccaatccaaaattatttttttatacgaatcttgaaacaacctcatatttttgaaagccaacacgacccgacatttttgtacacgactcggcacttttctagtgccaaatccgtgcccgaagctggtaatagtaaataattaagacttcgttcgttttattgcataacccccaaaaacgcactgttcaaatgcgccgtgccaatcgtcgccgccgggcgaatggaacacgtgctgcagaatggccatcgcttggaccagggtcagcattgggttaccaccgcgcaggaactcgggcgggatgggaaagcgtcggcatggcagttgctcttcttcgctgaccaacagcgatgccttcaccggaatgcgcggctcacgtgccctgtccacaatggcaccgatcacgtaacaggcgtcgggatcaatatgctgtgaagggggaggggagggagtaattagtggaaaaagagagagagagatgaaaaaagagaaagatggaagagagagatgaaagaacgagagcgagaaagagatgaaaagcaaagagagaaataagacagacagatagacggacggaagaaagaaagagacaaagagaaatgggaagagagagagagagagagaaaacaaaaaaaaatgcaataataacatgggcagagtaaaatgccaaaaaacgcactgtcaatgagtccttggagtgcgggctcaggtagacaattttgtctgcgctgcgcaactccgggaacaactccgtgtacgactcggtgtgcagttcgccggtgacgcatcgcgtgctgtccagcgtgttcaatcgcatacgacaaagtgcgtgcacttccgcaacagcaccagcgtcggcaccgccggtgccgtcgtcggcggatgatgttgaggggaagttacacaaatggatgggccatggcatttgccggtcacggttggcagacaacaacatttgtaggtgaagcatcgtcagattgaggccacgtttggtgtgcagagtctgtttgtgtggtgagggaactatgaaaagcattgtcgatggagttgatgttccgggtgtcatacgcccttctccccgac

SEQ ID NO: 11928 - DNA, 1001 bp, Heterodera glycines
aaatgatttaatcggacaatactgaaagaaattatacccaattcaaatcttaggaaattttttgataagtttctagaaaaaaaaatttgaaaaaactttttcagcaaatttttcaaaaaattttccttgaaattttcttctaaaaaatcacaataaatgttttaaagaatttttttgggggaaggggaatgaattgtatccgatttccctgtacatcaccaacccgtggagatgaatgggattgtaaaggctttggttttgcgtgttgctgttctttgctcatcgccctttttctcctcctcttcgtccctctgttccttttcctcctcctcttccactgttcttcttccttcctcctcctcttcctccaattcctcttccaattcgtcttcctcttcttccatttttggcatcgccgtgccatcgccaccaccgcttctcatcaattgcatttgcgcctttttctgctccgttttcagccgcattttgttacgtttgaccaaaaaagtcaaataggagagtcgttccttggcactgtgcagctcaagcaaacggtgccaatctgacaaaaatgccaaagaatatccggtgataaaaatgacactgggaggggctaattgccaatttttcctggaaaaattttaatttcgggaagggtgaatgcccgaaataaatccctaaaaattgctgattgtaagcggttagcccatccgtccccgaaatgagcgtattgtctgcctatgtaattgatgctcaagactctcgataccggtgccgaatcttcgaaaaaatgtctattccaaaaaaaacatgcaatttgttttctctccaaaaatgttaccgcgctcttccaactgagttggcagataagtggtcacacgcggaataaactgaaaaaaatagataatgatgagttaaaaaaggggggtgctaatccgacgaaattgtggtcgcgccgaaaaaaaagattcgacctgaagctgggcacaaagccgttcaaa

SEQ ID NO: 11929 - DNA, 4387 bp, Heterodera glycines
tggaatttgtcagccaagaattgatggacaaacgcaacgtcttggagatgaaagtgcgtgcaaataacagaaacaaattcgattgggacacacttatcaaatacaacatgcaggtgctgtattcttttgttttgtattatattagcagaccagacattaatgaagggggacgtgggaatcttgaggtgaccactgttttatgcattcatttcatcccgaaatggcccttgctaattgtaagtaattgtttgtttcgtttcagaattgcaaggcttggctgagtccgtacgatgtctattggaagtgccgatacaaatgaactacggaattgtttttgttctttattaattcaaaataaaagtttgttttacaagtacgttgaatctttcattgtgtttccattttcacttcattttttcatttttattttttgcatttttcacttttaattcgtcattttcgatttatcttatggcttttctgtgatgcaaatttttggggaggaagagctcctttccgtcccattcaaatacgtcgtcctttttgccgtcggttgtcctttggtcgcttttttgctttgtttgtttctcagcatattcctccattatgagcaggtaacaaacagctaattgaacgtaatgctttcctgtttttccccttttaggctgtgtggacgcattgcgaagtaataaattatataaataacttcgcattttgtgggttctttaaaatgtctctcttcctttccggttcctaattggcttccctctttgtcggctgctgtttccacttttgcgcctgaacgttacatttggcggctgttcatcggactccatggaactccgaggtttcaattctccccccccccctccattttcgtgcttctctcttttccctcagattggtcgctgcgttcgccttcaagtgatcgcttttgctcttcggcctccgaatgttccatttttttcctccttcagaaactttctggtcacttccagcctttggcctttcccctttcgtccatggtatcgttgggcttccaaattcgcttgttcgttgaatttggccgaaattctgtcactgattttgctctcgtcggtttcttcaacggaggaccattgtgagttttgttttctgatgaccgctggtcagttgtcctttctttaacagtccttcacgccctttgtttctccgggttcactttcttcgctcatttttacatgtttgtcaggttcagcccgtgttggttttgaatttcttatcaatttcattatttaagtatttggcttttcgacttctccggaagacggcggtccagcaaattggtaattttgggcagattacattcaacccggccttttcaagaaggggcattcctgtgttcatgagtttgggatgaaacttaatgcgtagcttaccgcggttagttttgtaaaatctttggactccgaggcttctctattagcaagcacaattttgaaaaaaaactcaaatcaaagtcttgattttcaaacaatttcgtcatgatatatttcatgttaatagagaaacctctgggctaccaaataatatcaaatatattggaataaggcaattttgaaaggtctgatagccaaaaaactgggatggcgcccattcaccttcgcttgggatttagtaaatccatttgcccttcctttttgtgtttgctttttcatcccttccctcttttgttagggtgaactgtccttccaatacaaagtgttgtgctgcgtcggttctgtgctttcgctgcttttcgtcctttatttttactaccgtcacaatcgcttctgcgagcccggcgtttacactcttttcgcgctcagcgagtacagtctgattctgttcaacattctcttccactccacgctttactacgacttccattcccgcgcactcactttgaacaccgcggcactctcttccgtcgcggggtacgatttgttgccgttgtacagcgagaaaaggacgtgacgaaagggaggacaaatggtaatgatgaccatctttcactgctgtatattatttgttttttttgttcattttcgcatctttcccaaatatttggccagtaattccttttgagatatatcactgtgatagtgagatgttttttaaaacttttaactctctctggtctatacatatgtatatttattaatattcgtgatttgtcttgtaaattctgcaatttataatatgtatagcaaatatttaaaatgtcaattttgcttttgtcgctccattaattattttaaacaattcaatcgttgcgtcttattcagggttcgtaagttttttttcaaaaaaaggacaaacgatgctaaaacaaagattttgaccccaaaaataagattttttgaaaaaatggctttttacattgtggaaacagctaaaaagcattattggatgttgtaaacacaaaggtaaaatcaatttgaggcgcgcttttcttaaaaaaacttttggatatagggggccggcggtgccgataggcgccgtcgggaaaaatttttgaaattgggagttttggtagcatttatatcagcgaaataaataattatgcacaaaaaatttaaaaagtttggggaagcctgaaaataatggacaatcttagaaaaaggacattttagctttctaagatccggcccctccaaaaaaggacaaatctttaaaaaaaaggacacttacgaaccctggtcttattagttattgcaattttgtgccaaaatatgtgtcggaggggaggggctcttttgggaaggattatgccctaggcattcaagcactcccggggcgagtggggggaagtgaggcgttgtgatgagtcaactaatccccgcggaaacattcggacgaatgggtgggagagtaaagggggccgaggaagtggaaggcaattgcttactcttttgaaaaagtcccgaaatggccaaacggagtgtgtgaatcgtttgagttaggatcactcgcaaaaatcgattgattggcgattattttgtcctttggccattcttccgccggctttctcttcgattggcttccatttctctcgtttttcccttcctttctctttgtattcccttgggcaatgaattcgttgaaatggtacagatggattggatgcttttcctcccaattcaatttgtgttcatcggatgaattcctttcgttccttagcttgattaggcttcatcttcttccccctcattttcccttttattttccgatggttttcccacaattcttcgcttttccttcccaaattcccccgcttctcatcgttctcttcgttctgttgcttcacctccataataattccccgcaaattgttggggcggtggcgacgaaacgcgcggccaatgggcgagaagaaattgggcgaggacaccgccgaaagggccgggcggaagagacggagggggagggggagcatttgcgtgagttttcaaaggcatcgccaaatcagtgaaagtgccctttggcattcattgctcaatcattatccattctctcacatcgctttccttccgccgtctactgattaattactttctctctctctcttttttatttttaattagaatttctcaatattttatcgatggaatcgaatgggcaaatgcgccgggggaagggggagtaagcattttattatttgcgcagcagatagacgtgggcaacgacggacagtttatgtacaagacgaaggggggggggggtggggtcgagcagcgattgcttctcccataatccctcacagtctctcctccgcccgcttctgcttttcccttccatttccccctcctccgcccattcttttcatttccccatttaattttctggccatggatttgactcgccccactgatcaattggcaaatgaccggtcaaactcttcggaggccccacaacagcagccatttgttgtaaatgtggtggcttctcgccccagaagtaaaactgaccccaaaaattacgacccgaagcctttgatcgtcccgccgggtgctgccgctgatcagcgaggcccccgtcggctttccccggtcccgtgcctttgtatggcgcgcaattcgtcgcccaccggtgcctccccctctcaactcgtctaccaaccgcggactgtcccttctccgtccgcgagtctctccccaactgatcaaaaggggtggggcacgctgaagaattcgtcggatccgtcgacaataaatgtgccgataaagacgagtgtttgcacggcaacggtgaaaacggcgaatgtttgtggcagagaaatcggcacagtcggccatcggcaccaactgcagcagagccaatcgaagtaaagacaagcggcggagctgaatgtcggcgacagttcgaa

SEQ ID NO: 11930 - DNA, 1434 bp, Heterodera glycines
  unsure (1)..(1434): unsure at all n locations
atttttacgaatagagggggggggggttggttcatcctccaaggattctttttggnttaatttgactgttaaaaggcctcctgaagagatgcccttctcgtcggcaccgtttgttggccttcgtttgccattccgtcgtcttcgcctttctcagcggacgtggacacagaactgcgacggctcagccaattctgaagtttagcaataaaaaaatcggccaatgaattcagttttccattctgatcactgatcggttcatttaatgaacgggtgtggacattagagggttttttcgcattaaagcataaaaattcatcaaagggatgatgagtgagggattcctagtaggttaattagtatagtcattagcattgtcaattactcacttggcactgctcctggtgaatgttcagcccgactttctgcgcgtatcccttcccacagccgtcgcatttgtatctgtgaaaatggaattaaaaaataattgtttatttccaatttcgaatttacggcttttcgccggtgtgcactcgcaaatggacctgcatgttgccctggttggtgaaggatttgtcgcaaaaattgcatctaaataatctgttttttttttttgcattttaaaattgcttcccctttttctctgccactctctcccacctgaacggtctttcgcccgtgtggagtcgcgtgtgcacatacagcgaactcgcgtacgcgtaacgcttcccgcaaaacttgcacacaaaatcattggcggaggcgatcgtcgaagtagcggaagcggataattttcggatagtctgttgctgctgttggctaaccgaatttggcacggtgttgtgccgttcctgtctctgctgttgctgctcctcctcccgattttgctgttggctttccgttgccatttgtgccgtggcacgtggcgatcgcggcggctgagagaacggacggtggggtagcggaagcggagccatgccggaagaagcaacaaaagaagcgggaggctggtggtgctgaaccgctgaggagggcgacggaactgaagccatcgtcagcggcggaggagaagccacgggctgggaggacggaagaggcgcaaacggaagtgaagcggatgaagcggatgaggaacaggcggaaaagactgtggcggacggggaagagaccgtcggcaaaggcacggaacggtcgcaggaatagcggtgatcagcggaaagcgagcgatcagaaataggttggccagaggagtgacgatgatcagcgggaagagaatgatcggataaactctgatcatatgtattctggtggtcagcaggagaagagtgatcagagaaattctgatcaggcggatgaccagcaggaggagagtgatcggagaaaggctgatcggactcaaattggacaacctaaaaaccaatttataataatctaaaa

SEQ ID NO: 11931 - DNA, 1818 bp, Heterodera glycines
tcgtggctttgcaattcccttggctggcaaacgctttcggacagaatttgcactgatagggccgctcgccggtgtgcgtccgcaaatggacctgtgaaggggggctgaggttggcagtgtggagaagtgatcatagaaagggattagacaaatcagactgccaagcgagggagaaggctttcttttaatcagtgcctccgtcctatcattatcccaattaacccaaccgatatccggtcaaacccccggatcaatcgatatcgcataggctccggccataaatcctctgccctgatcaatcgatatctccgatcagttccgctccttcccatccttccgcttgcctgtaggctccccgcgtaagcaaatgatttgccgcagaagcggcagctgtgtttgcgttcgttctgctcgtgcacctgcttgacgtgcagcttcaggtagttctttagagtgaacgttttcggacaatgttggcatttgaacattttttcgccgtgtgtttttttgtgagtgtaaagcgctgacggggaagacaaatccttgtcacagtgggggcatttgtagttgcgaatgccgaggtgggccgacttttcgtgcaccgtttttgtgccgtactgagcgaatgttttgtcgcagaatttgcatttgtatctgatcaggagaaacgaattgcaactgatcaatcagcaaagtgatcaaaagacttaagcgaatcattggaatttgctaatgccttcctaattgttcaaatcgttcgcacttacggcctttcgccggtgtgcgtccgttcgtggacttgaagcgtcgctttttgggcgaagcgtttgtcgcagaaatggcacaaaaagggcttctcacctgtaaattcaaaatgccacttttttccattcgttttttaaaaatgccaattttgtgccaataattgttggccctttctccccccccccctttttttttgcccacctgtgtggcagcgtttgtgcgattcaagaatggacaggtagggaaacgctttgccgcacacgtcgcacttgtgccgtttctccaccggcactttatcccttcgcggcaccgtcccctccggcgtcgtcgtggccgttccgcccggcctccgtctgatcccccgacgctcatctctcccctggttcatctccgtctcttcgtcgtgcccttccacgtccaccaattcgtcatcctcctcctcctcataacattcttcaaacatttcctcctccccctcaaattcgtcttcgtctctctgtgcagagacattttggcaggaatttgttgaagaggcgctgaacagagctgaacaactctgaaaatgtgcataaaattaaaaaaacaaaaattaaaattaaaaggggggagggggagacgaagcagcacttgccagggaggtgatcatctgctgagaaagcgcctgttcaggcgaatgcgaaacggtcgagaaatcgccggacgaagttgaggcggaagaggacggcgcacagtcggtcacgcccaactcggcgccactcgacggagtgccaaccgacgatgggccacctccgatgagcgtgccgatcgcatttctgccgccgtttccgtttgtgttgccattacgccggcgatggcactgctcgtcaatggaaccgagcaaatgacggggatttgaaagaacgtcgtgcatttgctgggaatgtggaggagggtggacaacgaccatccgacgagagggaaagcgccgccagcgaaataagcgactgaaaattattttagagtgaaaattattgaaattggaaaaataaaattaataaaaaatataattaaaaa

SEQ ID NO: 11932 - DNA, 794 bp, Heterodera glycines
gaaaagtagaagcggatgatcaagagggattttgaatgggagagggggggggggaaggggcgattctgtgggctgaggttgggtggatggggaggatcttcggcggatgaatgggcaagggacagagagggaggggagaggggaaggggaaaagggggagggaatggtcactcctcgcccccccccccgccctctcaaatgctttgtttgttttcttttttctcccctcaggggtcacacagcttcttcatccacacaaatggacgcaaaaaatgagaaacgcgcgagcgatttgcggggaacaatcattcgcacaacgaacaaacgatggatgaatgctcttggggagggaggaggaggggatgagaaaagaaggaggggcaagacgaagaggataagagagcgagggagagagagtgggagagagatagggggagggaagagagatagagaggggagaagagagagagagaacggaataccaaaagaaagtgaggatgaagaagaagagagtgagagggggggggagtgatgaggaaaagtcaaagtaaaatgcagaggaaaggaaaaaagacatgaaaattagaggaaaaaagaaaagttggcatttccgttttgaaaatgagcaaaaagagaaggcaattaacaattaatttaaaaaatggcaaagaaagaaacaaaagcagcggcagaatgattggccgcatttattcttttgatggcaaagaatgggcttccgattgaacaaactatggtatttttaaaattatatttaatttaaattcatttaaaat

SEQ ID NO: 11933 - DNA, 932 bp, Heterodera glycines
tttggcccccccgttttgcgccagggtcaggtttttaaattttgtctatgtttgaataaatgaaaatatgtattcgtcagttttctgagttgctaatcacgaatattgtattcattttgacaattgcgaagcccggctatttaaatgaaatacaatttttgaacatattagatcaggccttctatctgttttgttttatcaaatgttttaatatggtgggtccaaatctgagaaaatgatttaccagattcaaaaccgtagctgtacctgtttcaaaaaatggcctgtacctatttttttctgtacatacctaagtacaggaaaataaatgtacaggaaaaatccaggttgccgaaaaatggcctgtgcctgtacctggatccaggaaaaatacagggctggatccaggtacatgttgatctctaatctacacccataaaacacagtcaaaatcgggaagtttcaaaaaaaaaattctagggggttgtgaattttttgaaaatttaaaaaacccattggaaggtaaaagtttttcacttttttttgtaaaatttttgatcaaatttttaccttttttaatttttggcttcgcgccaaaacgtgggcgccaaaacgatcctggcgccaaaacgtgggcgccaaatcgtcggcgccaaaacgacccagtccccaacatacaccaaactttttatataaggattacattcaaaaaatgagataaaaatgtaaatcaaaattaattcaagtattcgcttcaataaaaattataagttaaaacagtcattcaaattttacatcttctattttcaaatccaacaataagcagcaaataagcacataatgctgaaataagcacattttagctttctaagatccgaccccccaaaataagcacaaatcttagaaataagcacacttggccactctgatat

SEQ ID NO: 11934 - DNA, 3107 bp, Heterodera glycines
cttgttatgggggcgtaaaatgaaaacttcacaataggagtcggccaaaaaaagtgagtgacggttaaaattgtcaaatcattttttcatctcttttttatgacgtgtaaattgtaataaaactgatttaaatccccaattcgattcctattatcacatgcatatatatatatatatatatatatatgacatatccaacttttttttctaacttaaatttgtaacagatacatataaagtaattaaaaaccaaaaatgttgaccggcatggtcaaggagcacatggcgcgccagcacttgcgccgtgagcagcaggaaaagctgaagaatgaggcaattgtggcggcccacgagctgaccgaggcgctggtggaccatctgaaccacaggttttgcaaaatccatcctacggcattgccgactcgtccaattattttccggactttaatatcctgagaaaataaaagtcggtgtttctggctatttgtaatcgctgatttctaattggcattcactttggcctatttaaaaatgtgaacaggaagtctaattcaaattggctattctcagatggtgggcttccatttttggaaaaaaaaaccaaatttttcctgagaaaatatttttcgggttttcatggtcgagaataagaatccggcatcgctttccgggttcgatttaggccgagaaggtggtcggtttaagattcttcgaccccgaaaacccgcaaaatagtgtagtttacctcgagaaaaaaaattatttttcaaaaagtggacccaccccaccatctaaaggtttaccttcaaagtttccgtttgcattttttaaaattaaaatggattaaaactagcaaaaacgaatctcaatcatttgcaacaccaaaaatgtcatgtttaatatggtgtttcgccttcttgttcgaatagggtacgggatttaggaataagcacaaaaattaccgatttgtggaataattttttgatttttgtaaaaacaattatttttcagggtgtcccatgcctacaatttgcagaaacggttggatgtcgagtgtaaaaagttggagacacaaagtgcggcgttggcacggcacgcggacgcatgggtggcactggtcggagacatgaaccaggcactgaaggtacacaccggcaaaggcgctgaatatttaaacgctaatgccaagggagggctaaggcccagcaaatttaagcgaaacaaatatgttttattttttaatttaaaaatgttagaattatggctaaataaatgaaatatttttaaaattcgctccctttttattggcaaaaaattctttttttttcaaaaaaaatttttttcggaaactggccaagacacagttaaaaagtgtaatgaaaacttgcataaaacgcattaataacttgaaataaacaaaatctttaaaatttcatgattggcccgattttcatttacgccaaaattcgattagaaatgaaaaaatgcaaacaaaatttttctggctattcacctgcctcaacccctgtcgaattttttaaatttattgttttggtctggccaatttcttgcttgctaaatatggcgagttttcatttgtattttcactttctaagaccatatttgaaagtgccagaaacaaaaaattaacaaaaaggggtgggggaaggtaaaatttgaactattaaaaaaaacattttaaaaatccaaaaaattttcctgcccgctcctaaaaatccttatttgtcttgcaaagatttgcccaaatcgcaaaatttgttcatttttggataaaaaatatttaaacaaattcatttaaaatcacaatttttcccatggcgcgtgtccgcaccaccggactccctcttgtcgcccagtattttttttttgaaaaagtgggctacaaaaaaagtcggtgttcaattttttggtgggagtttttttttttgctacaaatataaaaaatgatggaaatttttctccttttttgattctcaaaagtctaaagctttgtgccttttctcaggaggttggcgacgtggacaactgggcacgagcaattgaggccgatgtgacacaatgtgccgccactttggaacgcgtttatcggacccggggcggcgctgggcatggaccggcggtgggcgcgggaggtaaaaattattggattggaaaatttttattagaaaaatcatttgatcaccaacattcagccccacctgaaaattaaaaaaatatttttcctttcgagttttttctcgttaaaataaatttaacgagtcgattcaaatgttttttattaaaaaaaacaattataattacaaaaaaatttagaaacaaaatttttttttcagtttcttcaaatcagtgagcaaaattttttttggttttaaactagtattttcaacaaatttgcattaaaaagagagctgtctggtacccctttcaagatgcctttaagtgcattttttttgaaaatttaatttctttctgattttatataacattgaaaagcgagaaaatatcgccaaaacataaaaacgccataaaaaaattacttgaaaaattttttttatttctttataatattttttgaattgggctcataaaattttaccgttctacatacaattaactattttatagtgcaaattcttgaccagtaaattttaagattaattacagacataaatatcatttttaggcaacacttcggctccacctacggcataaaaacaaacggacgtacgaatagaaggagggcggtggaactttgaccgcaattaaaaaaaaattttgtttttttatttttgtgtaattttttgggtaagggtaatcgattccaaaaaatttcttcaaattggcatgtgggaatgcgatcttcgccattccttcctcggcgaagcaattgttttttctttcatctggccaatcttgctgatccggcccgtctttagcactttcccagtgatgcagacacccggctgcactggggttcccgtggccaatgagataaaggcgagcgcagccggggcggatgccgaagatccttttcgcttggtcctcgatggcggcatggacagatgaactttgatttgatcgaaaaa

SEQ ID NO: 11935 - DNA, 3125 bp, Heterodera glycines
ctctttttctttcctccgttcggaggattttgccgaattccgtgcaaattttgacgcattgcagcagaaattggatgcggtcgaccgagaagaatgcgaaaataaaatgcaaaatgggataacgattaggcacagatgtttggatggagaagcgatgggcggagagccgcgaaaattgctggaccggaacggatggatcagcttcagggccacgtccgcactgcattttcaacgaagggccgagctgaacaggagagccaaggaggaaaagtgagtggcaccaaagggactgcctgaaatttgaccttttaagcgtgtttacatacttaagactgaaaaaacgcgaagcattgttggctgaatcggaaattggtcgctgtgaactgctcgcccatgatgacttccagcgggacgtgctaagcccgtacaaccatcaaggcatcgcctttctttattgtgccaatgcgcgacgcgccacgagccgacgcgtcgaagaggcgtcgcgcattttctgcacggggccatacgttttgcaacgccaattttaccacggcaaagacacatcgctgggagcctttttgcttaagtaaaacgatgcacagattgggactggaacagccataaccaataattcagctgctgcttcaactcggacttcaaatgcaaaggctgtgaacggccaatgttggaccatttccggcgcattgtgcacggcaacacgcgcattgaggtggtgacgcggaatgtggccagcgggggcggcggcggcactttccgtaacagttcctcgtcctccttggccaacgcggcggtggccaccgtcggtccattcgtcagcgggggactcgcggccgcaattccgtcgtcctcgtcgggtggtggcgacgacgagctgaacaggacaatgccactggacgagttgccctcctccatccccaacaacaactgttccgccatcatttgttggctccgttgcaatgcgtccgctttttgtttttatggcaaaaattgctctgtcatattttaagttgttctgcaaattcgtcgattgccaaaatgacggacgaaatgttccatttgagttttgctaaatttgtcgattatttggccaatgggtcccattgggtcgggttttttttgcttattgtcttcccatatttgtccattcatcgctctttgccaggtgtccccctttccttcgtccatcgacttggccgagtgtcaccactgcacctttcactgccattcccacttttttgcccttgacaattttgtcgcgcgtttctccgtcaacccggtcctttcctccctttcttttcccatttaatcgtccgttttcatacgtccctttttggctcagatttacccattgaatgttctctttgctccaattccgtgctctgtcgactcgacgacaattactgaatcgacgcaacagaaaagtgtcatcaaacaaaataatgaatgtgtgtaatttcacaaatttaagcactttccgaaattgccttgcgctgcactttggacgagaagggcggcgggaatggcactcaaatggtgccggacgtcggctcggtgattgcccatgcgttggcccaaccgtccgagtcgcggcacccgccgggccgtgaaaaggaaaagggctctttcggttcgctgggcgctttcagcgcgacagcgaacaatggaagcaaattcgccgactttgtggaaattgtttacgcggaagagaattggcagtacacagtgaaggtgccaaatcataattggcacatccaattaagtgtccaatttcgcctttaggtctatttcccggaacaatttgagcgttttcgttccctgactttctgtgatggtgaagaaaggtttgtttttgaattcagattgtgttttgttatgttatttttatgcttttagctttatcaattccatctccacttcgtcgccatggtttttctcattttttattataattttccattttatttttaatttaaaaggtatccccaaggaggaaaaagtggcgccgttttttcccgcactgacgacgaacgctttgtgctgaaaacgttaaaccgtttcgagttggacgcgttcaaacaaagcgcactcaaatacatcgattacatttcgatggcactgatggagggcaaactgaccgcgctttgcaaagtctaattagtggacatcaaattaattggcgtagggtttaatttagatttttggtgctttttccgtaaattgcactaacaaacagacgggccaatcggtgaagagtgatctgatcgtcatggaatttctgttctacaggaaggacatcaaacagatttgggacctcaaagggtcactaaggaatcggtcggtcgacgtcttttgaatggcatttgtttccaccgacttttcttcacattgccctctttttaggctcgcctccacaaaaaatgacaacaacggcgcctcttccgtgctattggacgagaactacattcagaacatgtggcggaaccaaatttatattacaactcattcgaagacggcactgaggcaagccaagcaaatgccaaaataatcgaactctaatacactaactgtgacgaccaatttcagtcaggcgatcatcaacgacagccacttcctggccgaccagggcatcatggactacagtctgttggccggaatatgtcggggggaggaggacgaagtgatcgtcggcatcgtggactatatggtgggcattttcatgccaatttcatttctaatttgtgcccatcatccgcatgtcagaggacattcactttcgacaaaaaagtcgaaagtgccatcaaaaatgccattcctctaaccaattcgtccactgtcatttcgcctgagcaatactgccgaagattttacgaagccatcgacgggtttattcccgacttttacttttctatctccctaaccgtaacacctttaattttcaggtatttcgcggttgcgcccgaccaatggaccagcgaatcagtttttacttagaacagaatagaatgaatagaagagtattataatgacatctctttccttcccattcctttttcccattctctaaagattccaatggccttttcgaacttatttccccactccat

SEQ ID NO: 11936 - DNA, 2354 bp, Heterodera glycines
aatattaagcattacaaataatatcttcagacaatattattttattttatattatctttattcacttagaaaaaccttcaattaaatttatttattttatagaaaatgatggttaatggagttttctgtttttgtctggtaattgtcttacttcaattaggtaatcgttggtaatttaattatttaatcagggaaagggtttttaggtgttcgaaaccgtaaaataggtaccgaaataagtgccaaaaaagtggcaaaatatgtgctaaaatcgcgaaaaaccctaatttttgttgaaaaaacatgtcgaaaacccaaatgttcaaaatgactaacaatttttttttagtttttcctcgtcggcgcctaaatttctgtgcttttgactttgaaaatttttagtcacatttgctaacagagttttttttgttgtattttctttaggaatttttcgaggattgcgagaattatgaaaaataaatgcttgaaccaaaatatgattttaagtatcaatactataaacaggttctgttttggttttataactcgctctatttacaaaaatagggcgcagaaaatgggttttttcttgaattttttactctaattagccaatttatgattttttaaatctcaaacattctaaaactttctaatcgaattatttaatttctaaaatcctggctggccctttcaataataaaaaatcaaattttacaaagtgggtatttcagtgcctagcgaagatggttgtagtgttgctgaaagttcaacttcgagtaatgagacggacaacgttagcgaagaaacaaagccaattaaaaatttttggtaaataattttaaaaaattaaattaattattattatataaaaaatgatttccaaataatttggctatttgaaaaatataaagttttaatcgggtaaaattttaaaaaatacaaaaaaaaataaatataaaaattttcatttaagaaactgaacatttgaatccaagaaagcgaaaaaaaccagatcttcaagatacggttaattacgtgaataaaattaaggtcaataaaatattatttttatttaaattaataaattaaattggcattttatttaatcaaaattgaattctataaattaaattgacatctttaggagcatttttgtgataataaaaatgtctacaaacagtttctggacatactgaaaaagcataaaaatgaccataaagaattactttggcaagttggccaactatttcatggccatggtgatctgatcgacgaatttattgactatttatctgtgatggacgggaatgatcaaattcgccaaaaaaccgatgattaaaatgatttttcaaatttttctgtttaaaaaaagaatatccattcgttttttatgttgttgtttatttgttgctttatatatggtaaatctttggttttagtcttgttattttcaaaatttttgtgatttatcccaaaaatccaaaaatgctcaaaatttccaaaaaaccacaacaagtctaattttgagaatttagccttaattgcctctacattttgatttgtttataaaaattaaaatctgatagataattttgagttttgtgaattttttaagaaagttaactggaaggccaaaaacaatactgaaaaattttaaaaatattaaattgattttgaaaattttaattatttttgtgggtttttccgaaaaactaaaatttccaaaatcataaaaagtctcattttgaaaatttagctttatttgcctctaaaaaccacaaaataaggctaaagcctcgcatttgagagttctgtttttgaatgtgtataaattgaaatgtaataaataacactattaagggcatttaaaagtcaaaaagtaaaactttcaactcgtttaaaaaaatgtgaaataaattattacgtaacaaatcaattagaatttagaaacaaaagactattttataagtttttttgtatttattcagcagttgtgtcaattgacaatctttttatgcttgtaatcgctcatatcatctgtaaattttcgtttctgtccagacagtttactcatttctaaatttaaaattagttataatttgaatgttgtattttaatttgttttattgatttcgttaataactgattaagaaataattaattaaaaatgattgtttgccgctatacccaataaatgcacttaattgattttaatccttagtttaatattttaattaaaatcttctttttgttttctctaaacctccttttttcatgtgagcaagaaaaccttttcattttttaactaaattttcttggatgatactagagaccggacgggatcttgatcc

SEQ ID NO: 11937 - DNA, 1890 bp, Heterodera glycines
  unsure (1)..(1890): unsure at all n locations
agttgtccggtctatagagggtacttttatgataaattatgtatgtttatttaatttatttatttctttcaccaaaaaaattttaaaaaattatttataattaatttcccgttatgcgctttatttttattttttatccataatttttaatacgcacttgtgtccatcagtttaggctgttgctcctttggcagccaactataaacgctttcggctgcctctgatgccacccgctttatgtcataattagccggcggcggtggcggcgccgctttgatgttcacaagcttttttggctgtttgtccgccggaagccagcagtacaccttggaaatagcaattgaactcggcaatgagccgtcatactcttccgccggcgcttcattttccattggtggcattggtttcacttaatttttaatggatttttaaattttctacaattaactatgaaaaatattggaagaataaattataattcatctcaattaagaaatattaaatataaaattttaccgaattgaaataaaattgccaagcaaagagtgatcagcataattaatcggaaatatgagaataaatttttgtgataacttttcaaaaattaattgctttttatatgggaaatataccttggggataattaattaattgacgtcatttgtttatggatgaaaaataaaatattaatattatccataaacaggaagcatatattatatccggtttttgccaattgattttcatacgaattatgaattattattagggatgtcaattttatgtaaatacatatttttttcctggcttctccatgtgctaaatagtaggaaaaacactttcttttttgtgtttgcgaacaaaagttgggacttttatttacttatttttacatatttcggggttttatacattttttacatatttcgagattttatacatatttggtacatatttggactttttcttacatattttcattttttttacatattttgaggatttttttatgaaaattttgaagatcctcaaaaaaaagccaaaatttcgacaaatttttatatttttttatacatattttgagaatttttgaaaattttttcgaaatttcttgtgaaaaaataaaaaaactttttttttttaaatgcaccctaaaaaatatcaaaaataattttttagatgttaaaaggtgattctaaacctatttaggttattttctgccattttgtgccaacttatacatattttcgtacatattttggatttttatacattttcttacatatttcgtgatttttttacatatttatgtacatattttgaccaatttttgtacatatttttgacatccctaattattattatttttttttgttaatttccatttatgtatgataatagaaaattaaattaaccaaaaggacttccgagagccttttccaaatcaaacttgatcagcagcactaaatacatttccttagtaccgtacccaatcatggcaattcatcgcaattagtacaaagttaattcatacaatgggatttagtttataacgaaaaactgcaattttgaaaatgaatttttgccaaaaatggaaaattttctaaaaatcaatgatagttgtaaaactgtcaaaaaatttttaaaatttttcaaataaaaaataattagcctagccttttttcccatttttccaaatgtatgtaaaattggttatcgcatcgatacaaaattgttttttttaccagaaaaatgagtcaacaataattgatacttttaataataccgtatttgctctaattatcccccaatctccaaatagtccccagtctagggaggggtttgaagaataatccctctatcttnaatccccagtctccattatcccca

SEQ ID NO: 11938 - DNA, 2298 bp, Heterodera glycines
tagagcaaatacggtaatcatttttcggaatcgactattcggaatcgactatatttaacatataaaggaatgaaccgaaaaaaaaacaggaaatcccagaatttttggttcttaaaaattttattcgcatttaatacagagtaaaattttcatgttttcgataaaagcagctgtttgtttcaaagtcggtttaaatacgtaaacatactgaaagccatcaatcctgcaatatgagatcatttatccgtttttaggccaaaaattgacgcattttccgaaagtcgatcattgcccacagaaagccaacaaacaattttcatgacacgaatttttttacaaaaattaaattaccgaaaatttaaaaattaaacacgcccaaatttcatttatgaaatgatcgtaaaataaatgtaaacgaaaatttatacaaataggaaagtacagaatacagataaaaaagaatttttttacagatagtataatatccataaagaacctgaggtatatatatgatgacatttaaaaaaggttgtggtaaagctaataaaaaaatgactacaaaagctaacataaaaaagagactaacaatgataaataactaaataaatccccaaaaaaacaacaacacactctcatctgtgtcctctcaaaatgccaccaatttaagctgacattggcattggctcggccactggcggacgttcttttaagaaattaattttaaaattatttttatgaatgaaggtttttgaatttttatttttttcacgcattgatccgaagaaagaggcacataaaatgctcaaaaatttatttatttttatagttttttcgacatttttctgtcttatgttttgctattttaggcttaggtttataatgtatagttattgtgtttctgatatcagcagtttttgattttgagttttttttaagaatgtgtgaatttatatgtcttatggcaaatattggaaattttagtgttttttccctcaaaaattgtacgtaatttatttatttttaaattttttattaaataatggctattttttttattttgacataaactatttttcaataaaaaaaactgttagtttttcaaaaatttatctttaattgtttaccttctccactaacatgttggccgaaaatgtcatcattgaaatcaagcttcacatcctcatgaactgttataaattttttttataatatattaaaattaataaatttgcaatggatttatttttattaaatataaatttccaatattattaattataagttttacttaattcaattaattttattaacaccaaattttattgtcataaaatctcaatttttgttatatgggagaaaaaatatataaaaaatatttgatagaaatatcattttaaaacttaaaatacaacaattccaaatattaatatgagttaataaattcatattcattatataatttaattagctctattaatataattataaatcatgagttaatgaaattactcttgcacactccgtcctgagattttggatgcacaatatcgccacctgttttaattaattataaaataaattatttaaaaaaataaacaattaattacgatcttttggcaatgaatgtttatggccatctgcttcatccatttcagtttttgtttcaccatgattcaattttgcaacttctccaattttcaatttctcttaattaaacaaattaaaatttaatttttcggaatttttcttcgataaaagtcaaatcttgcgttaaaagtgaaaaaagtcacaaaaaagtcaaaaaatcccaaaaagtataaaaaagtaaaaaaagtcacaaaaaatgttacccccttcatgtcaatgcatttctaaaacattcgaatgcatataacttcaatttttgaaatctaatgaataattataaagtttatttatatttaaattaccctcttcatatttgtggattccttcaccattaagcgcttaatttgacggattaatttttgtttaagaactctattaaatttataattaacattcacaatttttaattatctgttttttctcccgtgtttttattttggtggcaatttatatttttttgaaaatgttcaaaaagctttccttttttaaattatttctgacagaaataaaaaaacgttaattcttaaaacataaaaattattattattattaaatcatttatgccgacatttttcagcgtccaatggtccagcatttatatgatctaaaaaaataatttaaataaattacatttcttatttttatgctgta

SEQ ID NO: 11939 - DNA, 3885 bp, Heterodera glycines
  unsure (1)..(3885): unsure at all n locations
gtcaaggtgnatgtcatatttcgctttgtacattcnaatgaatgctctcttttcatcttcgcttttcacttctgctggccatcctgacgcttccacttttattttcaaaaacatccgaacgtaacctttgaacagttggttgtcaaactgttcataatgataggccctgtagaatcccgttactctatagcccaacactaatgccttccgcagctcgatcgaggtgaaagtcctcaacaatgcccttttttcctcggcgtggttacacttctttacatcttttgccattacaaaatttttcttcgccctactagcacaataccaacaattggggaagagtaacatgccatcaatatgtgccggaagtataggaaaaagcaattccttcggaggaacgaccctcactttcaacagtccgtcgtagggaacatcatcgggcgatgtccaattcacttcaaaattcctgctcaccacaatttttgggacgccaacaggatatggggtgtcttaatcaaggaaataaacagaaaaataatcaattttaccataatttatgaattggtagagacttatgatatcaaacattgatatctcaatttcatctgttgcctttgcgtacaggcaaaaaggcattgttcgccctcccgcataagcgtccctcggattgattgggcctttgtcggacaccccatcgaaaaacttcttcatcgctctgttccgctttaaatcaactttcacatcacattcctaaaaaaattttctaagaaaaatttttttattttttgtacccaaacttcctccactctgaagtttttacaagtttccctcaaaaattccattcgcatttgtgttcttctgaaattttcttccatagtccgaccatttgttccaattgtccatggtaaaaaacatctcgggcaaccgtgaaaagcacaccccttaatgattgaacattaaattgcaatataccgttttttcaaacctgaaattcaattatttttttctccattccaattacacaatccactttcagtcctccaaattcaacctcacctccgttacacgcgtgcctagctttgacccccttgctttgagctaaccactcgaagtacttcaccgcaattttactctgattctcagccctctcgtacccccccccctccggcataatcggaatatgttccgccctcaagaactttgactggaatatcttcatcacaacccctgctattgtcacgctgtctttcaccacgtccatgtcaccagtaatgccaaaaaaaagctgtctgaacttcaaaattgccgccatcaatatttcaacgtcattttcgcaatacactttcagctgttccccttaaatttgcaaacaataaaataggaatgtttatttttgtttacctaattcaaattctgtctcataattttcgtggtaccattttacgaatttctcatactcctcctccttcatagcaccgggacaatagtcatcaaaaggcggcaagtgcggcaattttttcccaaagttttcattcttgttgtacttgtgaggaaagtacaacttggccgggatactcagccccaaggtcttcggcaaatcggccaatttattttggcttagcatccagaaatcccgaaagcatactctgccagcctttatctgataaatcttcagatccgccatcagtacatctgtttcgatccttctttcggtcagcttccgcagaataaaatgcgaatcgaacctccccgcgtagtgtgcgaatgcaacagtcccgaccctttcatttccattaaccaatcaacaaaacttcccattgggtcctcttaaccgggaccgggaccttttctggttgaaaaccgggactttttggctgggaaaaccggggaaaaatcgggactagcccggtcccggtcaaaaccgggaccttggtactcagttgtactcagttgtccgtgtccaggtcccggtcccgctgcactctaattaaaactaatataattatttgtagaaagttgcaaagacatcgaaaacaaatgccaaaacggaggatatccccacccaaaccattgcaaccaatgcctttgcccggagggatacgggggagaaaaatgcgaaattgtcgaaaatggtaaacaattaaaatgataaaaatatttaatatttcagatggaaaatgcaaaagtgatgggccaactgaaattgaagccgattggcaaattcgaacgttcaagccaaagctgagctgcacgaaaaaggatgattcatgcgcatgccattggcaaataaaggcaatttatagcaaatatttaaaaaaaaattaaaaagaaaccaaataacaaataaaattaaataaaaaacattttatagccaaaggatggcaaaaaagtgatcaccaaactgaaatggctgaacgaaaaggtgctcagctgtggcaacccctgcggcacttatcgagtcgaaataaaataccgaaaagacaaaagagcgcggggtaatttaatttaaataatttttaaagtattttatttttgtaaaggtgcatttgtttgctgttctgcccaaattgaagaagatgaaacaaagaattggattgaagcggatgcacccgacgaggacattctcatttcggcttatatcaatccgtcgaattttgagcaattgacggaattgttcgaattgacttatgaaacgggtaagggcacataataattattattttatgttaatattgctttaaatttcttagatggtgctaaaattttgccagcgagcgattgtcccgacggtgtgaattggaaccgggagagatcacccggagtggtgtttttttgcgagcatcaagatacaggagagagtgtcgagtgctgcactaagggacacaaatgcccattaaaggccaactcggcatacggatgtcaactaattgtggtaaaaaccagtgggattttaaacagtgtgccgaaaataggtgccaacaggcgcagccgtaaaaaattgaaaatttggccatatttttaatagttagatttattaagctgaacggccaataccgcgaaatcagaggcgtaaatgaaagcagaatgttttgtaagttcttaaataattttaaaaattaattaattaattcttaaataaaatactttgtaataaataaaaattaattgtttaattgcttaaatttctttttaaagaggcgagaaggagagacgaaaagcttttggggttattggaaggacaaaagcaaagacccaattcgcattggcgattttcagtgcttggactacaaacaaggcggcattaaaaatccaccaaacaaaacggtgattgattaccctttgcgcttcaaaagtgccaacccaaacgaataatggtgccgaaagatgaatcaactgcggagaatggatgtgatgcatgggcgggggtttttatttaaaagcttttatttttataaaaattatatattttttaaatgtattcattcaacttttgttttgtattttgcatttatttatattgtagataaaaattatttatatcgtagctctacgtcccagttcggcacttctggtgaatttaagagtgccaaaatatttttaacatcgtcaatcgcaagaattaaaccaaatttttgtttgtggttaaatgcctcatttgaaatttcgtattttttttttgagaaaaagatatactcgaacaattttttagctttttcatttagttttcaacacattcttttttttggggtcttagcatatatttgagctttttaagaaatattaagtatcaaaaaatctctctttttaattgtttttaaattagaaaatggaggaaatcatttggcataagtaattgctaaaatattagagagaaagaaaaatgaataa

SEQ ID NO: 11940 - DNA, 1336 bp, Heterodera glycines
  unsure (1)..(1336): unsure at all n locations
agtggtgttttttgncgagcatcaagatacaggagagagtgtcgagtgctgcactaagggacacaaatgcccattaaaggccaactcggcatacggatgtcactaaattgtgataaaaaccagtgggattttaaacagtgtgcgaaaaataggccaacaggcgcagccgtagaaaattgaaaatttggccatatttttaatagttagatttattaagctgaacggccaatacagcgaaattagaggcgtaaatgaaagcacttacttcttttttgaatgttttgtaagttcttaaataatttgaaaagttaattaattaattcttaaataaaatactttgtaataaataaaaattaattgtttaattgcttaaatttctttttaaagaggcgagaagtagagacgaaaagcttttggggttattggaaggacaaaagcaaagacccaattcgcattggcgattttcagtacttggactacaaacaaggcggcattaaaaatccaccaaacaaaacggtaattgattaccctttgcgcttcaaaagtgccaacccaaacgaataatggtgccaaaagatgaatcaactgcggagaatggatgtgatgcatagggcgggtgtttttatttaaaagcttttatttttataaaaattatatattttttaaatgtattcattcaacttttgttttgtattttgcatttatttatttatattgtagataaaaattatatatatcgtagctctacgatcccagttcggcagttctggtgaatttaagagtgccaaaatatttttaaaattgtcaatcgcaagaattaaactaaatttttatttgtggttaaatgcctcatttgaaatttcttattttttagagaaaaagatatcctcgaataattttttggctttttcatttagttttcaacacatttctttttttcggtttgagcatatatttgagctttttaagaaatattaagtatcaaaatatctttttttattgtttttaaattaaaaaatgtaggaaatcatttggcataagtaattgctaaaatattagagagaaagaaaaatgaataagtttggcaaatcaaaaaagaactcaaaaattagtgaagagaaataaaattacaaatgggaaaagcaattttgaagaaattaatctgaattaaaagcggaaatgaattaatttcaattctttttaataatgagatagagaagaagaagcttccccgagaggaagattaatggatcaattgtggcaacaattgatcctatatgatcgaacaaagtggagagctggagagggcaggtagttcagctggtagaacactggt

SEQ ID NO: 11941 - DNA, 1657 bp, Heterodera glycines
  unsure (1)..(1657): unsure at all n locations
ttcaaatacgttgagcagctgaaccggcaccancccaattgtcctacagggtgctgttcccgatggaacttcggttgcnccaatgtggtaagtttaattaatttgggtgaagcatcacatggagccacaaacnccatgcaaatcgtaaccgacagaattatagagacaaattgaggatttcttttttcatttactctgtctaaaaatttttttcaaaagtttatgtttctttaaaagattatttcttcttccttacctccaagggtttgatttgcttttaaaaattctcttcagaaagatgcttgcgcccacagtgaccacatttacgacttggtcgccgtcgtggtccattgtggttccacgccgaaccgaggccattacattacgctggtcaaatcccattcgtattggctcctcttcgacgatgacattgtcgatgtaagcgatggatttttaattaaaagctaacccccaataatttgctccttaaagaagttggacgagtcatccattgaggactttttcgggctttcggacagcaacgcacaaaagaactccgagtccgcgtacattttgttctaccagcaaagggcaaatactcgttgaatttgtcccacccatttcaatttgttgcgaatgggcattttgtaggaacaaataattttaattgttgcatcgattgtttctcctccgttttgtccccttcttccagtgaattttttgttaattgttttgtccgtttttcctattctatctgtagttttacgattaatccgcgttagtctctcacaaatttctaaaaatgtttttttttacttcgctcataattttttgtatttttgttgttcttcgcaatgttttgttctctgtgtattctttgccatcaaatgaatcatataatttttatttaacccactctcttaattaatgttttaaatataaaattttgtttaaagtatctcttaaatttgcatttttctccgtttcttttactaatttgcccccaaggtgtctgtctgtccaattgtctctctgtgcatggaaggtgacgacggccccggcgtttacatcgaatatccattcgaagaaacggggggcgaaggggacgagaatcggataaggggcaattggtcgtccaagttggattacctgctcaggtggcaccattttgacatttgcataaaattctccccgtttaaagtgccttcggctacactttcgctatcggcaatctctggcgctttccctatcagtgcagcatccacggcgggttggttgacaaaaggccgcagtctgatcggttcacgatcagctaaaatgccaaaaagggggataaaatgaattttgtgattattttatttgctgacaaatgaactaatactggctaaaattcatcaaaattcggaaattaaaaaattgccgtgttggctttttcttcggttgacccactgaatggttagtacggcatttccccttcggcttcaattttagagtgttttttgggaattgtgccgtccgttttttctctgttgactgatctgatctttttatttttacctaatctccaattgcctttcagagtcccctttttcgtcccttacattgtccctttttctgctcattgccttgcctattttgtttcattgaaaatcccttt

SEQ ID NO: 11942 - DNA, 1947 bp, Heterodera glycines
ctgctcattgccttgcctatttgtttcattgtaaatcccttttctatataattttcattacatttctcttttaggaactgtcccttggccaattcatcagtttgtgtcccctctccgcttggaaaatgtcgccgctgtttaaaggtcggttgtttgtccatcctttagtcaatcggataacatttttgtcccatcttttcattttccaatggttttttgtacattctaaggcatcggtgtctccatggtgttcatttcgtgcatcatctccatttactacaacatgatcacttcgtgggccttctattacatgatcaattcgctcaaatttccgctgccgtgggcaacttgtgggaacagttggaacaccgagagtgagtcggttcttttggcattattttacactctgttttcgatgagttttctcccacagattgctccgtttggaataagggcgctgttgagacgtgtcgactgctcagcggcgtcattttggcgaacggaagctgtgccaattttggcgagaatttggcgaccgaatttggcaaaggcaacgacagcgcagtcaccgcgttcaccgacggtccgaaggcgggcggagtgatgccgagcgtggaatatttccagtgttacaccaccgtttgaaatgcttgccatttaaaaattgctccccattaaagcaaccaagttctgatgctctcttccggcatcgtcgacttccaaaccgtcaattggcaattggcaatgtgtgaaatttcaaaaatggacaaatgggtgtcacattgttgttgtcccgcttttccagctgtctgctcatttcttggcttttcgtctttctgtgctctttcaaagggatcaaaacgagtggcaaagttgtctatttcatcgtcatctttccctacattgtcctcgttgcgctgttcatccgtttcatcactctccccggctctgtcgatgggctttttcattacatgcgacccgactgggctatcctcacggatttaactgtaaattttaaatttacttttgattttttttcactcctccgttcaaatcaagggccaaagagttcttttgattctgcaaattttttcccatgttttttcgctctcaaaagacgaccaattacgatggataaaaactggctttgtttttatttatttttttagtcaatttggtcatagacgagacttgtgagtccgtctttttgggattgttcggtttgtctaaatctatacgcgcccccccccctttttaggcgtggggcgatgccgccattcaggtgttctactcgctgtccacttgcaccggcggcttcataatgttgtccagctacaatcgcttccacaacaacattttctccgacctttgggtgctttgttttcattcgtttcccattaatttctgccgattgtttgccctctcagatcatcggtttggtggactttgtcacttccgtgctcatttcgtccctcgtcttctccaccatcggcttcatctgccacgagatgggcatcccttttgaacagttccatctccaagagggaattcaggtaaaaacaatggggaagaaacaacaaattttgtgataaaacagcactgatggaataaatgtaattgtccatcatttgctcattgtcaggtggtgttcgttttctttgtggaagccctctccaaattgccagtcgctcaaatttattcattgctttttttcacgatggtcgccttcgtcgtttttgacactgaagtaagtcagtaaatgggaggatgggccttacatttctgttttggttttacgtttaatgccattatgcctttcagttgtttatcgtcgagacaattgtaagtgggcacttccattttttgactgggtctggcattgtccaaattggcatttccgtgccaattatggaatctttatctttgctcttttcaggtcagctcaat

SEQ ID NO: 11943 - DNA, 1675 bp, Heterodera glycines
  unsure (1)..(1675): unsure at all n locations
ttaggtcagctcaattngcgatcagttcncccgaacgacttcgnaagtccagtgatgattcattttttacatttatttntctcattcctttccctcatttctttcttaaggaaaccatcgccatgtgctcacttttacactttttgccttctttctgttgggtcttccgctgtgcacagcggtagaaaacaatacaattacctacaatcattttgtttttgccgattaaaataaatttctttttttaggctggcatttattggatcgttttgtttgaacgcttttccgccacttggcctttgatcatcatcggcttcttcgaggtcatgactgtgtgttgggtgtacggtcagtcatttgcttttttcattaaataaccattgaacggttcatttttctcgtttcaggtgtcgacaactttcttgacaatgtcaaatggatggtgagaaacactccaaagagagaaattatatgccgttgggtgcaattttcgatactttcgaatttacggcatttcaaatttattttatacaattttccgattaacctaaaaaaaaatttgacggctaataatgccttaatttcttccctttattttagattggtttttaccctccgttttaccttttgtggaagatcctctggaagttcctttgtcccattttgcttttggtatctttgcccattaattaatttgttaatcgttcctttgcccctcccccttcccccgaaggcgcttctgtcgttggtttggctgcaacacaacccgttgcagtacaactccttcctcttcccccgctggtcccttctgctcggctgggccatctctctgtctcccgtcttcatcattctgttcatgttcttctaccaatttgcctctattagcggtcccttttcaaaagtaattggctacagtacaattttttgctatttacagtacctaatatagtaattgttcaatgcgaatgcccttccgttaagcgtctcagagagctgttgtgcccgacggatgactggggacncgcgttggcggtgcaccgtgccgaattgtaccccatgcaaattccggaggcacaaaagctgatggcaccgccgagcagctgcgtgtatcggaacgcaacggttcattcattgaccatgaaatggaattaccatcaatttgttgaccctcccccnctttttaagaatggcgactccgtggaacaattcatggaccggtacagtcgacccatcggaaagggcgtgtacccgcagcaggaattcgacaaaatcatcgccagaaaaccgttggcagaaaaggagacaatcatttgatggccagcgaatgacccgccaatcactagtcaatcatttcatcgatttcaaattgaggccattcattattagaagaccgttctctttcatttgtttattgagtatttccatttccatattttccatctctgccgtgcctttctctctctccccctttttctgttcattttccattctttgcctacctctttgactgttcctttttacgtgcacaataatgttatttttaatttcctatcccatttcaattaattacgtcatcaatgtgcatgtgaatgagtcacttttcggagagattcattcattccattccttttctcttcattaggtatttgtttctttccttttcttcctttttttg

SEQ ID NO: 11944 - DNA, 829 bp, Heterodera glycines
  unsure (1)..(829): unsure at all n locations
aaaatgattgcttggaactgatttctggtggcacaacaacggctatttatgcgccattttgggggcggagttttcgccgcaaacgccgacaatccgtccgcccatcgttcgtacgtccgtccctccgtcagttcgtccgttagccgaaggtccgccccaattgcccaacagcagaaattggctttagcattgtgccaaaagtggtgaatcatccattcgttttgtccattttgtccatttgtccaccaatttttgtacacttccgcccattcgctgctcattttgttagcatcggtttttctgttttcacagtttttctgctgttaatgatgattcattcatcatccaaccacataatttgtccatcaaaagcagtgaaaacgtaaaaaattaactgtgctttcccaacgataaacggaaatggcagcaaaaaatgaaaaagaaaaagcgaataaattaacaaaacgattttataaaaataatttatatacaatatgaaataatgttttatgtaacggtaataaaagtcatgaatttccgcttcagatatgcacaaattacatgatttagtaacgataaaaagccgtaaataaatttgttagtcatttactgttttttatcgatcgttaaaaattgggcatagcagaaaattaattgccataatgtttgacaatcatttaatttgaanttttggtttttatagagtatcaaacgaaaatttcaccgaaattttccaaaaattttactaaatttttcataaaaaccagaaaattacgaattnttttaatgaaaagtctgctaaaaaactggtaaaattctcaattttccc

SEQ ID NO: 11945 - DNA, 2203 bp, Heterodera glycines
acacaaaatttaagcattaaaaacatataaaagttggcagctttttcttatccctactaataaatgtctaaaagttctcatctttcactactaattggtccgagtttatctgatcgcgaccaccttccaccatttatttatcttttcgtattcaaaagtcagtttttttctgatcacaatttgatggacaaaatgaatgaatcgtcacaaaaaaagtaaaagcgatgttggattattagacccttaacacttaaatttacaaacaagttccccgggggctttgtcaacatcaccggactttgccccttcccaccccttacgaaaaattattttttggcgtttttgagtcggaattttactcaattttttattcaaaagttttttccgtcttttacaaaattaagaataatataagaaataaattttttgcctaattttgtctagctttttcttatccctactaataaatgtctaaaatctgctaatgtttttcactactaattgatccgagttcaactgatcatctccttacactttatcatttctgtaattattatttttgttctccctcaattccaattccaattttattatgattttattttcatttgcctttttaataaaacataaaataatttttgttttgtaaatattatattttgaattaacatatttatcattccgttttttctgatcacgatttgatggacaaaatgaatgaatcatcacaaaaaaagaaggaaaagcgatggaaaagcagcagaaattccgatgtaaattaaatgcagaaaatgaattatcagatcagtaacagaaaataattggagagaattaatgaattttgattgattaattaattaattgatatggaaaataaaaacgaaaattaataaaaatttattaacagttttcaaggatagaaggacttcgataaatttattaaggcattgaattattagagcgaggcacaggataatcccatgccggattttgcggaatctcaacccgtaatcccgattttttgcgaattgtttgattttgcgtgattaatcccgcaaattcggcctggaaaaagagccaacctaaatgacccgggaaaggatacgagaaccgagaccccaaaaaacccgagaaatttctcgacccgggaatcgagaaccgagaaatgttaaagaaattaatttaaagatattttttaagatcataaacacataaaaaaggggtagctcaaacggaatttttgcgtggagtctcaacatcaaagtgacggccttttttgcttttaaaaacgcttttttcgcactttttccaatgccagggttcggattaaaaatttttgaaaataataacatcaacgccaaaaaataagattttaaggtaaaaccaaataccgcaaaaaattcaccaacgttagaaaaaaaattatgacttctgcttttgtccaatctttaacggtcgagaaaaacagtaaaaaaaaatttaaattatagctttttaaacccgagttgggatcccgcaaaattgggcatggcgtcgtccctgccgggctctaataatccaattccatccttaaaatatctgttaagaatttttattaattttcgtttttattttccatatcaattaattaattaatcaaaattcattatttctctccaattattttctgttactgatctgataattcattttctgcatttaatttacatcggaatttctgctgcttttccatcgcttttccttctttttttgtgatgattcattcattttgtctatcaaattgtgatcagaaaaaactgacttttgaatacgaaaagataaatatgtaaaattaaaaaatataatactcacaaaacaattttatctttaagaaaatggcaaatgatgaaaataataaaaagaaataataaaattggaattgagtgagaacaataataatatttacagaatgattttaaaaaaggtgtaatgagatgatcaaattaattcgtatgaattagtagtgaaagatgagcaatagatatttattaatagggataagaaaaagctaaataaaattaggcaaaaaatttattgcatttgcagggaggaaaccaaatttggaatcattcaagaagaaataaacaaaatataattcttaaatttgtgaagactggaaaaatttttgaattaaaaaaaaattgaataaatcccgactcaaaaa

SEQ ID NO: 11946 - DNA, 1523 bp, Heterodera glycines
  unsure (1)..(1523): unsure at all n locations
tgattggtctgatacatgaattgtgcatttatttttatcttttgggggatnnnnaaatnaaagaancacctngcgtncgcattttttttcaatttgtgttgatttttttataatttcaaaaaattaactcacttgattactaggtcgctatcttctatgtagctttcctcagtttttagcacttaattatatatttttccatttcaactgttcgttattgatctccaattataaaaggagaacgaataaaataatgcttcacttatttataaaatatttatttctgatttacttttttttgtaaaactttaattgatttatggttattaataaaaaattttgataattttttaggaattatttattgaataaaggctttagttgttagaattttttaatagttgaaatatttatttctttttattgctatttttattaatttattcaaaatatttaatttatttaagaatgattacaaaataatggttgtaaattttgttctttatttaatcgaatggaaacttgatccattaatccaaatatttcactcaggagaatatttattaaaaatttgtaaacttcaagccatttgataaaaaaatatataaattatgttaaaatattatcaaaataaaacttttggtctttaataattatatcataatatcctaatttgtaagtaaatttcctttttaaattttggattttaattttattttggtgtttttaaataaaaaaacagaaaataattaatatagaaacatgaaaagaaatttttagttaaaaatatgaaagattgtcgcttgcaacttataaatttataaaatatagtagccactacaatgtttaagatgttttcaattaatacaatttattgtttatctaaagtaattataaaattaatgcttcatttaaatatcaatatcgcttgcttaattgaataattatttttactgttttattaattaagtaaaaacctaagaatccgttccctatttattaaatacattttcaaatccaattcgataataatgggaaatttttaataaaatatatttcataaaattttaaaagttttatattttttagatttatttatatatatttttctcatgaactctcgttgtttttgtttgactcatcgagtgtaatctttattttgaatttaaatacatatctttaacataagaattaaagatcaatattattttttctaattgcaactactatatggattttatagaaattgtaaaggcattatgccgatatatttacaacctttaattattgaaatttttaattataaatataaaataatgaattttaagaatttgacctagcattcaattttattgcttaaaaataaaaatatttttcaaaataagaacacaataaacccttttgatatttattatattcattgttgaagaaaaaaccttttttcaaattaaaattaattttatttcatagatgataattttattgaatattttttagggttttnaaatcactttaccatactt

SEQ ID NO: 11947 - DNA, 1461 bp, Heterodera glycines
ggatcatgcgcggacttcttctgtagcccgtagtctcgccccactacttgctccgtcttcgcatgctcccttttgcgaaagtaggcttaattttgaattttgtcgaaaattaaatttcggttttttgttcgagtcagggttcggtgttcgaatttggtcaaatggatgtcataaccgtgttcagcaacctcaaaaccccttaataatatgttttcttttatttataaattttgagtttttgttcgaatttgggttcggggttcggaattttgcaaattaaaggtcatattcgtgttcagcgccacaatttaccctagaaaaattatttataatgtcttttgtgtgctttttatagtgcggtcacttgagtcccagctgagtttggcactccattttcggcacttttcatcctggaaaagggcaagcgcgcccctaattctatttttccaacccatttcaaacctttttacatcgattctgaccgtttttaagcatttttgagtttggggcctatgatcaatatttaccttgaagttttcttagaaaaagtttccggcaccgtaggcaattcgcccgcacacagacaattcatcagtcaaatatccagcattttcgttggatcccaacaacatcactcacgcaacggcacattctcaaacacaaccgttgaaactggcaaatgatgaatggcattttaaaattacaaaaaagaaaaaagttcgtacaattgcatcgttggagtccgccagttttcatttgttaccgaatttttatactcgaaacagtttggtccatgattgtgtcaggttcaataaggtaacaggcaggaattatctggaaataagacaggaattatacaacaataaattcgtccaggtttttgaccgtaggtttttttacatttacccccttccctcaaaaaaaaaacattttttcctgttgctccgagtgagatgtcaaaattgcatgaaatacaatgaaattcttcagcatttttggcaactttaatttctttgaactcagaataagagtcaagaaattttaaaaagattctgaggttttccccaaaagcctcaaaaatcctcaaaactaagatttgtgcttatttcagcgttacgtgctttttttgtgcttatttttggatttgaaaataaaaaatgaaaaatttaaatgactattttgatttttcatttttttctgaagcgaatatttgaattaatttcatttaaaaaaaaaattacattttatttcattttttgagtgaaattcacaaaatgccaccaaaacgtaaacatgtttatttggaaagctacgcaaaagaattccggcatataaagaaaagtcgaaaaggcgaagaatttggccctttgtgtcgtctgcatattttttcataaaaatgggctcaaaatctcaaaattggtcatttttttggtgaaaatctggtaacaaatcacatacaaa

SEQ ID NO: 11948 - DNA, 756 bp, Heterodera glycines
gtaatattgtgtaatatctgttgtaaaactgttccaaatggtgttagccgacttgggcaggcgaattcggaatgccattggcaaacttggccaagcgacggtcatcaatgaggacgaactcaacgctatgcttaaggttggatggactggccaaagtttatgagatctgcacattccaggccttgggcttgctaaccgctggaaatcaaaattaatttcatccaattttagtggattttttgaaaatttacccctttggggttagccgagtcaaaaaatttctcttttaatcgcttcattctcctgttttttctttcaaatcaacaaaatttgtataaatttagcgtaaattctttagtttttcataaaaaacactccgttccatggacagggagacaatataaaaaatttaaacgtttttttttgttgaaaactgaaagtatattacctcctttgttcaggaagtctgttccgcgctaattgagtcggatgtaaatgttcggttcgtttttcaaaatttaaattgcataattttactatgcccatgcaaaattatgattcgaacatttttgcctttaccaaaaaaagggaaaaaatttgacagataattttttgggacgtatttatgtctctgttaggcagcaaactaacggcgtagccaccactcattgtccttattttttttaaattgagtaaacaaattgtagtaccaaagaattggttttacgagtgcattacgttccgcgccccgaaatt

SEQ ID NO: 11949 - DNA, 2737 bp, Heterodera glycines
  unsure (1)..(2737): unsure at all n locations
ttttaattagccaagaaatttcacctgtctgagctggccaatgcnttgtgccaacttcccaatttccaaattgcacaatgtgtttttggcatttaaccaagcgcgccattttgaagaaaaggtaaaaaattattgtcatcagcagagatgagattttttggaaataaaaaattgccaaagggtagccaaatacagaggaaaaacctcatcccgatgactctttaggttagagccctaaattgtatgttttcatttttcatggtttaaaatgattttgcactgtctcaaaatttaatggtttaaatttttgagtgcttaaattcatttttaaaaaattttcatccatattttgggatttttaccatattataaaccattttcgggtattttttatatataaacatttactctaatgagcatttacatataattaattataaatatgtgcatttccgttaattcgtaggaatttgctctccgttgcttggatcacatcgatcagaatgcgtactcattgctcaaatccgatgcttttcttaaaattggcacaaattacctctgtgaaattctggcccgtgatcagcttcaggctgaagaaatcacaatttggaatgcggtaaattaaacatttggtgattttggcactatttcgaatttttgccaaactataggctcttcgctgggcggacgaacaatgccgtcaaatgggcaaggagtgttcggcggagaatcgtcgtgccatgcttgggccggcacttttccaaattcgttttccgttgatccaattggaagaatttccaagaaacattggtaattaattaaaatttatcatcacatataaatattttcattttatattaattggaacagacaggtcggcactgcgttttattaaagaaaaattctttggcatttttcacaatgtctttttacaaacccaaaactgaccaatcctttcaaaagttttccggctgcaccgtttgatctcaaaaatctcataatttaaacaatttatcgcggctaatcactgatcgatatcattgtagcattaatgccatttcaatttattccccattaatcccctccaaatttaattctttttttcccttcaaattttaaaatttaattgctccttctgctgcagctgtttctggtgtgttgacaagtgacgagttgctcggtgtgctgcttcaccttgcccttccttcagttgcctgttcgcagcctccgctttacccactgagttttccggccaaacagcgaaattataatggtaaattcagtagtctgaaaaagccaagttccgacaggcgccaggccaaaaagtttggacctgaaaaagggcttttgtcccgttaagctcatcccggcccattttccaagtccgggtcctgggctttactgttcatttcaaaatttgtctttatttttaaatgagaaatgcattgaaaacttttctatcgcggaaattctttgtttttaattccataattactttggatttattaagaataagcaaaaacgcaatcgctttaagtgagcggaacagttactctgaaaatcgacaaattatctgaatttggaaaaacgactgacaacaccgaacggcacagtaatgccgtgatcatcagggaaatcccgtggaaaatttcggcatcatttgacacaagcgatatttcctgtccccatcatcgtgtgagaagctttgtagacttttggctccattgtgatgtggaagagaacaataaaggtagacgaataaagagaaaaaattttatttggaaaattcgaattttcgggcccgcatagaattggttcattaaatttttggaaattgagattacgagaatactttcatttcggttaatctcggaatccggatgggagtgaggagagacacaaacttaacgattagtaaatcgcattattccctttaatttttttcgacattctttggaaaattccttatcataaatgcaatgaaataaaatatagctctaagaatttgaaaattttctcaaaatttatacaccaaaaaatttttctcgctaaaatttgatttaaaaagaaaatatttaaaattttgcattaaaacatggaaatgtatctcatttgcgactgaaccagtgaataaaattatttcctgatcctgaccaagtaaagcgcttttctatggtaattttgttatcccttttccaagaaacactgtgccattctacaataatctatcaaacaataattaagcgaagtggcgctacgaatgtacggcaaaattgcgaattgtggcacaaaataagtcaaaaaaagattacactttacaagaaatgcacaacatctttcacacttcttccgacagaaagaaaatattccgtggcttaatgtttatggtgtgaaaaacacacgagcaattaattagcaaactaattaaggaattggtacaagtggctaatgagttggacaacgaggaggacacattgacattagaagccgacattcagatcaccaattaaccaagagatgaaaacaaaatatcatgtttgttttatcatttgataaggtaataaacaacatttgcgctattttcttattccattctttcattttttctcatttgttaatgcacataaaccagtgccctactggcattaaaagtgatttgttttaatttatttttaaaattgaaatagcttcgctatttgcactgtctctagagggcgctccgttccaatatcttttt

SEQ ID NO: 11950 - DNA, 2178 bp, Heterodera glycines
ttccataattacttggattttattaagaataagcaaaaacgcaaatcgctttaagtgagcggaacagtttactcggaaaatcggcaaattatctgaatttggaaaaacgactgacaacaccgaacggcacagttatgccgtgatcatcagggaaatcccgtggaaaatttcggcatcatttgacacaagcgatatttcctgtccccatcatcgtgtgagaagctttgtagacttttggctccattgtgatgtggaagagaacaataaaggtagacgaataaagagaaaaaattttatttggaaaattcaaatttgcgggcccgttagaattgggattaaatttttggtaatagtttatttagagtagctgagattacgattaatactttcatttcggttaatcttgaaacccggatgggaggggggaggggcacaaactcaactattagcaaattggattaatactagagttgagcgggaccgggtcgggaattcccggtttattcaggtcccggtcccgatcccggtttttggaaaaacagaaatcccggtcccggttttgctagtcccggtcccggcgggactaaattaattaatatttggtcattttttgacaaattctgttaacaaagctcactcaaaattttgttatcccttttccaagaaacactgtgccattctacaataatctatcaaacaataattaagcgaagtggcgctacgaatgtacggcaaaattgcgaattgtggcacaaaataagtcaaaaaaagattacactttacaagaaatgcacaacatctttcacacttcttccgacagaaagaaaatattccgtggcttaatgtttatggtgtgaaaaacacacgagcaattaattagcaaactaattaaggaattggtacaagtggctaatgagttggacaacgaggaggacacattgacattggaagccgacattcagatcaccaattaaccaagagatgaaaacaaaatatcatgtttgttttatcatttgataaggtaataaacaacatttgcgctattttcttattccatgaaataaatgttaaattcatgatcagtgaccccgacctctagaaactcataagaactcggagaaatgtcttctcgaagaaagaaatcgtgccgcctagaacaaaaaagtgccctaaatctaatgattaacaaattcatacattaagcaatggcttttctcctagaaaacaatatttcttcgactgattttattttaaaataattttaagctcggcccaatatttggccattcaagtgccatccttccaattaaattcatgtggaaaagacccttttcgttccgttggtgcacatactccttatgtaaatgtgcgtgcattaattggataaaaaatgccgcaggcacataaagcatatgcatccatagactaaaacaaaatacgaatgattaattttttgtttttattgcatttttgttaataattttgggtaaaatgccaaaataggcaaaaataggttctttcaaaattttttaggcttttaggctccaaaaataaaagcctagaaaatagacactaataactcgaaaagtagcttaacaacagcccaaaaaagcatgtttttcgtgcgtttcaggaaaattgactcaaaatcccaaagtttagcgaatttagtgattaattttcgtcagtttgagtcaagaatgaataatagtgtgaaataattgaagtaaatttgtttgaaatggttgatttaaaatattataaaataagaaactaaaaaaaataataatttttaaatatattaacttggaataaaataaaattgaatttttataaattcccggtagtcccggttcccggacaaaaatcgaggtcccggcttctcaggtcctggcaagcccggtcccggtttagcccaaaattcccgctcccgctagcggctaatgagaacactttaagtgagtgaactattttcttttttgtatttgggaacgaaatttgggacttatttatatattttcaatgattattgcaaatatttaattaattattcaaaaaatcacaacaaattatatataaaatttggaattagaatttggataggaccgatataaagatagcgtaaatattttggcttaactttcggattattcttacgatgaatttgctgaccaattc

SEQ ID NO: 11951 - DNA, 890 bp, Heterodera glycines
cattcgaaagaacggcgaattgggcggagagagagagaaaatggggggacgaaaattgcattgggagggaggcgaggggggaggcagagagtggggggggggacaatttaaaattatttattaattggacgggggagagaaaaattagggaaattaagggaatgcctaaaggggagagagagagaaagagagagaaaatcagagaaggaaagggaaaagcggacaaagtgaagccacaaagaccaaacggagttggccaatggcattgccaaagtgacggacggattggcacttggcaaatgttttgggtttttgcaatgtaaaatcgaaaatgggggaaagtgagcagcgaatcatcgccataatccttccgttacattttttattatttgcggtgcgttcgcttcgaacgctgaacaaacgccgacagaatgaataaatgaatgaatgaattgtggtgatgaataatatgcatttcaatgagcgtaataacctttcaatttatctttcatttgtaaaaaacgattgccaattccaatgggacgaaggaaaaaaaagaaaaatgggagggaaaagcgagaaaatgttaaataaaacaaaagaaattgaaaagttgcggggattaattagctgacttaatggactcacaaattattatttggaaatgaatggacaatgaacggaattgcggacgaacagcagcagacggagggaaggaaagaaggcgacccttctccgatcagtggcagtgggggcgatcgaagcgaaagcggcggagggagcggcagagaaagcaccgaccgatggacgtccttttcttggcccaattttgtgcccttttgcttccaatttccctttttggcaacttttttcgctaattgcaggtgcct

SEQ ID NO: 11952 - DNA, 3723 bp, Heterodera glycines
cagctaattagcctttctacacacttattattaccgcaagcgacagcaccaacgagaaaatgcaataaggcgagagaatggcagagaaaaagaggaacgaataataaaattaagtcagccgaagaaaggaagcggataagaaaaggagagtgaggagtaaacaatgatatggcgagaaggaagacgaatgtccgcctttctctatcgtcctcttttccttatccttttctttctctgtttccctcccactttctttcccctccgctctctctgactctcccctctttcttttcctctctctctttctaccccttttctctcaatctgtgtcgttttttccttctttttctctctcttccggccacaaactcctttatccgcttttcctctttccgccatgtctccctcccatctcctctccgctccgtcccactcgtcgtgctttcactctttcatccgttccctcataacccatcactccttggcctcgtaagaagggactcctcctccttcccccccccccgcaatttatccgtcgacgataaaaccatctggcaaaacacatttcaatttgtaattaattttgtatgcatatccgttacattttttgatcatttaaacgtgtccactttttaatttgtcctttttttgtctccctttcggcctttcaatgaattcggttggctgtcctccgtccctgccgtccaccgctgctttttcctcctccgcttctccctgtcccccctcctccgtaatgccgtcgtccgtgagcagttcggcggagcagcaacagacagtgttggtcagactgacgaaggaatgccaaacattgtgggaggacaacaaagacacacaggtgaaaagggcaaaggggagaaaatgaaaattaaatttggtaatgccatctaatgccaaaccaacctgtgccatttcctttctcaaagggtcgcttcgtcaacgatgtggcagagttgcatcgggtgcaactggcgattagtcagctggaagcggaacaacggcatgaccacctgaagcacttgcaacagcaaatgtctctgggagggagcgtaagggggggggggggaagtgatcggaaaaaaccgatcggaaaaaagtatgggaaatgaattccgaccaatggccgttcacctgaattcggtaccaatgactaacaaaatttaggatagaaatgcagcgccgggccggtcatttgtacgaacagttgaccgaatgccgtgccaatttagtaagtgccaaatatacccactcaaaccaattttccatttccttccaaatttacaggtccatcgcctcaacgacggcgtcaaactaatcgcaattatgcaaacgcatttgatctctgagcgactgttggagtggaaaaacagccaaaagttggcacaaattggcgtttcttttgagcagcgcgaacaaattttggacgaaattcaaagcgagtgagtcacaagaacagacaaagaattctttggtcaaaaatgccaatgtcttcgcattgtccaaggttcgaagtgctggcggagaacaattggactttgcgcgcgtgcgcatgttggcaattggacttgttgaaaaggtcgccacggctgaacgatacggttgcccacggcttcaaaacccacttattattatgccaattccattcgcagactgtgcaaacgcacatttccaatctgaactacattttggaaacactcaccaaattgctggtccgttttttactacatttttatttttatttatttgttggcaatggcatttttctctctcatctgctttcccctccactctctctctcctctctttctcctctccttctcctctccatccccccctctctcttctctctccttctcttctctccttatcttcctctctctctctctctgccccttttttctctttcctctgtcccattctctctctgcctctctactctctcttatctctccgttctatttccctttgtccttcccttaccattccctcctcctccatattcagtgtatgttggtcactcaatcttttgtggtcgctgttcagcctgatccggtgctgaaaacgcagcataaatttgttgcggaggtttgggggggggggggagagaaaccgaccaaagcttctgctgttgcatctgtctgttaattcttttgctaaggtgcggcttctgatcggagaaagacttggcatcaaacaacaattggtaagttcggtaaacagcggaagaaaggagaaagggagggcacggcacagacaacagtgaaatgccaacgtaaagcattttctgattggcaccgaatgggtccttttttgacaattgcttattagtcactcctttatgaaatgattattagccttctcatcctcctcttcctccttttgcttttctttcctttttcagatcaacacaaatgtcactgtgaaggtcaaccgaatggaaagtgatcggaacagttcattaattcgaaactgatcagatcattgccgaagaggaggccaaattgctgtccacgggccaactgaatgagaaggacatcaaaacggtcggctcaatttccaatgactttgagaagctaatgttggacgagaggggacacatggcctccaaattcaacaattcggtgcccaattcaatcatttgaatgtcttccaaattcgatttgtcagaagttgtctcgaattgcgcatcggaaacccccggccaaaggctctttacagtccaaccaatccgcggcagacggccaccgaccagaaatacgcgctgttgtttcacattacgccctttcagctgggcaacttgggcaagttcgacgtgtggacgctgtccttgcccataatggtcagaatcagcaaatggaaattgttcattttctccatttctggtcaccgttcacgggtcccaggactgcgatgctcaggcggtcatcctttggcaggtgagtcatccacccgggcattttgccaaattaaaacaatttgtttgaatttcagcgggcgttttcttccgttgtgagtgctctctttttttgtgcattttaccatttcatttcaaatgcttagaatcggaccaatgcatccgacgacgttttggtggtgtcatggaccgatttgaggtcacctgaatcgcatgggattaacattttgcacattattccctaatattttgttattatttctgatccaatcattgatgatcagaatatttgtttgatttaaataggtgatttgctcatatttacaagtgattgtctatcccccctttcttttaaatgcttttcccttttaaatccaaaattccatccttagccaagtgcttcgtcacaaattctctctgttcaccggcgcccaccgttcgtttttttgatcaatttgccacaattccctccccttaaagggcccctcaacgaaagtgacttggcctatttgggtgacaaattgggcatttacaaccaaacggacaacaaaccgatcactttccaacgcttcgcaaaagtatcagctcaaaaggggcgggcggatttgcttaatacgcaattaaagctgattatcattcgaatgtcccttcactttgccttccttagcaaaatttgtgggacgaagtgaacttctctttctgggaatggttctttctgatcatgcagctgatcaaacagaaattgctaaaattctgggacgaaggtcagaaaatgttaaaaaccaagaaaa

SEQ ID NO: 11953 - DNA, 3042 bp, Heterodera glycines
attttctcaaaaacaataattttaaactagagttaagcctttaccaacatggaagaaattcccagcaaaacggtgtacctttgaagaaggggtcccggcatgtcagaaaggcgttccgtgggaaaatttaaaaatttttggcccaattttgcaagaaattttatctcaaaaatgtcaatctaataatttttgagagcctgtgggatttgtaaatttttcaaataaatacagaattttttctcagaaatacaaaatgattttttatttgctagtaaaaattaaaaattctcaacttgttttacaaaaaaaatgacttgaaatttttttgagtttgaccagaacagtacgacatggggaccataataattcttaccaagaatcgataaacaattcaactaaaccgatagacacaaccgagggaaaattggattgttaaaagattttgttaaatgcccattttctcagattttgagcagaaatttaagaaaattctaagggaattttggggctcggaaaaatgggcttttgaatgaaaatacataaaaacaaaaagagcaaaacattttacttggtggggaaccgaacatatgtaagttgctaacatccccatctcggaaaacaaatgccggggaggcagggttgggcttaaccttattttaaactatagttttatttttttgaaaaaaactaaatactaaatttaacaaaaaaatattaccactcgaaagctaaatgaaatttggactacacttcatacagcacactgaccaattgaatgagcgtagtcaatggcatattgttccaatgtgtgcagctgatcagtgtcactgatcacttccagcacatatttgttgacattgatgctcccctttgacaccggcgcttttttggtcccaatttgcaccgaatgttgtaagcgatcagccaatttggtgccattctgatcaatgccatttttgtcatggacgacaccattgcattcaatgctgctgtgagcattgccattcaaaaatgcagccatttttttaaattgctgtaagcaaataaatattacctataactgtaacatgaacaataaagaataaaattgcaaaatagcaatccaaaaaagtatttcaatgatcacaaaaaaaaataattcaatactaaaacagagtcttaaggctgattgataataatacgatttaattgtttgtttttttttggaaaaaaatttgacgaaacataactactgcattcggttttagggctttttggaaaaactttttaaactttgaaaattttttacaaattgacaggctttagggaatctagagctatcgaccgataggagtggtgccaaaatttttgatgagatttactcctgtattaattcagcaagttcttatttgtgcgattccttaaaataatttcgcataccaatttttaatttttttttttttgtctaattaaataaaataatgggaacaataaatttttctatcgcttatacaatcacaataagatggaaaaaaataatttgcagttgctaaacacaacaacaattgggttcggtgttatcacgtaccatgccatgccattttttggttgggaatggttggggggggggggtcattagaatggggcgacaattaatttttatctcaaacaatgcatttcattaaagaaaaaaagaaaacaaaaaatagtaaaatgccttcattaattcataaaaaacgataaaaattttataaactgcctcgataaataattttgcttaaaatccggagaaatttgcgatcattaaacaaaatgtgcattttcaccgatcagtggacattaaaatgaccattttcaatgaattatcattcattcatcaacaaagtccccatgtttctatttacaaaaataaataaatagatcatttatttagtgataagtgagagtcattatcaaacaagtcactcatcagctcatcagcccttcactcgctcactgatttgtcagcgaaattgccctaattaatccagaagagggtgggagcaaaggaagggacggacaatcaaagcaacaaatgattatgatttgtgtaaatagaagggcattctttgagctaatgtgagtgctaagaccaaagttcttgggaagagatgagatgataatgggaattagcagagtagaaaagtggtactgggacaattgagtccggccattctaaagaactaggacccgattttaagttgcttaaacggaaaaataggcactaaacaagtgccaaaatcccggaaaaaccccctcaaataggtgagaaaatagcgacaaatttaggtcattttgaggttcggcgtttccgataggcatcgcctaagtttttttgagtttattatgaaaattgcgaaaatagatgctaaaacgccaaaataggtttttagctgacaaatccccttagattttttgttatatttttaggcgtttataaaaatgtgtggagaaaatgtttttttcatgcttttgacaaacactttcgagttctaaaaatcaggcgctaaaatgtgctttttttgcattaaatcgaatatttttgtaatccgaaactcgtgataacagcgataaacattaagaaaaattaattaatttgataaaaatctagggaaataattacattttcttatagttttttttaaatctataatttattattaaaatgtattaattaaaaaatattttttaattctaaacattttcttttctttggattaaaaatgaaacattttcaacaaaattgcacaatttagcacctcagtaaaaatgttttgtacatatttaaaaagaaaaacgttaaaagtgaaaatggccattgggcaatcatttcaccgcatttattcgcccgtcgtccgtccgtcacaccgtcatggtgatgaaatgataattgataaggattggttgggctttgcttgtgctgcttctcaaacaattaattaccaactaactcattacatgcacatcagattaattatttatacgccgccaaccaatcgcattttcatttccttgaatttctat

SEQ ID NO: 11954 - DNA, 1797 bp, Heterodera glycines
  unsure (1)..(1797): unsure at all n locations
cgacgaaatcatttggcagcacgacgaaaatntgggaaaactgtcgacgaaatttgcccattatggcgccagcggggggaagacggatcattagcaggggagggagtccgaaaatattctctgccgcccaattggagagaatagaatgtacataaatcgcagtcataaaacggggagacatatcaaaaatggtgctattagattttgtttcgtgccagagtacggtttaaatggcatgcatatgaatttcagcgggttttttccatttttaatacaatttaaaacattttatttgtttttaaattaaggtattagtaaggttgtaaattatatggacttaaaacattttcaaaaaatcttctattagaatggtccactctattaaagctaccctttgaccctgaagactgaaaattttgctcaattcaattttaggaattttttcttgagaatattactaaaaaaattcagtagaaaattggaaaatttatttgaaaaaaatccaaatgttctcgatttttacttgtttttttctgaaataatcaagaaacgcaagaatttttcaaaaataccaaatattggaaaagtttgcgaaaacaaaaagtaaagatagaaagagcacaaatttacagaaaattgatcgaacttgattcaattacattgggtctaatcatttccataacgcatttcaaaaagatttggcaatggaaagcccaacactttgaagtcccagtaaaacatccgcacaagaaattccatcaaaaatgggctttcataaatgcgcttcttcacaaatttgtacgcggccgatcccgaagtgtgatggccaagcttcaaacccgcttgggctcggacgaattcaatcgtttcatggcttaggcttggaatattggccaaaaatgccacgaattggtctgtgaaattttgttcatcctcagtttttgccaaacttttatatttaattaacgtgaaattgattctctggaacgggcatagcctaaaaataaaaatgaatataaattatttttcgggattttcgagactttttgacctcaacagaaggaacacattcccatggacacggggagtacaaggggtacgtatcagggatggggctttcgctttcgcgcttttttcagtactttcgctttcgcgttttgcattttggcgcgaaacgcgaattacacgcctaagaatgagggatgaaattcccctaaaattttcaaaatttgacctatatcccggccccgccagcacccttcccaaatataactttgtaagtttcctcgaaaaatatatgataattcgctaattatctgaaaatcaatagatttttgcatatgattttcagaaagaaaattcgttaatttattaatttaaacgttaaattaaattaatttctgctattattattatttcatttctgtttaaaaaattttttgccctttaaattacaatgtgacacaaaattataggttcaccttttgtctattagaacattctaaatactcaaatcggcgttgaacgtgtaattccaagtcagagagcccgaaaatattcaccaaaacataccaattttgtgggaaaaaatgtgagtcctccgctgtgagcacaaatgaaaggttggacaaagaatgatctaacattttttcatattccgtcatgacaaaacatgtcaaatttggcccacagccattgcaatattgtcgtccaccagtgtgttcagaattatacaatggttttctgcaagaacataaaaattgaactcgaatacgaaaaaatattattgaaaaaaat

SEQ ID NO: 11955 - DNA, 1314 bp, Heterodera glycines
acgtcatttcaatatatgtcatttcaatactaagtcgtttcgattctcagttaaaatgcgtccattttcgatatttttattggatttgacatacctattaacatttcttttatgttttctcatttcattccctttttaacttttgaatttcttcatttattgctatgtctgatataagacccaaacttcggaaaatccaagaaacccattcaacatcgaagcgcattcggcaaacgagctcttcacctgatgacagcggcttacaacctgcgattcagttggagctaaacgatgatctggatgttgcttcgacacatagcggcagaagtgtgagcccggacgaaaacgaaggacaaatggtcgtgttccagagaggagcaacaaccagaaacggattagcgttgtggtacaaaggtcgtcaaaaattgatgatttctttaatgaaaaggattaaggtttccgttacgtgcaaagcaataataacaaatttttccggtgtgataaatatgacaacaaagttggcgggtttttctgcgaatgtggaacaacgacgttcttttttcggttaacataaagcagtcacgaaaggacgttataattgagcgacaaacgaatcgaaacgacttagtattgaaatgacatatttgaaacgacttagtattgaaatgacatatattgaaacgacttagtattgaaatgacatatattgaaacgaattagtattgaaatgacacattttcactgagtattgaaatgacatatattgaaacggggaccagagcgtttgggcccccgtttttgggttaggtgaaatttcaaaatttacgcgaaaatcgctgaatttttgtgctcactttgtaagtgagttcgcatttgtccgtaacgttcagctgagcggcgtgggtttggtcagcccgcagccatggattgctgcaaaaagcaaagttacgacaattgagaaaaatcaaagatttactggttttttggcattttattcctaccaagattcttatatgaactgtctggttttgttgttgcataataagacaaaaaaaggtgggaaactaaccatttttaacgaggtcttgggaatgtgtaagcatttccaatttttgatattttgtatttcagagggattaaaaggatttgtaaacgccaaatccaactttggtgggaaatcttgcgaaatatttgaagtgaatgaacacattttgttccagtgttttctgtgtcaggctgttccccgattttttatgggttaatttttcatttccccagctccgatcaaattttggaggtcattgatgtgagtga

SEQ ID NO: 11956 - DNA, 2613 bp, Heterodera glycines
tatatgggttacggggttcgaaacaacgcgggatacaggttaaaaatacgtaaaccccggtggccgttaaaaccgtgttagtccaacaaaaaaacgcgggttatgggatccgtaaaagccgtgcacaggcctttggcccatgtctgatctctactgggaatcatttgttttccgaatatttcctaatgacgtcatttcgcgagagcctatgaaaatggcagaaacctaaattgattggtaatagcgtaatttgggggtgccaaaatttaaaaataatttgtaatctctgagcaaatttggcggaagactaaaacgaaatgaatattattcaaatcaacagttatacaaccaaaacgacaaagcaacacaactttttaatagagaccggcgcaggacaggatcctgcgcaggattttgcaggatcccagtccgcaatcctgcatattttggaaaatacaggatttgcaggattaatcctgccggatcctgtcctgtaaaaaattttgaattccaatcctgcaacaggacccgcaaatttgaaatttccggtctctactttttaatatacctaatgatggccttgttatgtaattatgagtgaatttggcgaaaaaataaacaaaacgaaatttcgatcactttttcccgatcacattttgctcatcactctgattcttcaacttctcaaatgctgctcgtcaatgtttgctgcttttgatcaatgccgtcgtcattaaagggttcatatccgtcctcggcaccgtctccgttctcggcacattccccgtcggcattgtccatggcattctgtttccgctgcttgtcaaaaaaggcacagcgcgagggttggaagcaaaaggtggccaacaaagagacgaaaagcatctcgacacagagcacaaagcaaatgtaaactgaaaggaccacaaatgaatggtaattgtgccactttttccatggtgttctactcacattgtgccaccgccgaagagggcaatttggcgggatcatgcgatatgctcggcaccatgtcgagaatgccgaagatgtcggcgacgaacttttgcacggaccaaaagagttggcagaagtcgacgatacggaagagcagcaaaaaactgaaaaatttcgttttttgaaataaaattgttgaaaaatgtgacgtgccgatattcgtgcaacatcgaagcaccaagcggcacaattacgtaagagctgtaggagccaatgaacatggaaatcatgccagcaaaattggatatttggaagtacatgtgtttacgactgctcagttcctgagtgacagaatgccaaattaggaaacatttaaaaaatgtaattgtgaaatagttgatgttcaccataaacacggtgatgttcaaaatttcgagcataattcgtacaatcggcgattggaacacgagcacttcaaagcggtggaaattttgcctgaatttgcaaaaaaaaaaaaaaaattattttttcatttccgagggcttcttagatcagagaatgttgggagcacttttccgatcaatttcaaacattctctgaacgttccgatcactttcaaaatatttggtctattctctgatcagtaatccattccaatgtccatataaaacgcactctgtcggcagaaaatcctcgaagcggatcaaccaacaagcaaacggataaattctgatcgaaattcgctcgcctttggccatcagtttttcgcacatcgatttgcgagaaccgtgcagctgaaattggcaccaaattgaaaaccaattagcattaatgagttaaactgaccgtgttcataaaacagacgagcacaaaaatgcagatcatgtaatagacgagcgcaattgcgtacaggaaaagtgccgccctcggcagaaccatgccggtgaagccacaaacgacgatcacctgaagagaggggggaggggatagtaattagggtaattaaatagtcaattgcccaccggaggcattaacaccacccagtacagttcggaacgtattttctcgtcactgatcaaagtgctgacgaaaatcagatggagtaggcttaagcagatgacaatgccggtcattgcagcagcgccggtcatcatccaatgcgaaaggtcaacaatcgctgaaaatgggggaaaatttgaatttcaccgactctcattcgaattcgggacttttgaattagtcgaaatggacgacttttcattcgaattcgggtcagggctttattagtcgaaatggacgactttttgttcgaattttcaggtccgggcttttgaattagtcgaaatgagttggcattattcgagtgaccagcagggatagttgttccacacttttaaaaacaggaatcgagaaaaaatgatcaatttttctaactctttggatttcaccgactcttttttcgcgcgaccataaggaagttgtctacaacttataaaaaataggaatcttttcggttctagtgcagaatacgcgtcccatggacttttacgcgtcccatggacttttacgcgtcccatggttttttacgcgtcccattgaatttttacgcgtcccatcatctcttacgcgtcccattgaatttttacgcgtccccataat

SEQ ID NO: 11957 - DNA, 429 bp, Heterodera glycines
ccgcgatgcgcaatccgcgaccgcgggattttaaatccgcgatccgcggaatttgtgactccgcggcaattttggataaaatgaagcgattgttttatatataaaattatgaaaaaaagagatttatagaaaattcgataatttttcccaaaaaatcacttcgaaattccaatttttccacagtcagagcagaccaaaatctttaattttctttgaaattgattctaaataacaaataggtcattttttagacaaaacctttagcaagttgcactcaaattttcaaaatttttcctggcggcgcctataggcacctcctgaacccccttgttccccaaaggttttttagaaaaagggcgccgaaaaaagcggtttgaaaagcaaaaaaaaaatcatagggtttgcatgactggaacccctttgcaaatt

SEQ ID NO: 11958 - DNA, 2804 bp, Heterodera glycines
  unsure (1)..(2804): unsure at all n locations
ctcatcaacgactttgaactcgcgcatcaaatagtgcctcatgtaaaattncggtcacacagtccaccaacagcccattgtaattctcgggatagccggaacttggccaatactcaaagaatttctccttgggatcgttcggctgacggattaccattgcaatgattgctaaagcacacacattcattagccaaagtgatcaatttgttctttggacttacagcagtcgtgcacccaaagcattcgccagaaatcggctgctgtgttggccaatggcatttgtgtggcgatgtaagcattccgtgaactaaaagacaggaaaatgaaaatgaaagtttgaatttggtagctttctttgctcaccgatatccgtccagccaacttgcgtttacgtagtcggcaccgtccacacaatgcgaccgtggcagttccacccgattgaaatcccacggcaccacggcacggttcatgtttttgctcacattgaacgccgcattggccgcatttgcacggaaacatttgggcggtttcagcgacaacagagtcgaaaaaggacataaattaatttggtttttgcatttcggcacttacattgaattcgatgtcgatgcctgagtattcctgcatgtgctggggccgggacagcgtctgcacgtgttggtgcctggaaagttttccatgccaaataaatttttagaaatatttggtgaaaacatacaattttgagcttggtatctccgtagagccggactgtgccgcgtccaacaccgcgtcatggatgaaaatgtattggtcgtccgtctgcaccatgtacgagcgttgtgcccgaatggaacgcacacagccgtaaatgtccaccgtgttttcgtaccgtaaccgttccaacatacagtcgatgacaataaatgcacccgtacgaccaatgcccgcgctgaaagtgccaaaattagcaatgaaactattttgacgtcaaattatgtagattcatttaagaaataagggaaaatatggcaattctcgaaatgccaaagaaattcagaaacaaaatctatcatttgccattagggcactaaaattaatttaacttttaaatgcgtgtcaaaaacggcttttggcatttcgtcccctcccttcgcccgttcccttcggcattcacctgcaatgtgtgatgatgggaccggcgtcgatgggattcagagctttgacccgcttgaggaacatcagaaagggcgtcggatgagtgggcactccgtggtccggccaagccgtgaattgacagtgctgaatgtttcgcggggcgtcgtggtgccgtcgcgtgttctccagcctcatggttcgcaagcagtaatgggccaactcggtggtgtccacgagggtcacctttttggcaaacaattgtaaaagtaattggcgggcaatggcacatttaaaccagggaaaatgtccaatttagaaaacgctttttgttaatcagtaagctaattatcgggaacatgttcaaccactaatagtaatgcgaccatgtcagtcagatttattccaactttttgttcagtaattggccaattttgcctttttacccccttcccaattttactttgtaacttccgtaaatggaagtgcctttccctggccaatattggtcgcatttggtccggcaccgctcctccagccgcgtgagcataacaatgaccatcgaccgctcctcccaaaccatccgccaaaagtccgcaaatgtttccggcagtgggccttgggtggcgatgtacgcttttggccggtcgtaactatatgttttattaacatatttaattttaaattgtgagggtgtgccgtacccgtcaatgtaattggcattgatgtaatccgtgcccggcaattcctcctccgcgtcgtcctccggcggcaacacaacgcgcgaatggtcgtaggcgacaacgttggcataactaattgaaagtcggcatttttggtgattaatattcactgataaaatagtgcaccgattcttgtgtttgttcacttcggtggccgagttctcccaagtgaaatgttgccccgtgtcaatgctttcaaactccttaaatccaaaaccgctttattggccttgcttttcccttgctacttggataaagccctggttgctgttcaacttctgtcggtcgatatgtgtggcaaattcggccaatggaattggtgccattagtgtggccaaatgcgctgacattcgttccgtgccgcccgtcgtcgcatggtgctgcacgagctgcccattcagaccgtacagattggcattactcatggcgagcagcggccccccggagggtgccagcagtgccgggtgctgctgctggtcgtgcgcgtaaagaacaccaccagagtcgagcagttcgggcgaccgctaattggccaaatttgtctgttactccgcgaaagcaatgtgttttcccacctcatacgacgagttcatcaccggtctgccttcgttgtccatgcccagcaacaatttgctcgtttcgtttggcagtgttccgttagttgcgcttccgttgcccgtcgcatttgtcgtttttgatggaaaatcgcgtgccgccagcccaccgactttgttgcggacggaatttgacgatgatttggtatgtttgcagcgcaaccaccacagaaaaagcatgccgatgaggacggcaaacagaaacagaataatgccaaactgaaattaagaataaaagtcatttttaattttaattttaaaaataatagaattattacggccaaaagagtgaacattatgccgcctcgttgca

SEQ ID NO: 11959 - DNA, 2786 bp, Heterodera glycines
  unsure (1)..(2786): unsure at all n locations
tcatattccttttcaatttccaatgagaaataaacaatctaatttcgcgaatttacaagtccgtccccgagagtgaaggtcagttcatcgcggtaaagccgttgcatttcgttggacggaatttgagcggcgatgtaaacgccgtccaccggcacgtgccttcggccacgcgtgtcaccggcgggccgataatcggatgacggcactctgaatgaatgcttttttgataataatgctttaaagaaatcgctttccaatggataatgaaatcactttgtgttgtgatgaattcgatggtgcctatgctgattgtctgctgatattgttccaagttgtgctgaccttcgtcttcgtttgtgatgattttgcaccatcgtttcattgttttgcttgttttccccatattttctgttccctttttcttcctccgccttttcactgtcgcttttggcacttcgtaccgtaatctgctggaggaaggccattttaatatttttgaaattgcgcgtcgcaaattgaagttgtgcgcggtcggcatgtgttacgtcctccttggaaaagttgcctggcacaacgatcagccaatagtgactgatcggaccgtattcctcgctaaaggatttactttttgatgaatcttgtcttggggttggcacctggcacagctcagcctgaattgtgccgtgtttggcccgtccgattggagaaattcgggtggctccacaaagggtgggccacgagggtccgtttggacggacaattcgcgcggccaatacaatcggccgtcgccaggcgaaaaaacgcccacttggaaagtgtaattcatatggggacgaaggttggacagactgaaccgaaatgatcagcagaatattaattaccaaatgaattttcactgacaaaagttccctctccgtgccattgacccttttttcgtattgaggcgacaccatggatttctcgatcaattcctggtccaaatagctcttctggcccatctgtttgatgaagaagccgattggcattggtccgtcgtaatcccagcggattttcacggattgactcgttttataatccaatcgaagattttggacaataaaagttggcgtcagtgggccctgaatggtcaccggggggtcggagcaggggccaagacgctaaaagggagggacaattaataaaattagaaaaaatggccaaagatactcgatgtttcatggccaacacgcaaaaagcgtatgatttatgtgaaagcaatctgaaaaagaaggaatttggttgaaaaaaggtaatgataaaaaccaaacacttttgttaaatcacggagatagaaattttgatcatagttattagcaaggaatggattattatgctttaaatcgagccctcctcctcacttcgaaagggtctcccattttggcatatttgcgggggaggggggagtcgacctttcatagaattcgatcaagtcagtaagcgaagttgccaacttttttaaacaatttgtcatcagttttgtatcactttgtgaactcaaaatttgacttaaaactatcaaaaacgtaatatatctgtcaacaaatttaaatctatttcctagttattagcaatttgctggccaatttatattaatgatcaacttatcggtgattaaatcagataattcgttaaattacaaaattttctccttgaaattgcccatttcacatggggtgggtccgattttgactatcgacccccttgaacataagtttcatctttttgttagttggagtgtctgctgctgtttgtatttgatcaactaactatcccggtcatttcccgatcactaattagctagctaattagcttatcccccacctgtgaacttccaaatgccgcgccttcgggtccatcaccggctgagtccgccacttgtccatttggtgttcccgaactgcacttggctcctgcatgtacttcaccatgaatccgtccggtgctccaccaacatcgctgtcggagtcgtcgaagtcccattggaccacaacggaactgttagaaatggtctgcactcggatattcctgggcggtccaatcgcagctgaaattgactcattaattaattatggaccaaaaaaattaattaatttaataattaatataaatttgtttattaaaatggaagttcactcaaataacaggacaaatagtttgagtaaaaatctctgctgctggcgatggccaatcatcgccaaaatcgccaaatgtcccaccattcccccccccccccttttttttgcgttttcattacaattttgattcttttctttggcattgtccatttccatttttagcagcgattcaatcactgcggtcagcacacttttctgctgcgaattgcttccgttgcttctgccatttaaattgttcccaaacaatccgaccattttaaatggtcgcaaattagagaatgggaacaatgttttaggaggaaatggcacctaattagtggttaattagatactaataaagcgcaaattgtaaaacaattcattaaaaaaatttaatttttgctatttttaacaaaaaaggacaaatatcaaaaaacaaattcagaatatcattgtattgagtttttttttggctgaaaatgccaatggttagctgaattgccacagtctttaaaggtgctaagtgttgggccactcaaaagaattcggacggattcccaaaccatcagcagaagaaacagcaaattggcttagtgcggtgtaagaaaagtgnggaggaaattgagaagaaag

SEQ ID NO: 11960 - DNA, 1055 bp, Heterodera glycines
  unsure (1)..(1055): unsure at all n locations
gcatgcctngnncaggtcaccattcattttgtcccataattacgtggtgtcgagacaattgagaatggctaatgataattatgatgaagatgaggtccacgtctgcgccactcgttgtttgatgagcatccaattcaagaacacttggaacaccacacaacaacaaaaaacaaacagtttccggttgtttcaggagatcagcaaaaaggacaaacagcgaaagggcagcagaacggatgccccgaccttgcgcagcgcaccacgccaccaccaccaccaccactctcgacgggcaaccggacggaccaccgactggtgagcggatattgcgtgtcgagaatttgatgttgtgtttggccaattaacggcgtgttgacgatgatatcttaattgatggaatttatatgtctaatagaaatgacattttagccaacagaaacccaacaaccatgtggctcagttggtttgcgggttgcaaacaaagaaaaaataaaattaaaaaatgcaaatttttaaaattttaattaataaaaaatgcattgtcaatcaatccagcaaatcattaatgaatgaaagcttttcatttatttggttgtacaaatgatcaccgtccgggaaaagcaacaggatgtccagcaattaaacaatgctttttctttttatttcttttcatttcgtttcttttcttctccccgagtcgggcccacatttttatgcttctcaattttttttctctcccaattttattccacaacaataaaacattcattgtttgtttgtacacaaaattttctgctctggctcaagactctcgagcgaagagaccaatctcgcgcgggctcaattagttgacggcgagtcgtttccgagtccagcgcacagctgctgctgcactactgcgcgagattttgtacaccatccggcttccaccatcagctggtgngggggggggggaaagccttngagaatcttgattttggataattttaaattttggtgtagaaaactattttggcaatgttttcacattttccacaagaatttttgtaattctc

SEQ ID NO: 11961 - DNA, 2819 bp, Heterodera glycines
aatgtagtaaacagggaacggatttatatgtttttacatattttttttgcgcatatgctatcgcatgaaaagctcaaaaatagcatttttacctgttttcctttcaatcagagcgagtttttagcacatataaaaacatattttgggcttttggcgaataaaaacatattttggggtttcggtagtttttggcacatattttggcgattttgggatttttagaggcttttgtgtaaaattttatgaaggcgcgacaaaatgaaagtgccaaatgtaaaaagaaaatagaacaattctcaatgaaaaatgaaatttaaatgggaagcgatcagcagaagagcccggattttgtgaaaaatcaaaaaattgtgaaaatgccaacgaatttttcttcctaaaaattcttcccattttttgctcaaattcttgccgaagaccttcaaattcgttttaaaattttaaaattttcatcaattcgacctgattatccaaaactatctcccaatagaaatcaaccaattcattttcactttctttccaaaaacttttccaataatcattcaatattatgagaacatcaaataaaatgagaggatatcgcccatactgaagaaatattggcttcaccaatggtgccaattgtttcggcactttcggaattttagcataataaattattataattatttttgacaaataaaaattcaaaaataagataaaactcaaacaaacctttaatataaagtcggaataaatattcatataaaatttccaaatatttgcgatatttttggcatttttctcatccaaattcagttaattgatgcgcaattttgtcacattgtcaattctcttcatcaaaaacaaaaagctaagacgggcttcatatttttgcgtcaaatattcgttcattttctcaatatttgagtattctttcggcatcttaaaaaattcgccgaatttgtcgttaatcctttaacaaattccgtaaatagagcatcatcagtccaaaatttaaatttatttaattttcattgaatttaattctcacccatgtctttttatcatcgaattttgaattgataattaattatccaatgtttgtcatcattttatttcattggcttcccgtggatagtcttttttcgccctttcttccgcttttttaaacttttcctccaaattttgttcaagtttttgttggattattccttcagcactttcatttgttttataattattcgctgcttcaattgccaattgaaaaatcatttcattaattgacacttttggttcattttccaattttatttcataatttaagctcttctcattcaacaatttttgttcgaaataataaatgaaaagtttctttaatttgtattcaatatgtttactataatttggtttaaaataaaattgcgaaattttgacgagacaatgcaccgcatgaattattggtccttcaatttcaattcgttctttaaatacaaattttggcttaactgttggaattcctacgtattctctgagcaaatattcatataaaatgtccaaatatttacgatatttttggcattctgtccgcttatattctttaaatccatctgctattttgtcacattgccaagtacttcgcatataatacattatgccaaggtatgcctcatatttttgcattgaatattcactgatttggatttctttatctctcctttgagaaatgcaattagcattttgtcgtctccgtaattaaaatgattagacaaactaattactctaatttattaactcactgctggcatagcatttgaaatatgaattaaaaaataattaataaataataagaaaaggtattacaaaaaaagaaaagaacattatgttttcccttaaaaaataaaaattaaaacgatttaatttttagtttcaacttatttagataaaaaattatttaaaaatattttttattcgatatagttagtttttaataaaaaggggattgcttaatgaataacgtaattatgaaaatgaaaaatggaaagtaacacagccttataaacggagcaaaaaattgttttgaaattatgatcatcagtaggattacccaaatctattttttacttaaataatttgttattattatagcatacaattacaccggattacagtagtgacgtcacccaagccaaaaggtattggcttggtcccaaacctattgcaagggtgcaggccagggatgtgccgagccagacaaaatccgattccgattaaatcgccgattccgattatggccaaaaatccgatacgggtttaaaaccgattacgattatggcccaaaatccgattaattgcgattccgattttttttaataattttttcccaaaaattttatttataatcaaaatcataaattttaagattgtgatgcaaaaataaaagtttgtccacattctcaggcaataaacgttttctcagatctgtcacaatcaacccagcggtggagaaaagccgttcgctttcagtcgatgtagctggggctgagaaatattttttgatagcttagtcaaaagaggccatttcaattcgtttgcgccagaccaataagaaattggatcttcattgatatttatttttctggctcggagatattcattgacttcaacctgtataaaaaatagtttgttatttaatttctggtttatttagttcgcctctgatttttgtcgggcgttcaaaacggcgggacttggaattggcgaggccaacaaaaaattatccaaattcatttcttgttcaaattcagtgaacaattgtttga

SEQ ID NO: 11962 - DNA, 1422 bp, Heterodera glycines
cgagtctgtatcgtttcggcgccgccgtttcggcgccgccggttcggcgccgccgtttcggcgcgagggtcgtttcggcgccaagccaaaattaaaaaatcatggatcagttggaaattttgagcgatttaaattttcaaaaattaaaaattttagcaaaaatgtagaataacaataaactaacaaaagaaaatttaacaaaaattcatttgtttaccgtacttactcgtttagaaccccacccctctaaattagaagcccccccccaaaaaatatttgtttgccaaaacgagtttaaatttcctgcctatttgacacttaaatgtggaccaattatgttacaaaaaaggtctaaaataaagaaaaatctggagaattttatactttttatttgaattccctattttcaataaaaatgattttgaaattcaggaccaaagggggaggacatgatttttgagtgcgaaaaattttcaccaaaatcttccaaaatttttttaagaagttatttaagccgctgatcagtgatcacgaaaatataatcagaaggatcttaagattcgttaagacctaagaattcatccgtatcagttgattctgaagggatggcgctggtcaggttcggatcctttcgatataattttttgtgcattttgggtcttgtaaactttattgtgaatttttaaccattttcgtctgcttcaaaagttgcagggccttaaaaatcagaaattttttttggcgccgaaacgaccctggcgccgaaacggcggcgccgaaacgaccctggcgccgaaacggcggcgccgaaacgaccctggcgccgaaacggcgtcgccgaaacggcggcgccgaatcggcggcgccgaaacgacccgttccccaaataaacataagcataaatcggcataataacaaattattgtagcgattgttttttttgaatattcaaattttaaagaaaaattataattattcgtttaagaatccagttttccccgtcggagctgacaaaaaaatttattgccgacggcgcctctcggcactagaaaataaaaaatcatagggtttgaatgctggaactccgaactccttcaaaaagttggacacttgcccaccccctcccttgcgcgaaaccgcgggatttttctgtccgcgcccagccaattcagatgcctataaatttattgcttagatatgttttaaacaagtttgcaaggattttcgggggtcgctgatcacaaatccggcatccatgtcgaccgactcagaatcccggaccctaattcgaacgaaaagtcgaaaactaaaattttcgaattttacatttttagtctaaaatcagggttcgcagatgaaaattttcaaaagcctcatttggcaagcaaaaaagcctcattttgtgtcaaaaagcctcatttt

SEQ ID NO: 11963 - DNA, 2354 bp, Heterodera glycines
aaaaaatgataaaatatgttatcaatttaaaaaaaactatgaggaatcatattgtctttataggaacggctcgagtatacaaaaaaaaaattgaaaataatctagtttctgtagagggattgaatcaggggaaagaagtaaggaaagtcaaggagactagccactaggccatttgcacacttaggagttttacttttaaagaatatattaattattattttttatttttccctttgactccaattttcttcaataatttttcactcagaccccccattcttaccagtgcttgtttttcacggttcccggttgccctaccgggaccgggaccgggacctgagcttttcaaaacccgggaccgggaaccgggaccgggacctcggatgaccgggaattcccggcccggtcccggtcccggtcccgtggcactctacttaatattcatcattatgtgtaaaaaaaacaaaaaaaaattttgaccaaaaaaaaggtgaaaaaaatttcaaaagtttcctctttgcaactagcgcctaaaattcttatgtcgctgtgcccaagcagattctgttagttttagtgccaccgttttcggaccaaattttcgagtttcgcacttttggctcaaaagcgatttaaacacaaggaaacgcctgaaagctaccaattttgcaataaaagataatttaggtaaaccgtttttagacggaatgaaagcttttgtttgtatttcttggttgcttaaataatacatacattaaaggattttttacaaatatgcttttttcccacaagaaaaaataatgaaatgatccaaaacagcgggggaaaattgtgtgtgaaggaggggacggtgaacagaaggaacatcattagtactgtaattagcgcaagattaaattcattatgaataacttcttctcaaacggattcacacccctaaaaatcgaatttttgaattcaccccccggggccgaagcaaagggttggtacgcccttgagagagaatcgaaaaaagaaaaattgctgaacatctttcaatttggacactttgcttatacataattttgacactccaacaacttcaagggctcaaaagacattcaaacaaaagcaaagttttttaatcattaaaaaaatattcggaataaattttccgtaggaatttaattaaagttaacaatttttcatatcaaatttcacaaatttgttaattgcctgacggcgcctttggtcccccggaccaacctccatccatttatcaactttttttaaaaatttacgcaaaaaagtgacatacatatgatcatttttggacaaaatctgataagaaacgaccaaacattttcaaaaatttatcgaatagcaatttgaaaaaatgatgcgcattatgaaaaattgtccttttatattagagttgtgagcaatctcctaaaacaaaatttcatcaccatttcctggctataaaagagccaattttctgtttttttttattattctcacatatcttatttggcgacactattgcctattctttactatggtggctttcaccattattcctcatctgctgctcttcactgtcttcatgtccatcatcctggtgatcctctctcaatgttgcggctgtacgccttcaaagaagaagcaaactgcgacgtcaacgaagaagaagaccacgacgactacatccgaagcgatgaaaggaaagaaggaagagaagccggccaaaacatccgagacggacaaggcagcgcagaagaagccaactgtgacgtcaacaaaggcatcggaggaagaggcagaagaagaccacgacgactacatccgatccgacgaaaggaaagaaggaagagaagccggccaaaacatccgagacggacaaggcagcgcagaagaagaccacgacgactacatccgatccgacgaaaggaaagaaggaagagaagccggccaaaacatccgagacggacaaggcagcgcagaagaagccaactgtgacgtcaacaaaggcgtcggaggaagaggcgcagaagaagaccacgacgactacatccgatccgacgaaaggaaagaaggaagagaagccggccaaaacatccgagacggacaaggcagcgcagaagaagaccacgacgactacatccgatccgacgaaaggaaagaaggaagagaagccggccaaaacatccgagacggacaaggcagcgcagaagaagccaactgtgacgtcaacaaaggcatcggaggaagaggcgcagaagaagaccacgacgactacatccgatccgacgaaaggaaagaaggaagagaagccggccaaaacatccgatacggacaaggcagcgcagaagaag

SEQ ID NO: 11964 - DNA, 2687 bp, Heterodera glycines
ctaaaatgagagattttttctctgcactctacaaaattgtattttggatttctttcaccctcgtctataaaaacaccaaactttgcagaaggagagcactttcttttttttccgaaattgggtacttttccgtattagggcctaagactccctcatccatgcccaactcatccatacccaactcatccatgcccaactcatccatacccaactcatccatatacccaactcatccatacccaactcatccatatacccaactcatccatacccaactcatccatatacccaactcatccatacccaactcatccaaacccaactcatccatatacccaactcatccatacccaactcatccatatacccaactcatccatacccaactcatccatatacccaactcatccatgcccaactcatccatacccaactcatccatatacccaactcatccatacccaactcatccatacccaactcatccatatacccaactcatccatacccaactcatccatatacccaactcatccatgcccaactcatccatacccaactcatccatatacccaactcatccatacccaactcatccatatacccaactcatccatacccaactcatccatatacccaactcatccatgcccaactcatccatacccaactcatccatatacccaactcatccatacccaactcatccatatacccaactcatccatacccaactcgtccaaacccaactcatccacacccaactcatccatacccaactcatccatacacaacatccaaacccaactcatccatgctgattgtactattgccatcattgatttgtgtttgcccaaaaccagtaaattgtttacgttttatttttagcaatggaaaacgatgcattaatggaagaagatggtgagcagaatcaagaggatgagatgacattggaagactgttggaacatttgttggctcgattcagaacgatgcattgcgcataaaccaccgaagcggaagtaaataacactcaatcagtgttttcatttacttcctttggttaagagcacaaaactgcaaaaagaatccttattgcatccatcggcttggtttggagaagtttgacaaattattgaagactcaacaaacgtccaaagtgctggtacgccgtgaagagtcaaagcaaccgtgtgggttaaataacgccggcaacttttgctatgtgaatagctttctccaggtgtttcttgaaattgattaccttttaaatcatttcctaattttagatttggtttaacgatctcaaatttcgtcaatgcgtttacaactggcgttcctccacgaattggattatgccgcagaatgccaaattgaacattcagacggttatgaactgtctccagcaattattcctcacaatgcaattcactccatttgtaagtatttattctgcagcttgttcacactgcaaatttaaaggaagttaccgacgccaatgactttatcaagttgcttcggttggacaatcaacagcaggacgttcaggaattccatacactctttttcggaacgattgaacgcactctcgaggcgcatccgaacggccgaccagtccttgatgtcatccgccaactttttcaggttttaggaatttcctttctaatctgattatgcgtactcaatatgactgtcttattttagagtcgcatcagtcaaacaatttcctgtgcaaactgcttgcggaccagtgaaacggtcggtgaataccgttctctacagattggcattgatggccatagcactctcatctcggctatccaagctttttttgcgccagaaccgttagttttcacatttgacaactgaaaaagtaaatcgtattttgatgtctaaatataattttagactgagagactttcggtgtgaccagtgccgggagactaattgtgtgactcggtccagcagattcactcagcttcccgaattgctcattgttcagcttaaccgttatgttctagcaaggtccattgttatgcttgttttttaaacctgtctaaatttagcaatggaaaccttcgcaaattacaaaacgccgtgcattacccacgccttttgaccgaacttggaggcgagggaatcccggactatgagctgtgtgctgtgatgattcatgaagggaagagcactaattcaggacattactacgacgtcattcgtgacccggtcatcgaccgttggtttacctacaatgacgaagtacggattgtgtggtcttattatcccattttacgattgtgccccatacagacggtgaatcaaaagcgcacagctcccggctatttgggcagactgactcagaaaccacgcgcgagtgctgacacgacggggtgttatgcgctgatctaccgaagggtgggcagtggcttgagggggccggtgcaattgccgccagagaatattgtgacggaagcaaagaaaagggtcggttgatagtgagatcatttgtgggttttaagaaatgttcatttagatggaggcggaattcgcacaacaagacaaggaggacgacttggcatttaaaaagtggaaaaagcatatcaacgaaaggaatcatttgttgcagcaactctggaaggagcttgaggtctccccacctgtccatttgtatcgaattgaccactcact

SEQ ID NO: 11965 - DNA, 2752 bp, Heterodera glycines
atgctaagagaggaaattcatgaactccctccgttttcatgtaacatgtaacatgtaacatattttgaagcgtgcgcgaagcaccgaggccacgaagtgttctaatgagcccgataaatttagaaatgggcgcgaagcgcccatcttagggcgtaaagctgcctacaaccccttaataacttttcaaaaatcattgcatttcattatgttaatacatgttacatgttagatgctaagagaggaaattcatgaactccctccgttttcatgtaacatgtaacatgtaacatattttgaagcgtgcgcgaagcaccgaggccacgaagtgttctaatgagcccgataaatttagaaatgggcgcgaagcgcccatcttagggcgtaaacctgcctacaaccccttaataatatttcaaaaattcattgctttcattagttaatacatgttacatgttacatgctcagagaggaaattcatgaactccctccgttttcatgtaacatgtaacatgtaacatattctaatttgctacataatacatgtcaacagaaattgcctatgaatagattttaatttcatttttcttaattaaagtcaaaattaattatttgttacatgttacatgtaaacataacttccttgggtccaccactataaatatactggaaactttcattttttgttcattcaatcctacaattgttacatgttacatgtcacatgtaaattataatccatataatattttttcctttgttcattcaagtctaatttgtttacatattagatgtcaacagaaattccctatgaatagattttaatttcatttttgttcattaaagtcaaaattaattatttgttacatgttacatgtaaacataacttccttgggtccaccactataaatatactggaaactttcattttttgttcattcaatcctacaattgttacatgttacatgtcacatgtaaattaaaatccatataatattttttccaattttgttcattcaagtctaatttgctacataatacatgtcaacagaaattgcctatgaatagattttaatttcatttttgttcattaaagtcaaaattaattatttgttacatgttacatgtaaacataacttccttgggtccaccactataaatatactggaaactttcattttttgttcattcaattcttcaattgttacatgttacctaaatgtaacatataaacacaaattccctatgaatagactttaatttaattttcacgttttcaatttttaaagattgcttttattatatggaatccgtttcatcttctttaaagtcaaccgagggccagacccagcagtaagcacgccggcgtcttccatcggaagtaaaaaaagaggcaggccctcgaaagccggagcgaagccaatcttggctacgcaagaaagtgtgtctttcattgacacacctcgaattgccgtcactcaaagtgaccagggttcgccgtgcaagaaaaaagggaaggttgacgaccaccaacccatgtttgctaatgaagcaattgcttctacgcccattaccacacaaaaataccgtggagggcgacctgccaaaaaaattggaggcccaggccgaggcagactcagtgattccatgagcaaaagctcaaaaatggatatcaatcttgaaaatgccccaattccggcaacctcgcacattgtgtctgaaaaaattgacttcagcactgtgccaattaatttcgccacatcgcgaaattttgcctgtaaaatttggagatgggcagcaattggcctttatgagcgtgatggcgaaacagcacttggcccacgctctggcccaagattcattgagacctgttggaacagaccaaatgaatggctaaatgacagctttattgttgcctatttagcttacattgcaagcatttcacaacgaaaaacagtagttgtggattctttggcatcgagaactgatgtttctcgattttccaacgtgaagaattacactttcggctatgatccgaatgctgttcctgaagttgtgcttatgccgcttcacttcccaaatcattggactctcatcgtctacgatgttgcacatggtgcatacttccttgactcgctgcatatgagcagcttgagtgatgagagaatggcactcatccagtcaataattgctgagatagtgcccgggaatgcgtcattcgctgttgaatacgtgcagcaattgacaaagcaaaatgatggtaacagctgcgggtacttcgtgtgcctgtatgctgaatcctggctgatgaacaaccgtacatttgttctgccggatttgaacatcaattatgagaagaagcgcattttatggcacataaatgagctttatggctcagatattgtgccgtttcatccaagggaaggtgtttcaacatctttcgctgttgtgtctcatcacaatggggatgtagcgcaaacttcctccaaggtcataatgccaatggaagtggatgattcaccagtgcttccttcctcggaagatactgctgttcttgcgcaagcaccagtgatcggcgaaaatcaagctgacacacccacggtgttgttgcggacacaattgtccagcaagaaccaatcgcgcaggctgatgatgtaattttcatcagacctaagacgccaccaaggcgatccatgcgcgtcaaaaaggctttcagctcctgttagccgttcgcctcaccggcgccgaacgcccc

SEQ ID NO: 11966 - DNA, 3992 bp, Heterodera glycines
  unsure (1)..(3992): unsure at all n locations
aatttaagttttatgcatttcattaaaaaatgttgtacctatgccaaaacccttccttttaaatttcattagccttcttattttattaaaaaaaataggcaaaaaacttaattcccttctaatgattgtgcattttagctaaatatgaaaaacattacccttttgccacaccaatagcgcgatggtcacgtacagtatgaatgtgatgatgcagacgagcatgttgtagttgtagatcaggttgaccggtgtgcacgtgtcgctgagttgacccgtgacaggcctaattaattgtaataaaatcaattaattaaatttcgaaataaattaattactctgtcggattttcaattgcatatagcaacacacgcacagccaaataaatgcccgggacacagctgagcaccgtgtgaatggcaaagtaggcggggccctcaattttattacggctaaatttgtttaatttgtattttaattgaaagttaatttaatttatagaaataaaaaaagagagggacggagagataaagtgagaaaatagagaagggctagagactatggcaaaataagagcagagatccgagaacagactgactgttagagaacaacgtgatattgttcggttaagccccgcctctgtttgggagagtaacaaattggtataaaaaaggaaaggtcgaatagtaaaaattgaaatttattattaatagcttacacaaaatttgagagaaattctctctgataaagagagattttaaagttttaattttgccaacatatcgcttacaaatcaggcaccagcacggacaacagtcggtccaccgccgtgccaatcatcgtgaaaattgcggcattgtagccgaagattgattgaagctgaaagacagcactggtaaaataggggatgaaattgcgcccgctgaatatggtgaacaggaaaatgtaatggccgctctggtgcaggaactcgaaaaaggagttcagtgccaacaaaaggtggctgcacccgtgcagcgatctgtcaaagcgaaaaaagtgtgaaaatttgattttgacacatttttggtaaattaacaaaaaatttcactaattttggggtaggttttgagttttgtacttcaaatttataaatatttgtaggctggtagtccttattagagtccgaaaatttcaaattttctgatccctctccgggattaaaacttaattttgcgggatgatatcccaagggattgatcccacaaaatcccgtcctgttccaggcttcagactttgtgctaacgtactttcatgcaaaattatagccattctacctacaagaatgaacaatttaaaaatgaactttcttgaaacctctttacccgtaattagagggattaaattttaatgtaaaaatcaaaaaatttaagcgcttttgataattcgattcgcattttactaattgtaagaatctttgtaaaaaatttcaagtaatcttaattgctgggaagagttacaaaagttttgaattcttcttacaaaaaaaaaaccaatcaaactttttgtggaaagtgaaaattaaaaaaaatgagaaaatttaataaatttgaattatacattcaaattggctaacagagaaccaactcacttatgttttatggtcaaatagaccagaaacaggctcatgcagttgccggacacagcacaaagcgcaattagcagtgccattgtgacgagtccgccactgagtccggcatttttgtatgtgtagtaaaactgaatttaattttaatgcttgaaaaattttcaatcattttttaccaaattgccaagaatggaagaatttggagaaagttggtccaaatccattgctctttttaaatgtgtgaattatatgggtgatataatgagtttaaaagttgctttgaaagttgcgtgccaattgtaatatctataaaagggttggttgactatttgtgtcaatgtttagttgaattgcccattaattgattttaaatggaaagaccaattaaatttagacaaactttatgacaaacttagcatgcctattatttgaaaatttgaattttacttctagtgttgcgtgcaaaaaaaggtgataaaaaattgagcggatttttaatgagatatgaaagtgagattttgtcatccaattaagggggattaagtttttaaattatgcagcgaaatgaaaatttaatgagataggcaaaaacgtaaattcactcgatgccgaattgcaaatcatcgaagtgcatcaaaacttctaattcctagaattgttacaccaactttattaaattggcaaaatatttgcaattgaatttcaattaattttttttaaataaaatattcctcactttttacataaaccataaaacaaaagataacaaatctctttcttaatttctcaattttgtaaaattgataatttaaaaaacaaaaacaaagatagcatctaattaccattattattttttgaatttcaattttttgcctcattttggcacgacaatgccgtgctaggcccttccttccttattttcacacgccaaatgacatgcaatgccaacaaccaaaaaaacagtttggcgcactgccgatcaacacaacaaagaggcaattagcggctaattgacaatgtttggggaattcatttggaatggatggagaaggcttagcattataattatttcccgccttataaagccaatttcatattctgaacaggtgaaaaggttgatgaagttgaagtgcctaaattgcccaaatgtgcccaatgtgtcaaaaaactatccgaattaatggcaaattaattttattactttatatgcgcaacaaaagaccatctgccaaatgccaaaactaatttaggttgacttttgtggccaacctttgagccaattgctttttgtgctctgtaaataccataggttacttcacgtgccaaaaaagttacttaacgtgccaaaaattgagaatttaatgtataaaaatagtaacaattttttcggcatcaaaaaccattagaacatttaggcttacgcgttattagtagggatgggatttttatgtgctaaaaatcctgaaatatgtaataaaatatgtgctaaaaaatgctgaaatatgtgctaaaaaccccaaaaatgccaaaatatgtgctaaaatatgtgttaaaaattggaaaaatcaagtgtttttttgcataaaaattcccaaaaatctcattctttatcatttttcgcccatacaacgcaaatcaaatacatttcaaagtgtttggggtaaaattgatctttttttgattaatcatttttataaattgaaagttccagcagagaactttgaaatccaataacgaattaatgaattcgattttgttactttctacattcgaaaaaaattttaaaaatttgaaaattctataagaattgtgaaaaaagttgatttttaggggtgtatttttcaattttcttgtatttttattgcaaatttttctcaaaaatgcctaaatatgtgccaaaaccccgaaatatgtgccatatgtttttatgtgccaaaatgccaaaatatgtgtttttatgtttttataagtcgctctaaatcgaaaattgtacggagaaaatgttatttttgggcttctctcgccataactaagccgcagaaaaaatatgtaaaaacataaaaatcccatccctagttattagggatattatttgtaaattttggagtttatctctcaacaattcggacaaagatttcttccccggtaaattattaatgccaatttggtgaatgtaataattatgtgaaaaattgaattactaattgatttaaatattgaattactaattgatttcaaggtcattccgtgtttttcattcattttccctggntgcagtttccctcacccccacccctctcccccagactcttgatcacttcattagntaatttattatttaatttgattttttaagaagcaaaaaaaa

SEQ ID NO: 11967 - DNA, 665 bp, Heterodera glycines
gggggaaatttgaaaatttgagtgtaatttattaacagattttcaacaaaaaatgctgatttttgggattactattgtaaagcataattcgactatttccataaccaatttcttttctgctgttgttccgcccctttgccttttcccttcacacttgtctatttaaactgatgactttctacactcggggatcagttggccaaccagtgcattatccgtcgaccattatattttaaggctattccaataaagcactgaccattctccgccgatttattattggtccggacgtggacggatttgggcttgggacccgggaggttgggagtccagggcccggattttcacccatcaattcccgcttctctttccctcttccattcctctggcactacctccatggtccttaatgggcatctctcttaagctctgggttggacacccggccgttttactctatgctcaatgttcgaatttttaatttttttcctttgactccaattttcatcactaatttttcacccagacccccattcctaccagtgcttgtttttcccggttgccctaccgggaccgggaaataaattttcaaaatccgggaccgggaactggacctcggatgaccgggaattcctgacggggtcccggtcccgctgcactctaat

SEQ ID NO: 11968 - DNA, 1746 bp, Heterodera glycines
tttatatttaacttttaatcgtataattaaattcaatgacatcgatttatataattaaatttaattattttatcaattcctgagttttttgtggatcgacctaacaccgtcataatgagaaaagggtgtctgtaaaataaaaaattcgtaaaaaatcataatacgatgaaaaaatttatgggttttccgctattctacccctccccttttttaattagctaagggcggcggcagtcgccgatcgcaaagccttcgggacagcagtgccggaggctatgcccagccgccgggcattggcaattgttcagcgccgcaattgggcgaaatcactgcgctgtgtgaggacgaaattcggcaacgccaactgccgccacattttgtgttggaaaggcacaaattgcttcggtagtgttggcgttttgttcatttttttggagcgcaatttgaattttgctttgtcgagtgccaaattattttttttttttcaatttggcatccatttaaatgtaaatattaggctgaactcccgaaatttgttcaacgtttaagatatttgtaaaatttattttaaatatctctttttatagaaaaaaattgatttttagggctacgtgtttagaaattttgattttcataagaaattcttataaattctcaaaaattcaaaatatgtaaaaaaaaaatgcgtatactaacacccctgggtgttagagaaaaaaagataatgtttttctctggcactctctatttattggtacacatctcgttttttgaaacggtgtgtagataaggaaatcggcggacaaggagaaattttgagaaaaaaaataagttattattaattttttaaagcattttttcttgtggttgcgtggtctagtggctataccaccttttgcctttcattatttttcgtgtgggttcaattcccctaaaaaatatttcaatttaaaaattattattttttcttttttgtaaacagcctaaaaccgcaaatttaaccaaagttttgggtattttttgacaaaatcttttctcgacccgaaacccaacccaatatttttctcgacccgcggcaaccctgatgacaggtcctgaatttgctttacattttttaaatgcttttttacgaatattttatcgcatgataagagcatttttatcagatttcttttcaatcagagaaattttttagcaaataaaaaaagtattttggatttttgtctaataaatattttttttggtggtttttagcgaatattttgtggatttttttgctattcaaatatttaggcgcttttaacaaatttaaatccggggcctggcaaatggtttttggtgaggacaaattttcaaaaaaatataaaaaaattggtacttccttgttctgctgccccccccccttaaaaatttttaaaatttcatattttaggattttcaaggtcactactgatcacgtgaaggtatttgtttcgacatttgatgacatcatattcgtgatcagtgactttgaaaacccaaaaatatgaattctaaaatttttcggaggcggtggggggggggggaggagatttcgctgggccgtggctgtgagcaggtgattttgtggaagaaacgaaacacaatttgctgctgatcagagcagtgatcaagcccttgtgcctgattctgagctgatcaaaggattgatcaatgctttatctctgaattttatttttctcacgcgcatttctgatcagcgatcaa

SEQ ID NO: 11969 - DNA, 2244 bp, Heterodera glycines
ttaattacaaaaatagccactgaacaaatttcgggggtttggtaaaagacttttttccaccagtgtatgaaaaagtggaaaaagtgccaaaaatttgtattagagcacgttggacccaggcaaaaaatgtattttatgaaattttcagccatagaattaattatatattaaattaatttttatccactgcaaataaatatttataaataatttcagaataaaattggatgcttctagcaaattgctgcaattcccagaaacacggcctgacgacgaatgcctgatggtttggaactaaaaaatgccatgaaatttaatttgaaaaaaacccatttcattttttaggtacggtctgtgctttcggatatttatctgatccatcagaaatattgttttcatgtaagcataaaatagaatttgcctatttaaattaaatggaaataatataatttttgttaattttaattttcaaatattcaggctaccgtaaccaaatgtatgtgtgaacggtaagcgctttttttagattatgtgccacaacaaaaagccttagttgataaaaactatacatataaattaccaaaaataattgaaatcaatttttctgaaaaaaaaaaaaatcgggtttctcagagaaataaatatttttaaaaattttttccgaaaaaattaataaaaaatttcgatcaaaaataaaattccttttaatttgctatttgatcggacggggcttatatgtgatttctttcatcagcgatatccagcaatctagaatgttttgttctggaacttaaaaataccgtaccaaaactagtatggtaaagcaggattttctattcgggaaacctgtcccggtactggtccctataattttggcaccacatttttgtcaaaaattgatcaattttgccatcaaagtgattcagcttctaatcactgcacaatctgttaacattcagactgcgatttgagcgctcctgcggcatccaatgtgccaatttggagccgtttggactgccgttgcaccgcgaattgttgtggagcgactttcgcgggcggttgagcgccgcacaacggacgaaaagccatccgtttggcattgcggcgcaaattgcgatgctaatgattacattgataatcatcccggcccaattaattgaccgaaggcatttctgctttaggtggtggtgttgagcattaattattttaattgcctagcattttactttatttttttattccggtaaaatggatttttggtttgcaaatttttattatgatttgctagagctcagacttgaaaaatttcaaaaaaagtttttaaaaatgtgtgagactttttcatgtatgaatttcttgatactgtattgtatgatacagtagtacctttcttgtgtatattgtaaatatttccattaacatattttatataaagatctatgtatagagaaataattcttcttttttattatactagcccgaaagcgcgctttcggcgcgcacttgggctagttataaaaatgaaattctctcaataaactattacaaaacaaagtaaaaaattttcttgtattttgatttttgttaaaataaagccacagtttaaaattttttaaataaaaatttaaaatccaagatcctcaaaatttaaaacctgttttacaatagaaatttaaaaaattctgcgttctagttcaagcttagtttaattttattttctggctcactctctttctctttttttttaaatcttttttgtttgtaatttcaattttaaattgcttttgattttagcttcggcattaagctttctaactatactcgcgttgagatcgcaccaaagcgataggtatcaaaggggacttccgtgatggttaaaaggcacaatttacgctaccacccctatatgatataattgattcttggaacttttacaaaaagatattgatctaatattaaaaaatgcttaccaaaaattctagcttaaaccactaaaaagggttttttggtgattaaaaatatttgttaagatttcagacaacattgacttcaatatattcatatttcatatacatattattatcgtatattttatttttatctttgtttagcttttcaaataatttagtcggttaaatttctttaaaacaaatatttttcactttatgatctctattttttggatgcaatctaacttttaacccttcccatgatctcgttcttgaaaaaccaacgtataactgt

SEQ ID NO: 11970 - DNA, 1078 bp, Heterodera glycines
tataccataggtgccatcaccgacacacgaatattttcgcttcttgccaaatgacaaataacttcttaagtgaaagttttaccgttaccaccagcgccattaataaaaaaataatgctggtctttttttattgtgcaatttttcaaaaaccgtatcaactattaatttttgctcatttgtcaattttgcataacaacaaacttgaatttaaaaaaaatttggatgtaatatcgctaaatcgttggtttaaaataacagatttgagacattaaaatgtaagaatacatttactgtgtttggtatgaaaaaagtaaataaaaacaactacatatttcatcataaaatcacctatagaatagatttacattcctatgtttctctctctttgcctcctttcctctctctctctctctctcgttttttctctttttatcgctcctctgtatttttattctcaccttccttttttttcccatttttccaaaccaaaattggcataacggctataagcgcaaattcaaatggcgtaaacatcgcggacatacagacacacagaaattgtcaaaattatatatagataaattgtgaaatgaattaatcatattttatagagctcgacctggacctggatccaggcctggatttttcctggatccagttccaggtccaggccatttttcggtaacttggatttttcctatacctggatttttttgtgctttccgttacccgactatcaccgcccactccccgagaattgcttttccagcggtctgggagcaccccgaactaaaaagcacgaaagaattcaaaatcatcagtgtttacactttaaaagcatagaaacatttagcaacaatagttccgattaagatttataggacatttaataaattgcagaaaaaagtggaaatgggaaaactgacaggaaaaaaaggacagtccttgaaataatcggaagcccttaaaaaatgttaaaaaagagagaaaaatgaaacatttcctaaagaagcaatggaagaacacccgaagccatcgattatcagatttgatcagatcagatcagtagcattctcat

SEQ ID NO: 11971 - DNA, 3600 bp, Heterodera glycines
aatacaagatcatttgagtcatttttagacgaaaaatgcgaaattcgaaaatttgaattttcgactttttgtttgaatccgggttcgggattcgaaattggccgaaatggatgccggattcgtgttcagcgaccccaaaaacccctggaaacttgttttaagggcaaaaaaatttttgaaaattttttttccaaaaagggaggggggacaaactacagtattacctgtggttgttcaagttgtgtttccttaatgcttcatttcattgaatcatattttttctttcaatttcacaatgattctttttcgacatggctcacgacacggaataaaaatgcaatccttattgggtcgactcgtactgacccaattcgagctttttgccagggggcggtagacactaacacgctagacagttcatatacttataacacatgaacaatgcgaattgggtagtgcaaatggtctttgtatgacaaatcgtggtcatgaaaaatcaataaattctctgtctgtctttctttgctttgtttctgcatgtgttccttcatttatttgtctgtctgtctgctgctgaatgaatgaatgagttcatgcaaatgctggggatgtaaaacaatgtgtcttactgactgacccctgcctcttctcattcattcatttgtgaggtcattccgtcacaaatgaatatttttggagataaaaattgtattctcatttattgtttctaaagccaacagtcaattctgcttttctttgactaaacattttaatgttgaattgaaaacaaaacatacctaacagatacttaacaattctagactaactccccccccctcccttatgtatggtttttcatctgctggttcactaaattgtaaatttgctaaaatttgggctgcaattttcgtctcaggtcgaaacccaaaaactcggctttggccggacaatgttagacggcgcaagcccggccatagccttaaatatgttttgttcgatttataaatttagtcctttcatgaatgatcaaataatgacttatcgatcttccaaatatttttctcaatcttccagatattttctccaagttcttctgttgtttttattcgatggccttctttccctacacaattatacatgcgcaagctgatgtatgtttaaaataaatatttttgcatctttgtgttcaataaataaataaataaatttaatgatatctttcaagttttacctgtacctatttttttgaaaattatttattttcagaaaatccaatcggcccttttccttttcccccactaatccttttttgcccactgctaatgaagataaccaaaattataaacaaacttcccctcgaactcaacaatgaactacttcattttgttcccgagtttttttgccgaagtgttttggttcgctccaatttttcatttttttgtttggtccaacggagtaaaagagcaaaacattggaaacacaaagtacaaaaaatgggaaaaaggcagatgaaatgccgataaactgctgctaaatgtaattaaatgtgcgattcgtttaaggaaatcgatgcgcgtgaggagcagaccacgtacggattcggggacaccatttaccgcccattaatcccgcggcttggaaatcatcgcgtgttgacttcctttgtcggtgaaatatccggtgctggccagtattttcgttacgacgacgacagcggccgtttctgtgtggtgtcaatcaacacgcatgaagctaacgtaattataaatcaaatgtgattaatcgatgacttttttcaacaaaaaactgaattttaattatatatttcattcagccccttggtagttacaaaaatggaaaatgagtacacataccaacaaaataaaatgtcctctctacagaatttcgaaatgcttttcgtagtcaaattcatgttagcgttccccgaaatctccatcccctctgctgaagtggtgtaaattggcaaatgggcaccatcgtagtcaatacttaagaatcatttttcttattcgatattcagagagagatggtccgcactttctttcacgacaacgaggctgggttcaccaaaaaatattatttctgcgaactccaattttttgctatcaatgaattggtaaatgggatttcggcgtttttcgcaaagcatcatttgtccattttgaccaattccgtacaccggatccgaactcgaacaaaaagtcgaaattcaaatttttctaatttcagaaattgaaaaatttaaattttcgactttttgttcgatttcggacccggtcttcggaattttaatcttcaggatttagaatcacagaatgaaacaaaataattgtgttgaattaaattgaaatattcctttttcagccttgggacattgccgtgttgaagttctacgcagaaaccatgggaaatatttgggaccccctttttacgtacttggacgaagtcatcacttcggtgagcctatcatttacagcaaataattggcattattttataatggacaaataagcaaagtgtacaattctttattttccaaaataatcaatcagtcctatttaacatttagctcgagaatggtgacatgccggcgtacattatcgaatcgtcgccaagtaattcggccaattctctcgaggacctcccgtcggttgaggcaccgcaatcggatgattagttggagtgacaaacacttttctggcatctctgttccttcatcaaaaatgtcctttgttgttgttatgggcataataaacaatgaattctattgacattagcttctaccctcgtggatttttccctctgctcgggttcaattaggtttgctcttaaaataagtttttgtacttattttagcgttttatgtttattttcgttcttatttcgcgatttttgagaaatttattaacaaaaatgcaataaaaacaaaaaatacacccataagaatcgacaaaaaaaatttggggaaaatacacttaaaaattttcaaaaaaatacacccctgagaatggaccctaaaatcctgaaaattctaaatgtacttcatttctaactgcaaccagtaaataaaattgtttgacttaattttaactaatttacattgagaaaacagcaattttaacaaattttgagaaaacagcaattttaacaaatttcaccccatacatttgaaatttttcatgcttattttcgcacttacttcgcgcttttttcgcccttatttaagcacttattttgaactttttcgcgcttaaaaatctgagccctattcataagaagttttaaaattttttttaaaaactgctcaattttataagtttacaatttcttaaatttgaatatttctatttttataaacagggctgtaagaaataggtatgcacgaaaaatgaccaaaaatgcaaataaagtcataaaacatgcacaaaaatcgaaaaatatgcataaaaaacttgaaaattaggggtggaaattaaaaaacatgcacaaaaatcgaaaaatatgcacaaaaaacttgaaaattagggatggaaattaatttaaaaaattttttcatcataaattttatcggttgttttt

SEQ ID NO: 11972 - DNA, 2719 bp, Heterodera glycines
tttaatgtgcttgaaggaaaacaaaccgatatttagagacaaacaattgcaccccaaaatgttcgccggaaaatttccatgcgtttatcaattttctactaaattttcaaatattttgttcaaagatgacaactatcctgctttttgagtagattttttaatgggttaacaaagtggaggttggctggtccggcgggccgaaggcaccgccagcaggaaaaaaacacaaatttggatgaaatttgcgatttattcagaagtatttggcattctgtcctttgatattttcgatgcaatgcgagtcccacgggatcccgcacaaaaaatcaaatttgcatatcccgttgcgagattgcaactcaaaatttttttttttacctgctgaaggatcccgcgggattaatcccgcaattcccaaaaaaaaatcggaattgggatcccgcaaaatcacgcgcgggatcccgtcccacgtcggtctctactttgattgaatagtaggaaaaaaattttttttgtgcgaacaaaagttatgattacctctatattttttaacaaattttcggatttttctatatttcatatatacatacatatgtacatatttttctgcatcttttagacttttcgctcttattcgtacatatttcgcaatttttgaggaattttttaaagaattttttggaaatgcccaaattctgacctttcgctattttttcgtaatatttttaaatttaaaaacattaaaatatttaataagttcatttacaattgtatttaatcaaaattaataagatttgattaattttgctacttaaaaatcgttaataaataattttttatttgcctatttgtgcctattcgtttgttttatgcctattttgcagtttttgtgtttaaaattccgcccatgttaacaattcacattttaaaatttaccatttgatgataatgccttttggcatcggcgaaccaaaaaaataaataaaatttgaattgttaaatttaataactttttcacatttccccccctgcttttcgagcaccattcaccaatgcctaattatttattggcactttccatttcaaatgacatggcaaacatcatagaaagcaataggtaacttttaacaattattaattaatcactcactgcaaatggtctcgtctcactgataattttatgtaactgtttttatgggcacttaatttttgccccgggggtcatttgtttgatattatttattggcttttctcgggcacaccgtaacacatttgggcagcagttttattgccttttgctactagatttttgcctaattgggtcctaattatttgcctgtttttggtcttgtgtttgtttggcatcgtttgctcccgtgccaagccaattcctacatatgttttttatgtgatgccaataaaatgagtttgttattcagcaggggaatttgatcagagtcaaaatgaaaaatgctttgcaagaaaatgaatcgagaaaattttatttccatttttaaaaagcaataaaattaaaaataaaattgacctaaaaacactcaaaataaacaaattttgggctcaacatttgttataaatttgttaaaaaccacaaaatgtcgagcctctgttagaaaactgtctctataaataaattggtttgtttaatttagattttggcattttcagcaaaaattaattaattgtttttgtcagtccctccaccaacaaaaaataacattcatttattccaattttatccgttcccatttttctgtccctctcctttcactctttctatgaccatcggtcatcgtccgtttaatcaccgttttattgttatcaatcagcgaaagggagaagcactaactgacagagagagagagagaaaagcggtttatgttccgtgtcgtttttctttgatgttgccgccgggggccctttttgccaatgtttgactaccggatgaaatggccgggggagggggcgaaagtggcggtcaaaaagccattggaatttaccgcaatttttgtttttatgattatgtttgtgatcttcttagtattatgtactgtgcaatataatttagtcaagtaaaaaaaaagttcagcgaaaaatggcacgacattttgatttaaaaaacggtttttaatttccagaatttgttttttaatactaaagacagttatcttaattttaaatttaaaaaattataattattataatgttttataaaccaaaaagaagtcaaaactccaggttctatttaatttttaaatttacattagaaaaatgaacaaaaaattcaaacaatattttttaagccgaaaaataaataaattttctccacgttattcttaatttctaattaaaaaagaaaaattgaattaaaattaaaattacgcttttttaaatcacaaaaaatccagattttttgccattttcctccaaacttttcatttggatgggaccactaaacaattgttgttcatcgtccaccaccacagcaccacttgcagtttcttctgctgctgtgcttgcttcttccgctgatgatgtgcgacggacgattgacaatttacgacttgccaatttgtctcggcaaattgggcccccttttgcccgaggcggcggcggcactttgtcgtcaacggagataaattggccaccgcctcggtggacgacgaaggacgaaggacatgaccccccgggggaggggggg

SEQ ID NO: 11973 - DNA, 1891 bp, Heterodera glycines
aaatatacaatatttaaggctttaaatcagcaatttaaaacaatttagattttttccattttccctttcactgacatttttacaaccgcaaaaaaatttcttttatccaattggctttcttctttgatccgttcactaacacacaatgaataacgaataatgaaatgacatttggaagggtcaaaagggagggcacaaaaaagcaattgcaacagaaaaatttacactttgtcggcactttgaaaaagcaattttccggcggataattagggagaaacctcggaaaattggggcatttttcaatttattaagaaaatatcaccgttttctgaggtctctttattataagaattcaacaacaaacatttgaggatgtgtggatttgggggtgggtgggcccgtgttccgtaacattcgtttgggtctgatcactgatcattgggctgatcatttagcaacatgaattggtctttatggcccggaccaaaaaaggtggactccaaaaaggcccttaaatagaaataggttataaaaaggcccaattttcagagatttaaatttgtcagaaaaattaaaatacaaaaaactcggggcctagccgttatcaacgcattgtcgccagggggccatgatcactgatcagaccatcactttcattcatgatcactttaaactgtgccattgttactgtctttgccatcgcctcctccattttcgtgccgttgtcgttgttggtgttggcactcatcagctacttctggcgttatgcccgtgcagcttttgttgttggcgttgtgccgcgcggcaaccgcacagattgcatcgggcgcaaaaaacaatgtggcggcaccgccgccgccaccggaagagacgggcggctgttgtaatgacggcggtgccgtcgcgtgagacagccccggcggcgcaacaaaactcatcggcggaaaagcagcggacaaaaatggatggggatgatgatgccctgggggggggtaattaatttgaattcaaataaagcaattaatggattatttgtagctctaagagcccactacttttttcaacggaatttttttgaaattgtagacaaacagaaaacatttggagctattgaagtcatttgagataggctaatttggttgcttatttccacttagttatttatgtggtattgaggtgtccattttcaccgggactaagttgtcccagagcttattcgacttcacctgattttttagacttaactcgtcaagagctttcgaattataccaaatttataattttttaaatgttatatggttgatttttggtgcaatttttcgtgatttaaaccggttttttgatttttcagcacctagggactaatttttatgatgattagaggtcattagagattgattgcaattaattttccccatttttatttttaattatgtagattttttgttttatcctaaatttctgtgaccaccttccatttgatggggcaaaatgattccgccgcctggccctgccataaataaaagtgccggcggcggagggaaaacgccggccggcatcagctgaggcggtggcgtgggcttccgcttaaacctgtgaaaatatttttggaaatttttggaaattttcattttgtttcttgccttttccggcgtcgtaaaaaactgccattgtcgaacatgctttcggcattcgggtccaaataccaataattgccttgacttagacatttaaaatttaattgccattttttttgagaaaacctttgcccggatttcccggctctctgggcagctttcggaagcagtcgttcagcgacagattatgcctaattgaattttgccagcctaagggctgaaagccggcttttaattaggtaattagggaaata

SEQ ID NO: 11974 - DNA, 3299 bp, Heterodera glycines
attgactaccgtaagaataaatttaattttggtagcaccaaatagtgttatttgagtaggtggtaagctcgtcgactgctattgctacgactgttattcttaaatttataaatttccaagactttaagcttttaatgtctccaactttttattgataaattatttcagattttcaagatttgcaaaatgtctggtgttcaagacgaacacgatttgtcaacgccatcgccgccggtaagacaacactcaaattgtgcgttatgtcgagagtgtttagggtcacgaaacagtcaacgaattgccgccaccaccaccacctccgctatctcttcatcaattgatggcgccgcaggacaatgatacacctcatccttctccgacgtcgcatcttggtatgacagcgatgccaatggctccggtggtcgttggcgacgcgcaggctccgtcaaatgaaaacgaaatttcgcaaatggatgtcactcagtgtttgggcgccagtccctctactttcgttcggccttctgtttctggtgtgcaaccgcaggtgcaaccaaccggggtaattaagagattatgcttaattaaaaacctcaatacaaacttttgtttagtggtctaaatttttagtatgacgcattttagtaccaaggagcctgaaatttcagaaacttgcactttaaaatttcattctttcttgtcgacctccgtacataaatccaattttaaactatttattcattatttaagtttatatttgaaataatgaatcaaagatagtgctgataaagttattcgcatggttttaatggtcaatattgtgaaaaatttgaaaattaaaattatttaaaaggcattaaagacgcaagcaaaaatatcaatcatatgaaatccaacgttctttattaaacgaacaagtatataaagttttttccgaaaaaaattatcgtaattttatcaagaataaagaattaaagccggcaatcaaagattcataatataaagcatgctttctcccgagtatattgtctataaatacattaaaatttgattagttttaataattaaacgattcgattcctttcgtcaatgggtgaattcgaacggagccacttgaagagcacggcgacaattctgaacagatttcagtctctgtactaaagtgtccgagttccactgggactcaatcattcaacataaaaggctttaaaaatttatataaaacttataaatagggttcgcaaaaaaaggcaccaaaaatcgcgaaaaaggcactataataggaccaaaaaattgaaaaaaaaggcatgaaaaggcacgaaaatcccgaaaaaggcatgaaaaaaggcatttaaaattgttttattaaggatttttagggagaaaaatattttttgagaaaatttttaagttcttaggggtgtattttctgaaatttttctggtcatttcttaggggtgtattttcccggttttattgcatttttaatggaatttttcggaacaaaacacaaaaaaggcaccaaaacggcaaaatgccaaaaattgctaaactttttaaaaaaataatttaaaaccgaaaaaaatcaagtagttgacaaaaaatattagataaaaatcaatgattttcaaaatctgagctcagattcgtgatcagcttatttttaagcctagaaaaaatacccgacaaatttttaacatttttttcgtcggacaccaattcttaatattgccaaaaaggacgctaaaaatatgcatacatttaaaaattcataaaaaaatttttttttttgcttttattttaaagaaaggagctcaaaaaagcatttctgcattgaaattttcgattctgaagtcactatgcgtcattaaaaaatcagactttgacgcttctcactagggttataaattatatggactaaaaaatgccaaatatggacataaaatatggactaaaaaagcccgaaatatggactaaaaacctcaaaaatggccaaatatggaccaaaatattgatttaaaaatgccaaaatatgtgttgtaaaccctcaaaaatacgaaaaaacgtatgtatatttaatatttgttaaaacagacttaaaaatacactaaaaacagccaaaaaatgggtttaacacttaaaaaatgccgatttttattaaattctagcttcacaattgcgaatcaaatgcaacccaaaatttttataataacctcattctgttttcagcgaaaattttcggaagtggacaaaataactaaaaaaatttccgaaattttgaaaaaaaaaattttttttagggggtgtatttttaaaaacttccaaaaaagtcgatctttaggggtgtatttttcgcttttttgcatttttcttttgaaaatttgccaaaaatggccaaaatatggactaaaaacgcaaaaatggcgaaatatggatttattcccaaaaacccccaaaatatggatttatatggactaaaaaccttcaccaaatcaaaaaattttaacgcagaaatgctatttttgagcccctttcttcatagcatatgcgcagaaaaaatatgttaatccatataatttataaccctacttctcaccaaaataattaaaaaattttggcgttatgtcaccattttctcactattttattaacttttcgagatttttcatcactaaaagtcgcggccctagtcattaaaaatctgtcgaaaaataatccccccgtctccattaaaggccctgtctccaattatgtccccctttctgaagaggttgaaaaataatccccccggggccttaattagagaaaatacggtaattgaaattggcttttccttttcatccctttttcttccgctgaatccgttccgttcttttaatttctcattttcttccaaatttgtccattgtccgccgtttcgccccttttttcagttcccccctctcctcccactcccccttttttcatgcttttgtccttggctcccccaaattcggcgcccggtaaatgcgtcagtggaaaatgcgtcagtgaaaattttatattcataaaaacaagtttattgcttgcgttttcggggggcacggaccacgattcaggcatccatttcggccaatttcgaaccccggacccgaattcgaacaaaaagtcgaaacttcaaattttcgaatttagcatttttggctgaaaaacggcataaatgatctcttattgcaggattagggcttttagtgtgtttttttcgtgtatttaaacctatttttaagaaaaaactaaatttcgaaaattttgacttttcgact

SEQ ID NO: 11975 - DNA, 1611 bp, Heterodera glycines
ccgcttttccacctactaggatctcctttcactgagttaaagaatacaattttaaagttatatgtttcttaattatgattgaaataagttcaaaaaaatttcggttttttcgttccgtttcgtacgaaaacggttattttttcgttttcgtgttttgtccgtcaaacttttttcgttttcggttctcaaaatatttttttcgttttcgtatcgaattcgcattttcgtttcgttttcgtatacgaaatttttttttttgttgtgattttcgcacagccctgctccggcggtagaggggggggggggggggggcttcgtaatcgggtcctttccctctgctgatcggttgagcctccgtgcgccttacaatagtaaaagggaaacggaaggaacggggagggtgtcggttcgagtccgctccacaacattaatatatttatttatttccctccaaaaaattaaaaaatgaattttttttttaaattgtttttgccaaccaaattggacaaaatcggtatctatcgaaagctcttggaaagaaatagcacgccgaaatgagaggtgtgtgtttttctgtgcgctctccatttattggttcatctctcgcttcttgaattttaagtcaattttatgcctaataaatatattaataacaaacaatcgaaaacaaaaaaaaaagcaagaaaaagagtcaacgagcaatgtatgaatgaatagaacagcacgtcaagcaagggaaggtcagttgtcacagcgttgttggcacgttaacattggcatcattcttcgacattggcattggcacgcgcgacccgtgctgcaacagctgagcaggcaacggaaacgcgtcagaacgctccaaccacggctcgaccggccctggaagaaaacatggatataatttatatatgcatataccgtatttcttgaaacagagctcccggggctctatttttcaacccctctcaaaagggggccttatttcagagggctctaacaacaatagtcagggggggggtattataaaaaatacggtaatccgagttgcacagtgctttttgggactcgaccaggacctgaaccaaggccgggtttttccctggatccacgtccaagtcatttttcgacaacctgggtttttcgtgggccaggtttttgtccggtaaatgcagggccaacatgaaacccaggcctagatttttccaaaatttcgggctcctgtgtgagtcatgccagctcattcattgtcaaacaactcatgtccggttggtattttaggacaaagccttaattggaatatcgccacctttcatgacattttctcgatccacggcggcaccagtgttcatgaacgggttgcaaatggtgaacggagagtgccatgccttcttctcacggagctgtcgcaacacattcgatgggatacgctcctgtaagtcatggaaattttttgttgcatccagtatttaaactggtggaacggcaaacccgaaacaggaattaaaaaataaaattcggaattttttaattaactttttgtcggtcgaaatggagacgaaacgatttatggagggaatgaacgaatgaactgcttgctcactcccttttgtg

SEQ ID NO: 11976 - DNA, 1369 bp, Heterodera glycines
  unsure (1)..(1369): unsure at all n locations
agagaaaagggacgagcagagcaggggatgaaaatgaatgatgatgaattactagtcgggggatgggacaggaaggcgttgaggacacctgtgaaacgatgatgaatgaatgaacgaaatggcagnccgaaggtgccgccgccgcactccttcgagaaaaaaaatcgaaaaaattaanagagaagtagtcttgagcaaattttttgtgtatgtttgtgccaagttacgtaaattttggcatttatgcaaggttttttttcataagtcatttgctctgtccccttaaaaattggtgaaaattcaaatgagtcccctaattagttttgttttataaactatattcaatctaagtgcctgaatttttgaatttttcggagtgcctacagatctgttcaccgcccatatatcaataaaaaaataattatttatttgttgaaaaattgagagcccaaaatctcagagatttgcttgtgcatatcgcgtgtcctttttgccattttaaactgcattttcaaaacatatcccgtgcgcatcattttttctaaatccggggttctatgcctagtctgctgggggcctaatgaatcaatgggttgaggggcaccgccactttagcaaaaagtcatcatcattttgccgatgttttcaatgaatgaatgtgtgggtgtgttggttggtggtggtcatcgcaaaaaaggaggaaaaagaacgaggtcacgcggtggctgctctaatggaagaaagtataagtcgcgcagattggctggcttttctgcgcaaagcctttcttaagtgacgagtgagaaaaaggaaataataattaattaaaaaatcttaatagatttttagtaagttcctctcgaaatggtatttttttttttgatggtcagtttaacgcccaaattttccattcacattatctcatgaaaaaaaacctcaaaaaaccgatttttctgcctgttttggcaccgcgcgccttaaaattcatacacttggcatgggaatatagcatagagagctttcaaaaaaattttctgattccttaaattgacagacaaagaaaaaaaaagatatgaaatataagtgctggggttttgccagttttttttttttgaaaattttgccggatttttgtcacaggcctttaaactttgagtgccgggtttttgagtttggccattgcgtcccctcgccggaccctctttaaataatcgtaataaagtaactaaaatttccgcgatttttttttttgaatcatttatgtacatagatataaaaaggggatgtgttggtacatggaaaaagaaaattgacataaaaaggctcctgcaacgggagaaggccgcggcgggggggggggggggggggg

SEQ ID NO: 11977 - DNA, 2099 bp, Heterodera glycines
gtcccaacacgtccgtctgtctccgtccgtccgtccgcatcattctcatggaccattataacttatgtaggtgtacatatatgtgtaggtacatttatggcgcatcgcccgcgggcgggccgggacgaggacacggcgacgatcactctcacaattgccgcagaagacagacacaaattgatcaatgtgcctgcctccgatattccgacataatcaacccctccagcgcacattcattcatttgtgtgaacgccggagggtgagggggcgggggaatgagtgaatgactgggcctaagcttgtggggtctgtctatttatagcatttgatggatgatgcgacggcgacgcaaaatttgaatgtagcgaaagtgcaccaccgtcgtgtggccattgttttcgcgcgggttggggacaaaattttcagcccgggagggtaccatttaagcgcgtactaaatgatggggaaaattttggcggggaaatgtacacttggggtcaattcagcgcagagattgtccatttaagcgcaggtccaatgctcatgaacagagagagtactgttttaaattttcttaaaatgtaaaagaataaaaatcggtttccttttgaatttgtttttcttaaaaaaattttcgaaatgcaattttttttattttagccaatttcattgaatgtcccaaaaaaaaaataattttaaacacattttggcaaaatgaatcttttggcaaattttggagacaacgaacgacttttgctccaaaaatgggaacaaaggcgattaatcttgtccaaaattttctcaacaaaatggagaaatagggagtgagacagagctaggggggggggcagtgaatggaacgcgacgacgacgaccttccccattttatttattatatccaaattgccatataaaagaataaatggcggacagttgagcaatgcagtgaacagtaaaaatcaacggttttaagaaatataaattttcaaaaaaaaaaatttaaatgattgaataaggggaggttcaaaaaattttttattgtggatgaaaggggggagggtgatttatttcatttaaatttttccctcattttaggtaaggcaattcattgaggtattgagcccccgggggctttagtgtttttcacaaaatattggtgttttaaaattttaattttgcataattctcccaacccaaccccaacaatgtaaaagtgcataggtaaatgcaccccccccccccttccccaaaaaaaatacatatacaaagtgccgcactccaccatacataattattgtccggagaattggcgagggggaagggggcacaaaagtggagaaagtacagcgacagtcacagagcccaacaacaacaagcagcgcaataaagcgatttgatcagattccagttcagctgcttgctgtttaatagagagaaaaaggcgactttggggggggggggggggagggcagcaaaaaatggacgaaacgaaaaatgaataaagggaagtaagaaaggaagaaagaaaatgattttcgagggggggggggaatggtcgtaaaaatgcgaatggtaatggtttaaaaatcaccaaaaagcgatgacgaagaagtatgcatgtattctgagagggcggaagggagggatgaggaaggaagatagagatgggggaagtggaagaatttgccgccccccttccatgacggcgtcgtccccgacggcgcggcaacaaccacgaccatttgttggaggacgatgatggcggaggggggaccgggcggggggaggttgcgcacccatctttgggggcaaaggctgatttggggaccggcggcaaggatatttgagcgacgccgtatgagcgacagcgaattcaacgcgcaattaactttttccagtgttaattatgtaaatccaacaaattttgtatcaaaaattgcaaaaacttagactttttgtagtttaagctttaatttttgtgagttaacttaattattatggtatacatattgtatttgattagactataaaaaagttaattgtccaagatgagctcggcactcaaatgtcgccgaccccccggctcatttgtgagctga

SEQ ID NO: 11978 - DNA, 377 bp, Heterodera glycines
ggaggggggtaaatgttaacataaaaaatcgtgagctttgcccctttgagatgaaattatttctgcaacacaaattttgtggacaatcaaaaagaaaatttaatgccgacaaagtaatatgaaaatgcgagaaatgcctgatgaggagaggcgtgaattcgggcttgaaacattatttgaggtgaatctaattagtacccaattagacaatttgcagtctcgattcttggtagaaaattaagtaatgttttggccatttgttttgggaaagttattgtgagataattagcatatttaaaaattggaaaaacaaagagcaaaattttaaatccataataataaattaattaaataaaagtcattaaaatgagctcatc

SEQ ID NO: 11979 - DNA, 4011 bp, Heterodera glycines
  unsure (1)..(4011): unsure at all n locations
aaaaattgccatattntggggttttntggggcattaacttcactggtccttaaaaaatcttcaaaaatgcaaaatgtcggctgatagtgctaaaaaatctaattatgtaccaaatatgcataaattctcgaaatatgtaaaaaaaaagtcccaatttttgttcgcaagaataaaaaagaaagtgtttttcctactattcaaagcatgcagatccttgaaaaaaagtatttatataaaattgacagccctaatgattatatttgttcgaaaatttttatttttaatttaaaaaaatttatttatattaaaattttgtccagaaaatgcggtgtacacaaacagaaaatgaccaagttgatgaaccagttcaaaaaaggagcaaagtgccaaaagataattggcggtgccattgagtgatctaaaaaatataaaattataatttcgatcaaataataattcatcatttcatactttgttttgactgtgataaaaatcacagaaaaattgaagatgattccaaatgttgtaatgattccataaatcagtgcgcatccaatcagagaccagctgggattggcatctttgaaggccaataaaactgaaaatatattgtaaaattaaataatattttaccaattaattaccgcatcattgtcgaagttgtccaaattggccataattaagggtcaaaaagaatcgttattttattttaagttttaaaatcaacaactgtttttaataccgaagttaacgcttttgaaactcccgcatttcttttcatgacgcacgaaaagtaatcatcgtttaatgaactaataattattgatacaatgattggtagacaatttaaaatttgcgcttgacagaatccatcattttaattgcgagaaatatgtcacgaacaaaatcaattttaaaatgaaatgtgtcacaaactttggagaaatcaataacggctgtttaataccaaatgtttttttaatactcattttataacacacgacacatttttagtttgacaaatatggtaagaaaaaattgcgcattttaccatggaatttctcatcaaaattttgttttaacgaattttcatatgaaaccaattaatttgtgggaaaaatcgaaaaattatgactgtaaactgtgcgaagcatttgtattgcgtgacctttttgtgtaaattattattttttaatgaattcattagaatattaaattttaaaattttttaaatagtataagaaaagatatggttattaattccaaaaatcttaagtgaaagttttgtgcataacttttttaaaattcaatgaaattttccgaaattttaaatgtaattagagaattcttcggctttagaatatataaatgaattttggctcaattattttaaatgtttataattatatacagggtgtttcaaaagtgattgaacacacatatttattcatcttttagggatgtgcgagagtctcggttctcgattcccgactcgggaaatttcccgggtttttcgcttcccggtctcgggtttttagtctcggaaaccgagaaatttttacactgttaaggatgaccattgtggggagtgagtcgccggcaaagtgggaaaagaggaaaattatatgaaattttaacatattttcttaacaaaattcataaaaaatctccaaacatttccacaaaattcccttaagatttcaaaatctgacctaaaaattgcctattttaatgaaatcttaagcaaaataggaaaatttccaatttttctcccgcgggcctatcgcggnaaagggggtgaactccgtctcagcaaagttcaaaaatctatcttttttctttgttgataaaactcaacaaaatattataattcgaaagctntaaatgattcgaagattcgacattttctgtaattattcttaggctaatagagccttttaaaggctttcgaatgatacaagattgttggatttggtcaacaactntaaaaagttatattgactcaattttgttcggatgtagttggtccgttccggtctatcagtaccgctggaccccaaaaacttatacattttttgtgtaaaatctactaaatctcattaaaaaaatccaattttttaccggcggcgccgattaaaaacgaaaatttggtcacttttagacaaaatctgttaaccaatcacactcaaatttccaaaaaatttccccatttccccggcggagcctatcggcaccgccggatccttccgcaaaagttttatggaaaaagcgcacctcaaaaaagcggttgaaatccggtctttatgcatatgggttccaatccacgaatttttcggttcacgtatcagtgatccgtggatcatggtccgaggatccgatcctgataagataatcgagacattgggggatttaagaacaaataatatgcctaataatgcggcatcaattcactaccatttaataatgggctgatacggaagagtatcttatgaatgacatcattcaccattgtgtagcgcctaatggaggcacattttgcaatggaataacttgatttggatttgaaattcgtttgaacacatatggaaacaccgtttggaatgcctgccgatactccgtactaaaaaatgaaaaattaaattaattattttttaataatttttcaattaaaaaaacctggtaaaatacaaaatgggtccgtttgacgctgcgccaatgttcaaaggaattgaagtgattgcatgtaaaaaccacgcagtgatcggagacgaaattttgggaattaaaagaatgtaacaaattaatgcaaagaaatagccgctaatattaacagtgataatgcaaaaaattgcgcgaaaagtgcgacgattgaacgaatcggcggacggaaaacctataaaaatcaattaattaggtaattaatagcaatgttgcacaagtgaatcattgttttaaaaagagaattaactcaaaaattgcaaaaattagaaaacttatcaaattttaagaaaaaagatgccgaaatttttttgccaatggcacaaaaaatcctggtctgcttttatgaccattttccggagaaatgcttaatgaaagactgatttacctgaagcttttatacgtacggcaattccaagaagcagataaataatgcaagtaattgaagtaatcaaaaaacttaatttgtcaaaaataggtgcgctctaaaaagcagagaaatatttaattattatcggatcaggatcacacaagaacctttaaaaaatcaaaatatgatccggtggtcatctgatcaccatcccctagttgcattttggtacaccggaaccagagaagcaaaaaccatagaccaccagaaagaattgttaacaatgccaaatacagtcgcttttgaagattatcgtgactgaaaattactgtaattaacgataggaattattaatttttatacaattccgaaaaagcaattccaatcagtcgatcaatgccagtgaaaaacatcgtcggaacaattgcccctgaatttaaatgtatttaaaatatttgctccgtgcaaataccaagtccaatcacaggaatgaataaaatcattgctgccaagcggtactcaatgaaattttgtccagaaaaagcgttgtacacaaacagaaaatgaccaagctgatgaaccagctcaaaaaaggagtaaagtgccaaaaggaaattaacggtgccacggaatgaccttaattagggttcattttgaaatattaatatataatttaaaattccatggtttcatcgacattaatttcacactttgttaaatatgttgcagcaatgacagaggaattaaaaatgatgccaaatgtggtgatgattccataagtcagtgcgcaaccaatcatagaccagctgggagggacatctttgaaggtcaaataaaactaaaataaataaaaattttaaattaatttaattaatgataagaacgtattgttcattgtaccattcattttgaaaattttctaa

SEQ ID NO: 11980 - DNA, 5846 bp, Heterodera glycines
  unsure (1)..(5846): unsure at all n locations
cttactgtataccaaaatcaaatacaaaaaatataaaactttaaaaagccaaaatttcctgaggataccaaccattgttaaaggcagcatgagttaaaaaaatttttttttgaaaaatacagaaaaacaaaaaaataaattgcgacctaactgaaaacccaatttttcttatatgaaaattacccctttcccaacataatccttcaccgttccacctccaaaaatgaaaacaatttggcggtaagcaatgcgatgaataatcatattattatgataatagttgctaatgatgatgaagccaaaaaaagttgcagcacattaatgttattagcgcgaatgggagacagccaattgagcgtgggggtgccaacacaaagtcatacgctgatggatgacagtgctcaagtgacagctattgtcccatttaagcgcaatgtattatgccaaatgcttggccaaacaatgcccgccaaatcagtgccaaaccccgagtgtcgctggcttggcacttatgtcactcagtaccaagccctggcccggcgctgagttggcactaccctaaagcgcaacagcagcagcaaaagaagaagcattatgcccaaaaatgacgacgataatgatgatgaattgctgcagctgctgctgatgcttcacagtgcaattgcctctccaccggcgcgcgggtgcccgttaatcagcccgaggggaaatccgcgctgcgcctgcgccgcttttgacgcggaaccggtccgtatcctcgtcagtcgtcatttggtggcctatttttcgccccaaggcgaagcgggccgctaaattttcgcgcgcggtaaaagtcattaaattagccgctccgttctgtggcccgtgatcaaagcgcagccggcggctggcgagcgacaagtgaatccgatcggagacggcgcgcaatttgcccctggggaacctcgacgcgccccattagtgcctcggggctctatcggcggttaaaaagtgaaagcgccgccttgccgtacaacaaaattattaatgatccatgcatgtgagaacgatgcaatcaattagcatgctttcggctgatcttaaaggtctacgacagaaatgcgaccccacccccctcgggtcggggtcactttggcgcgggccattttggcgccgcgaactttaaagtgttataacttttttcttatccaaccaaataaaataattttgataccattaaataggcctaagtgttctttattagcctgcaaaatattagaaaaaaaaattctgtttgacaaaagagccaaaatggccagaaaaagtcagttttttgaggttttttggccataacttttttatgttttcaattaaattttttgaaattttgcaggctattagggactatcaagcgctttaaaatgatatcaagcttatttaatttgaatgagaaataaaaatgttatagcgtttggcgccaaaatggctggcgccaaagtggccggttcccacccccctccccacccgaatggccagatgggggcaaatttttaaaaattggctaaatgggggcatcgttcgctggtggcaccgattggcaaacctgaggaaatttttaattttagatgaattgtttagataaaaggtgtaattaagtaagggtttatataggttaaataagaaattactcattttattttatacattttttgcaagtaaaaattcaatttattatgatatttttttcataaaaagaaagattttagattgtacttaaaggtcgaataataataataataaaagtcaaaatttggaaaattagaaaaaaacaaattcaacgattttttaatgagggaaggtttcatttttgtgttccatgaatgcccttccaaaacagcgaccaattattcaaaagaaagttttttttttgtggatggatggaacaggtttgatcccctgccggacaatgaataacaattgtgtccgattcgatcgcttttttgtggcgtttggcgtccgtccgccaatcggtcgggcgtcaatttgaataaaaatgggggcgggcgagggtcagtgagaaaatgtacaaaattgcttttaatgatgggctttttgtatagcattgagcagagagagtcaataattcattcatttatccgcgccgtccctcggtggacaatgcgtgccaatgccatcaaaaaagcaaaaacgtaaaattttaacgagaaaattgtttattttattagttagccctggaaaacaatgataattttaagataatctcttaattcttaagtgatttatagtattgaaaatccaatatcaaagatattgaaatttatatgccgttggaaatgaaattcttttttttatttaaataaataaaaatggtcaaaagaaaaatgccaaactcaaattttgagagtgcaatatttttctttctttttttgtaattataaaaatactgcctttttcaaggttgccaaatgctcaaactttttaaaaaaaaaatttcattgcatagatagacactatcttaacaagagcttctacatacataaagcttccaacaagcagtaaatttataaattttactgcttttgaaaacagaaatagattgaaataatgggccctaaacggaaggggactgactccccaccgcgtttggcaacctcgtgtcttttttggccacaaaagtgcaccacactgtttttgacagatgcttaatgtgtgcaaaattatgcggaattgcctcaggcaaacattgggggggggggggggagtaaagccatgaattattatttgtcacaagccattgttgttgcgtttattgtatggacttcttcgctttgatcaaacactcggagagggggggggngggggtaggctgaagtgggcggaacgccacgacaatatttacatatggtcatcaaaagccaaaacaaaaagccaatgaagcttaataattttgagtgggctgaggagtaaagtggcgtcagtttaaggaaaagcattgatcaatcagctagccgatggttatgcctttgtcgaattgatcagacagctagctactggtctatattttgccatgcttagcatgagaaaaaagccaacggcgctatgtttttctattggatcagccaaatttgtcctatgccttgttttcgatcagccagccgctccaaaaaagcaaaagcattcagtataagtgtcgtcagtcattcagtcacttcttgtggattacatacatagccgtcccattgatcgaacaaaacgaccaaaacatacacatacactcgttacattcattcctcgtgggcgctattgtacgattattatgaagtgtgccgttgaagtgccgctggtcccgcattaatttgtgtttgtgagggatggggcatattcttttgttattagatggtataagggacaattttcaaatgaatttccgccgggcatttgtcggattatgccaccagcagaagaaagaattaataacacagagattacggatcacggcatttataaatgcttccgtataattacggcttatccgtcttgtttagaatttgatcaggtccacctcgtttagcaccttcccaatttatggttttgaaatgaaatccatctgtcagtgtcttcatttgaatgcatttgccgggtggcacattacaataattaagcgcttaattgaggctggaggggagaattaatttttnctacggcgtcactaaaaatttcagggttttttgctttaaagttttcacctaactgaacttttttaaatgctggggcaacaaatcttggtaaattttggttcccttttggcggtaatttaaaaaaaaaaactgcccaatggaaaaaggtggggagggtcccggttttcaaaagctttacggaatgggaaaacagggtcaaagggggggggaaaaaaacaaaatttttgaaacaaaacccaaaaagggggaaaaaacccccccccaaaaaatttcaaaaaaatttttttttttcccctttttttttttgggtttgaaaagggggggcaaaatctctttttaaaattttttttgggtgggggggagtggggggggagaaaaaaaaaaaaaccccccccaaaaaaaattttataaaaaacaaaacaacccccccccccccgccggagaaaaaaatttttttttttttagaaaaaaaaaaaacccaccccccccccccctttttttttttcctaaattattttttttttttattaatgggggggggggggaaaaagaggggggggattttaacaaaaacacccccccctcctctcccccccccccccccccccccccccccccccccccccccgggggggggtggggggggggggggggccccccccccccccccccccccccccccccccctcccccccccccccccccccccccccccccccccccccggggggggggggggggggggggggggggggtttttataaataaaaaaaaaaaaaaaaaaaataatatatatttgtgtgtgggtgtgggggggggggggcgccccccccccccccccaccaccaaaaaaaaaaaaaaaaggtttgggggtgtggtggggggtgggggggggggagaaaaaaaaatttattaaacaacacaaaaactcccccccgccccccccccccccccccggcgggtggggggggggggggaaacaaaaaaaaaaaaaatattattatttttttttttttttttttttttttttttttcgcgggggggggagggggggggagggagaaaggagataattttttttttttttttttttattaaaaaaaaaaaaaagggggggggttttttttttttttttttttttttttttttttattaaaaaaaaaaaaaacaaacaccccccccccccacttctttttttaaaaaaaaaaaaaaaacatattttttttttttttttttttttttggggggggaaggtgtttttttttttttttttaaaggggggggggggggaaaaaaacaaaaaaaaccccaccccccccccccccgcgggggtggggttttttgtttttcctccccccccccccccccccccggcccgaaaaaaaaaaaaaataaaatatatttttctctcgccccccccccccccccccccgcgggggggggggggagaaaaaaaaattttttttttttttttttttaaaaaaaaaaaaaaatttttttttttttttttttgtgggggggggggggggggggggggccccccctccaaaaaaaaaaaaaccccctttttttttttttcgcccccccccgccgcgggggggttttttctccccccctttttttttatttttttcgagaaaaaaactccgccccccccccctttttttgggatatccccaagagtgtttttaaaaaaaaaaccccccccagagaggggggggttattttttcctccccttctaccccacttnngtttttttctaacgcaattcttctgcannnnnnnnncctttannttttatacagacgactggataaacaagatgnggtatannnntnnnnnngttttccttttcttttacttttttcttttncgtaatttaaaatgtcgaagacgccccccccaaacaanntatataaagancacaattctttacttttagaaccttcccccctcccgtcgggtatcaaatgcaaatgcaccaaattgaacgaactaatgatcatcagccaatgtgagcgaaggtgggaacgacgacgtcaacgacgagcgcaaaatgaatgacatggaagaaggttttttgtaaatttaaaaaataaataaataaagcaattttaattagataaaaatataattatggttattta

SEQ ID NO: 11981 - DNA, 3842 bp, Heterodera glycines
ttctcccgccgcttccgccccttccggttgctcttccgttcgttcctccggcaccgctcccgcgtccgctgcgacaggtgcttcctcaacctccgatttgggctcctcctccccggccggcttctcctcttcctccgccttctcggccggctcggcctccgatttctcctccggcacttcgtccacagtttcggccgccaccgctgacactttccgttccgcgtccgtcccatcctcgcccttgtcccagctggtcatgcgcttccatctgtcaataagtgatccgtcagcgggaaaggcagcagtgatcgattatcattccgagaaaagcgatcaatcaaccaaatcaaattcaggtttttcaattaacaaattgccgttcatttcactggcatttcctcttacctccctgaataatttgttggcatttccctcccctccgattggtttaacccgatcattcttcccgatcactttgtttcccattggcatgccattttcactaattcccactgatcaatgatcaattgtccgttcgttttcccacgccatttcctcctcccctcccttcaccgatcacctcgactcttcctcctccctttcacgcatccgtgcatcgaagctctcctgccgctgtttctcctcctcttctttcgctgcttctccctcatcttccacttcgactgcttttcttaaataattcatctctttttccacttcgtttccgatcactgatcagcttaaacttttgcgcttactttggcgatttcggtgactttggcgtccgtggcgtccgagggcttctcggcgattttgttctgatacttcttccacttctgccgcttttgactgacaacacttcgtcttcgaaagtgctgaacacaatgataaagacaggacaatagcagaaattttgttcatttgggcatcaatttgtccaaatcccaaaaaattgctcgattgaaaaaatcggtaaatgttagcaatggctcacgttttcttagtcgacgcggcacttttcggcgtcgttggcaccggcgaaactgccacaggtgaaactgaatgattgcgatgaaaaaatgatcaaatggatgacaaatggtcaaaaagtgtcggccatttgtccctctcaccgacactcggcgcctttctgctgcccgtaacactcgccacgtcttccggcacttcttccgcctgttctacctccacctccacttgctgtacttcgtccaattcgttcggcgtgcgcggccgtcccctgggcggtgcctaaaggtcgattaaaaatttaaaattaatgccgaaaagacagcacggattatattggcacaaattgactctgtgggataatttggcattcttcggctaaagcgccaagtaattgtgaacttttttactttattaagcctattttggacaaaatgactaaaagtgcgtccacctgcagttcaaacttttgctgttcgtcctccgttttcggctcgtcgccttccgtctcagcgggcgtttcctcgggcgcctccgtttccgactccgccggaagcgcctcctcatccaccgccggtggctccgcttcggccgcctcctccgcgggcggcgcttcttcttcagccgcttctccgcctccgacgttctccacgggcacttcaacggccccctcctcgtcttgcgcttccgctgcttccgcttctggttgttccgtctccgcttcttccgccttttccgcctcctccgcgggcggtgcctcggccgcctcttcgtcgtacacatcgaccgggatttcggccgctgcgctgtcttcttccttttcaggcgcctcattttcttcgccttccttctgttgctgctgaaaggggtaaaacatgcgcaatcaatagacagaacagcacagaacggcacaaaattgtgccgagggaattcgaattcaaattaaaaatgatggctatttctataattcattttgaaatatttattaaattgtcctccttcgccgcatgccataattttttacgcagcatgaatcatttttggttctattcaaattatagcacaaattacaaatgatgtcaattaaattttaattgaatggcagaaagtcacggcacttttttctttaattgtgcctaaatgagactccccccccccttcaaaaaaggacctcaatgtcgtcgatgccttccatcgatgtggtcattgggtcttcgtttgttatgtcgggcacctgtgatcagcaacagagaacaaattggaagcaaattgaaaaaaaggaaaaaatcaattttgacacaaaaaagaaacgggaaacaattgccaaaaataatgcgcagctcagaaaagagaacacttgtcaagatcaggacaaaataaacaaagcttttcgctgatcgaatccctcgagagcgaatcgtcgagaggaaaaacccttttgtgtcgctcttctctcactatgtcccactatctctctttgtgtgatcagtttctctctgcttctttgtcagagagaaccatccgatcactcttgttctctctctcactttctctctcatcctctccctcttcaggttgccttccctctctctctctcgctctctctctctcacacacactttactaagaatctgaacagagcaaagggtatcccacccggggataaagcaaaagaggaaaagccgagaagttgctattaattttgagagaaagggggggagggagagagaagggaatagagaaaacgagaaagggacagagagaaagaaacagagagataatcggagagaaataaattcgagtgaaatgggaggagttcaaaaaatacttgaatttatctaaaaaattttcccttaccaaatcttcagttttgtcctctgccgccgcttccttttcgacactttcattcgctgctgcttctgaatgaatcaatcattgtaattcagcgccctcttcttcccttctgtcactgatctttcctctgatcgcttttgtgtcccttgaagggctggccgtgattgaatttccaatcacggaaatccgtgagccgtgatcacggggctttaaaaaaaaatccgtgacccgtgatacgagatcacggccagccctggtcccttcccttttcccctcccaaaaattatcccagcagagctttgacatggggatgagtagctgatgaggggcacgaaaatggcctttttcgattttaggtacatttctgatttttgtttggtttctctaaagaagccccctcccccactgttgtacaaaggcaactcgtacatttgcttagattaggccttggttttaggcttcggcttaggcttaagctttaggctaggcttaggcttgcttgggcctaggcttaggcttaaggttaggctttattgtaaaatataagttgccttttgtacgagttgtttttttgtacgcgttggcttttgtacaagctgccatttgatcaccccccccccccccctctctcctcctctccctccaccttctccgcctccctctgcctcggcttcaccctcgtccagtttgatgcccttcttcaccagcgtggcctcctcttcctccgccccttcgcctgtgccgtcgtccatcttctgcacctccaattccacttctccctccgcgactccgttagtcagcgccatttgcgagggaataaacaaatgggaagaaagatgagccccaaaaaggaaaaatgatcagaagcagtggggagaggaaagtgatcggaaagacagacaatggcaaaatgagttgggaacaccgaacaatgggcggtgggggaggggggggggatggattagccttgtgatgggataaatgaagggggaggggggggg

SEQ ID NO: 11982 - DNA, 1359 bp, Heterodera glycines
  unsure (1)..(1359): unsure at all n locations
tcatcactaattttcacttattgtcagaccccaattcttaccagtgcttgtttttccggttcccggttaccctaccgggacntgagattttcaaaacccgggacctcggatgaccgggaatttccggcccggtcccgcttcactctagccaaaacttaaataaaaaaatcaaaataaataaagtaaaacaataattagttaaatttggcatgcagattttttcggaatatacattctttaacttttcactaagttaccagttttatctcttgttttaagttttaactaatttttggcccattaaattgactaatgctttggaaaaaccaatcattttttaggtggttttacttgtaaagcgcaatttgctcaccatgatttcgtcgttattaagtgccatttctctcatttatgccttccttccctttcactaaacatttcaggaaaaaaagttaaacgtcatgaagtaaattcagtttttctctattaacagagataaataaatagtacgccaaaatgagagatgtttttttctctgcactctctatttattggcacacatctcgttttttgaaacggtgtgttcactcgagagtcagtcagttgatcgatcactgttgaagggagttcatgttgctgcaccggaatgaagcgatcgccatgtcataccgccgcttttaactttcattgacccgggcgaatttggagtcgggattagggaggctgaaggtccagggcccggttccagttaaaaataaaattaattcattatattggactttattattttgaattggcccagaggggattactcgcaaggtgatctcgattgcttgctaaatccaaaatttttgcggtccaaataaaagcaaatgttggcacaatgaatggatgaattccgtatgttttgtttttattttgagaaaatacatggaataaaaagcaaaatatgtaaacctccaataaatcctgaattcgagaacaaaaaaacaacaacacagaatgatctttttgagaataaatcaaaaaaaaagtcaatcgaataaaaaaacacaaaaataatttgcaaaaattgaaaatttggcccgtcttctgcttttgttcgttcgttggttcgaatgtccattgtcccaccgcccgtttgtccgttcattttttgtgccatcaccgacttttgtcgattttcgttaaatttgtcttttgctcagagaaggcggcgttgtcggggggcagcaattgatgaacggcggtgagctcatcggccgcgacttggctttcagagatgaaaaaggcggagaaagcgaacagcaaaaagacgacaccgccgatgaaagtcactgaaattgggaaaagggtaaa

SEQ ID NO: 11983 - DNA, 2140 bp, Heterodera glycines
tttccatccatgttggggatgaggaaatatataaaaagataaactttgtataagtatttattatcatggaagtcgtcagaataatatcaaaagacttcgtataaacaatattgcaataatttaagttcgttttatttttcagtcaacaacacggccgagagaaattttgatacatcaaagacaacctaaaatacacagcggtgagagccctagcgaaggctggactataaaattgcacaacaaatatacctactgtacgagttatgttttatacgagtcagatatgagtttttcctatggcaaggttgtgaaattcctcccaaaaagtttcttacggaaaataagcagcaaattttaataaaaataaatacttttcaattcatgcaatgaatttcctgaatctataaattgatccactagaaaagtgttagtagaaaataaaaaataattggagcccatattttcgtcataaattgagtcccgaaagttaaatagcatggcaaaacttataaatatttgtcgatttattgcctattttccatccatgtttgggatgaggaaatatataaaaagataaactttgtataagtatttattatcatggaagtcgtcagaataatatcaaaagacttcgtataaacaatattgcaataatttaagttcgttttatttttcagtcaacaacacggccgagagaaattttgatacatcaaagacaacctaaaatacaccgcggtgagagccctagcgaaggctggactataaaattgcacaacaaatatacctactgttcgagttatgttttatacgagtcagatatgagtttttcctatggcaaggttgtgaaattcctcccaaaactttcttacggaaaataagcagcaaattttaataaaaataaatacttttcaattcatgcaatgaatttcctgaatctataaattgatccactagaaaagtgttagtagaaaataaaaaataattggagcccatattttcgtcataaattgagtcccgaaagataaatagcatggcaaaacttgaaaatatttgtcgatttattgcctattttccatccatgtttgggatgaggaaatatataaaaagataaactttgtataagtatttattatcatggaagtcgtcagaataatatcaaaagacttcgtataaacaatattgcaataatttaagttcgttttatttttcagtcaacaacacggccgagagaaattttgatacatcaaagacaacctaaaatacaccgcggtgagagccctagcgaaggctggactataaaattgcacaacaaatatacctactgttcgagttatgttttatacgagtcagatatgagtttttcctatggcaaggttgtgaaattcctcccaaaaactttcttacggaaaataagcagcaaattttaataaaaataaatacttttcaattcatgcaatgaatttcctgaatctataaattgatccactagaaaagcgttagtagaaaataaaaaataattggagcccatattttcgtcataaattgagtcccgaaagataaatagcatggcaaaaattgaaaatatttgtcgatttattgcctattttccatccatgtttggaataaggaaatatataaaaagataaactttgtataagtatttattatcatggaagtcgtcagaataatagcaaaagacttcgtataaacaatattgcaataatttaagttcgttttatttttcagtcaacaacacggccgagagaaattttgatacatcaaagacaacctaaaatacaccgcggtgagagccctagcgaaggctggacaataaaattgcacaacaaatatacctactgttcgagttatgttttatacgagtcagatatgagtttttcctatggcaaggttgtgaaattcctcccaaaaactttcttacggaaaataagcagcaaattttaataaaaataaatacttttcaattcatgcaaagaatttcctgaatctataaattgatccactaggaaagcgtcagtcgaaaataaaaaataattggagcccatattttcgtcataaattgattcccgaaagtaaatagcatggcaaaacttttaaatatttgtcgatttattgcctattt

SEQ ID NO: 11984 - DNA, 2312 bp, Heterodera glycines
  unsure (1)..(2312): unsure at all n locations
ttaatcctaacccatacacnttcttgccaaaagattcacactatcattaaatgtttaccaaatttattcaaaacacaatcagaaatcggtagaaacaatagtgatttttcgaaagatattaacaaattgcatagattttagaccaaaagttattggatttagatttgcgacgagaataatccagatacttgagtaaatggtaaaatgaaattggaaaaatagcaaataatgaagttgtttcccgtaagcctttcactttcgctccatttgctccgatttgcccccactgctgctgctgctcccacgcatgaaccgtttggatggaatgtgtccattcagcgacggacgcgaactgtgggcgtatttccaacaattgttgcagtaataggccaggcaaatcatttccgcacagaaacgcgtcccgcttgtacagccgcacttctcacatggcatgttgctggccaggaatggcttaaattccacctggaggggtaaattatttttgaatatgtttccatcaaaaattgttcattacaaagacctttcgttcgaatgtcccaaaactgagcacaacatcatgcgctgcaatcgcccgtacgtaggtctccttagagtcgaaaacgacgcaagccgcacccttagggtagtaatggagccggtcaagctcgatggcacaatatgcaacaggaccttggttttaatttcggtaacgttccaattacgaatactcaccgattgcttcttggatgccatacgcaagcatcgctaaaatgagttaattcgatgaacaaacaattagcacacaaatgtgacattaaccaccaaccagcagtgcatgtacgcggaatgcctccaacaaatacggagtaacgccggaattttcgccatccgacgatgccaacgtgtgtcgtgtccttcatctcccacactttcacttccaccttaaacgataataaagagatggaaagtgaggaatgaaccggatgctgcgtctgctcaggcccaagcatgtagacgtagaaaaagagacgaccgttggagacgaaggagagacggagcattcggaagacggactcctcctcttcaaacaccacaaaagcataacctaagcaatcccaatatgtatctggtaaccgttgctttgtcatttaccattcggagggcgatcttgctgcgccgtcttcttcggccagtcgatgatactcttcccgaatcgggcaaagttcaattccaaaacatctaaagccgaccaatttgttaatataagaaatgctctgcaaatccccacttactcgtcgtcatattagcaggaataccacccaaaaagactttcaacgagaagttcagcggctgcggttttcttatgcgcgtcgtcccggaattgctcgagaaagattctgaaaaattttatcaattttcattcgagatactaacccgtcgtaaagtcatggccaaaaaagtattggtggttgcgttcgcgagttgcgccagtgttatcgatgttcgaactgatgcccataggaggggcagagagaggagccgcggggacaattgtcgaacgcagcccaaagtcatcggagttcgtactgatgcccacgggaggggcagagagaggagccgcggggagaattgtcgaacgcagcccaaaagcatcggagttagaagccatgcccataggaggggcagaaagagaagcggcagagctgaatgccgaacacagatcggacaatgaatagacagtgttggggaccaacggctgtggtgccaaggcaccagcatttccagaactacgcagaaactgaacgtcttcgttagtgtttatgtgttcaaaaatgtcgaaaagatccatttctatttagtaaattcgctaaaaaaatataattaataatgaatagtcatatttattagagttcgatttggacatgggctcaggctgaaccccaattaataatttgcatagtgtgttagtttaacacaccgtttcagtttttgcctcccagttccaaaaagatttgaatttttgtctcagtggtctatgtgttagtcaccaaaaaacaattcgagtccgttgtgcaacattaatattttttattttttttgtgcataaaattaaaaaatgacgacttttgggaattatttttggagggttttcacaaccaaattgtacaatcggctctagtgcactttatgagtccaatcgacttttatgagtacaatcaattgaaaatactcggtttttatacaataactttgttcatgttcgagctaaacctatctttttggtatcattcgaaagtacaaagtctaacgaa

SEQ ID NO: 11985 - DNA, 3043 bp, Heterodera glycines
ttcataatttagttcaaagttaatacataaatcaacaccatcgatagtattaccggccggtatcgcccacccctgggcgacgaccttttagatagaaccggcgcaatttgttaacagattttgtgcaaaaataatcgaattttgtgatgttgaccaatttttaagatcttaagaagttttatggtctgggcgacagcgataggttacgcagtggaaaaaaatcaaatttgttacaaaaattgctaatttcaaaatgaaaaaacaaaaaaataaaactttagcataaaatgtttaaaaactcaaatttttttaaatttgcaaaattaatttattaaattttattagcacaaatatgttaatgcttaaatcgccggcatggcgtccggcacagctgcttagagaaaagacactgcttgtgtggaaaatttccgtgagccaatgaacgtgagaacgaagaaaaaagcagagagagagagagagaaagaaagaaaataagaatgaaaagaaaattagtatttttggcgtatcttttaagtactgtactttcaaaatcattacagcatcttatttgttagtctaggtcattttcctaaaaactgacaatttcaatttttcttgaaatttttgtttgaatgagtaaaattttgaaaaatttctgtatgaatgaaatttcttgaaatgttctttctttataattaagattctcgaaatgttccaggtagttgcgttttttgacaattttggtgcccaaaaacgtcccaccctcattattacattgtgacttttttgtactattgaataatttaggtaatcgataaataaataaataaaccattgccccatattttttctttcaggtattggaacgcgacatgaatccgcggctcgatggcatgtgtattagtgcatctcgttcagatgccagtgatttcctcccatcatatttttttaaacatatttttgtaaaatgcgatgattccaaatttgttgtttacaaaaaggcatggaatgtatcaattgtgaaacgtcagctagggttttgcccacacttcctcgtcacattcgtttctccttcaagtttcggatgttgatgcggcattggacgttggcgcggcactttgcaacggttttgcaccgcctgatggagagtgtctcggcgagttcgccgcgaaaaaattctgcacttgctcttcattcaactcagttgatgctccaaactttttcgcaagatcctcaattacatcctaaacagtttctcttttttggttaaaaatgtaaatgacataactttttgctctattacgattctctccgttcgttttttgcattcttggagcaacgcccttttggctttttcatattcagccaacaattttggtccatgataacctgactaattaaataattgaggaaatgcgataaaaaaactcgatcaccgtaatgttccatttcggtaggcctggcaacataccattctctacaattttctccatctccttaaaaagaaaaattctcaacctgaatactattattttttacttcgcttattcggttaatgtctgtctcagacccagtgttgttgcttttaagtaattgttcctcagctattttaccactcatgtgaatacaaatccgcttcattaaatcctcaagcgtctcgattttattcaaggtggtggttctgtgccaatccacctgaacttttttttattgaaattaaaagacaaaatattagatcaccactccgccttgcgccgtaaaacgcataccagttactgcccatccaagcgcgtgacaaacggtggcttgcgccgcctcgtgtaaaactgaaaaaacttacaaaatcaaatggaggatcatcaaaataatacaaattaattttttttagataactaaatttcacgtattatttcgatgtctttcgctgtcctggctggccaatgagctggcaacgacggtgatgacatttataaaaaattcaaatgtaaaaacaattcaatgctaaaaagggggattgaggtcggggacggacggtaagagcctgcagatttgaattttggcactcaaaccaggcattagtaagcagattttccacacgattcgagaatcttatctaagaaatttgttgtattttggcaggagatatttgtatgtgtatacacggcgagtcaattttgggctccaagtacaaataagtttattatttacggactgggtcagtttagtctggccggtttagtctggccgttttagtctggccggtttagtcagagggtcggtttagtctggcctgtttagtcagagggtcgttttagtctggcaagccgttttcgcccataattcttacaaatgttttttgtcaattataaataaggaaaaacttaaaatatctatgtttagctacaatataaatgaatatcccaattagaaaataaaaagaaagcgaaaccttcagtttggcaccgcctttttatagcttcaggcaaagtaaaccctaatttttttttcattcaacgggcttttgcttgtttatatccaactgttttccgcttcatcaacacaattcgatatgagaaaagtcaattgatgcagacatcgcacgatgcctcgctggtgaagtccctcctcaaaaaacgcgaaaatatcgtgccgttgatacgaattcttcgactcttacagggttacaataccatcaacaacattaaccctgctcaccaaaatgatcaaaattaccatgccaatgttaatcccgataatatcattaattttctcgttggtatttctcgaaattatgaaatatgcccgtattcatttttcaatgttttgttattttttcgttggtaatgcattgataaatctgttatggtgttaattttaaagaattttcgggaaacaaatcagaattggatcaatgtaggacaaaaacagcttgccagactaaaacgaccctctgactaaaccggccagactaaaccgaccctctgactaaaccggccagactaaaacggccagactaaaacggccagactaaactggccagact

SEQ ID NO: 11986 - DNA, 1828 bp, Heterodera glycines
  unsure (1)..(1828): unsure at all n locations
atccaaattgtgctatcgttcaattcttttactgaacgatttgcgcgtgtcggcagagaaaaacacactcattccggccgactcccaaatattggtcgatgcttcaatcgaatcatccccaaacccaaaaaattcattttgcattgatcgccctgacataagtcttattaagaagggactgtcagtcattaatagtgtctcgcctgcgggccagaaacaaataaaagtggcagtggtcaacccaaccatggaaccaaaatggatttggaaaggaacacatttggcatttgccaatgaattgttatgtgaccgaaatggacttttgaaggaaaatagcacaaaagaaattcttacgttaaattctgaacgaaagaaaatggaaattgacccaacgtttgtagttgacttttctaaggcaatggtcaaagacaaagatttggaaaagctgaaggcattaatcgaagaattttcagatgtttttagcaaattcaggtacgatcttggacttttcacagccgctgagcatcacatcacaaccacaactgaggaaccaataacatctgcgccaagacgaatgccgtacaaatacaaagaggaattgaagaagcacattaatcagcttttagaagcaggagtcatggttgagtctgacaccccatgggtaactccaattgtcattgtacagaagaaggacggtggaattcgtccttgtttagactttcgcaaactcaacgaagttacggtgcccgacaagtaccctctcccacgccttgatagcatcatggaaagggttggaaattgccaattttacagctctcttgacttggccagtggctattttcaaattaaattgagtgaagaaacgtcaagaaaatgtggaattataactgaagacaaagtgtaccaaatgattacgatgccatttgggctgaaaaatgcaactgcagcattttcaagggccatggctatcgttttgtctggattggaggatacttcattggcctacgttgatgatgtgcttattttcacgaaaagcccaaacttttcagaacacctgacggcggtaaggaaagttttggagcgttttcggctttataatctgaaacttagcccgatttggcgtttcgcatttcgctttttggcgcgaaaagcgacttttgcacccctaagaattggattaaattcccataaaatttttcaaaatttttttgcgacaaaattattgggatgccaatgtttgtcatgagaatctccaaatcattggccacaaaagtctcattgtccattataagagaaatttttctgctggtattttttcataatttactttactaattcttcctaaaaaggctgttgttcgtctgtttttgctaaacatccgattttgctggacaataattcggctgacaatttttactacgaaatttcaattggaaataagaaatggtaagagaattatttatttttgaatataaaattaatcataaatattaaaattttatttatttgttattgttatttctttattattanaattttcagttgggtcatcagcatcggattcgtactcaaaaaacagaaagaattgaaaggaagaatgggaaatggcgcttttgcgtatgtaagcaatggcgaactttggataaacggcgaagggaaaggaacaaatgccgaacattgctacggtgttggcgataccgtaggaattggcgttacttctgccactcggcagatcattatcaccaaaaatgggctttcgttttgggttggaaaataaatatataaattaaactaattncttanatactctaattgcctatntttattt

SEQ ID NO: 11987 - DNA, 2436 bp, Heterodera glycines
  unsure (1)..(2436): unsure at all n locations
ctaaaattttgatcactcccatccaccctggaggggtgatctgctcacangatggggaggaggggggtccggcgatgacaacaggcgctaccggggaaaatatttggnggaaatttaattaaatttcaataagttataaaaattcagaaaatttactcttttttaattcatccaatttattattccgtatgtaaaagcaatgtgaagaggaagaaagtaagaacaaaacgaatgtttcttctcctccgtcccctcaaatttgctttatctcaccaaaatacaatatttttgtactttgcttttcatttttttcaataaatttgaatttattaacggtggcttactgtatgtttctgtgtgtactattttgaaaatgcttcgccgagttctcatatctcaataaaactaaattattaattatttttaattgagtatttcacaaaaaattgttattgctcaatgttccgaaaacctgtgtttaaaaatctagtaaataaacagaattaaaaaaaaaaaaaaaatttagtgattgaatttttatgttttcaaatctattcttcattaattcgtcttggatttcgattatgttagaaaattgctagagcagacccaactcccctgggaatactaaaattttaatcactcccgatcaccctggaggggtggtttgattgatcactgtggtgcaattgactttttaatcagcatcgaaagttgtactagtatgaattgtgcaaattttatgaagtgcacaaaaaaaatatgtcctaaaaaatcagtacttataattttaaaacagcaaattaggccaattttttgggcaaaatttcattatttttttcaaaactttccaatttgtctgaaatcccgtaagccttttaaatattttttatatgagatttccgccaaaaaatcctttagtctttttttgggggggggggggctttccgcgcacgtttgggctgcgcggggtgccggacaaaccgttcttcccctaccatcacatccacgcgcgcaacctggatgttgagctgccggccggcacgctgccaccacctgctgcctacgacccggacaggatgcgccccgagcaacgcgagcggttcatggagtggtacgcgcacgagctgcgccggcccgggcgccagccctttttgctccgccgcgagctgctccgctactgttggaatggtaggggcgggggggggggggggggggtgagcacaacaaacacatacggctatacccatttatgcatttagatgtgaaaattttgcgcaccgcctgcctgcgcttccgcgagctggtgggggagtgtgcggacggcatggaaccctttctggccgcaacaacaattgccagcctggccatggctgtgttccgccagcaccacctccgccccaacacgatggtgcacacgccggagggcggattcctgcgcggacgccgagcatcggtggagtctcggcgcttcttcacgctgctggccgccgtacggcccgacctgggcccgcttcgcactgcccgctggtccatcggcgaagctgttgtgggggacagcgggcgctcctaccaccgccgccgccgcgacaacaacagcaccaacagctgtgccggcgccgacgatgacggattccggctcgactgcgtggcctaccgtcatccaccactgcgaccgttgtgcatcgagttcaacggctgctacatgcacggtgggacacctacacacacacacacttacaataatgttttaatttctgagctcaattaaggttgtcgggagtgctaccccgaccggcacatgctgttggcggggggacgcagcgcggagttgctgtgggcgcgcacccagcaacgggcctgggagctcgccgagctgcacgggatggaggtgctgtcggtgtgggagtgccagttccggcgcactctgcgcaccaacacccgcctccgaaagctgtacaaggagaggtgcgtggatgtgccgggcccgctcgacttgcgcaagcatgctctgtttggcggccgtgtggagcccttttggctgttgcacaaatgcgctcccgacgaagagattgtgtacattgacattgtatgtttttttgaatgacattattttcatctgaatttatcaaaatgtttgtctctccaaggtgtctctgtacccgtactgcatgaaggcgcgccccttccccatcggcatacacgtgtggaccggagagcagctgtggcaggcgggcgcccatgcgtttgaaggtatttgtagctgctgctgctgctgctgctttggtccatattggaaaacagcattttcagcttctgctccacctccagcagggctttgtcctcctactgctctgccatggcgccgcccggaggacaacccgttccgcggcttactgttctgccgcgtgctgccgccgacagcggaggagctgg

SEQ ID NO: 11988 - DNA, 3030 bp, Heterodera glycines
aatacgaaaaaacctggattttcctgtacaaaattttagaatttattatttcaagtgatcgatgttttttcaatttttcaaaaatgatcaaattatttaaatagacataattattgtaaattagatattttaagatgttcctaagcaataattgattttttaaacctttgtttgattttaaaagaagttccaaaaattaatatattttaaaaaatattaaacggtcaaaatcatcgtataaaacttaaaataaacattttattttttcaagtatttatttatattaagtccgtgtaattattccataaaaacacaaattttcagaatacgtcaatataaaatggaatttgtattatttttaaacaaaaaccttaaaaattaaatattttattttcatttgagtaaaggaatgctatcgagcaacattattaaaagttgccctttgacttaaaagaaaaatttttttattgagtgatcaccatttgactatactggtacataactcggacttattggtcctagttatttgttttaaattttaaattctaatgaagaaaaattctaatgttggctcttttttatttgactaaaaattgtttatattaaaaaaaaatatattttattctattcatttaatgaaatcaaatagatgtgataattatcatcaatacatattatttggaaaattctcatttttattgctcaaattttctttgtttttaaattaaatacattttatttattccagcagctaaaattgtgtttatattagagctgatgtggctgtcaagtaatatttattttttcatttaaattaatatgaaaagacaattttattatttcttttttttacaaaactattgttattttctttcatttttcatataatctttttatatatatatctagtgaaaagatattttttctatatattgaaatgacatttttttaaataaagccaaaattatataacatttatttcaatgcccttttaatgaaaatttcaaaactaattagctaattctttttgcctgcaattatttttattttatttagatataattttcacttcagcagctatttaccatttcttatcatgatggtatatttttttattttgaactccttgatacgatattcgggtactcttcgttttgttctaagccatatttaaagtttgattacaaaatatttataatttattaaaattttaaagttattaattaaattaagagaggtttttgtttgactcggtgtgaaaaacttaagctgagagcttacatcatcgcccaattgtatgtcgtcctccatatgctcttcaatcttgtccagcataagttccggacattcaagcaccgattcggcatctctaagctccgactgaatttgctccccaaattccccaaggacacacggcggctaaataattataaaaagttttgaagtaatttttgtcatgcttatacagaaaaaaaattgctaccactataaaaaacaattacaatgttgtcctcgccaatgtatgcaatgccggggcccagccccgcgtccaccaaacatccatcccacttaactaggtagaagaaatagtcgaatttgcaaagttgataaataatcaatggataaaatagttgttaaatattagttactttccaggattttttggataatcccgtcctacttatccccataaaattcctcatatagtattgtgttggtattttttaaattatttatccactcaagcaagtgatttccgcgacagctggtagatttacgattttgtttggcgatttttttttgtatgttcgatttggggacagattttttggaaggagttttaaagggggcgatttgcggtcgttttgatttcgcaacggactagaaaaacatgaaattaaattaaaagcaaaaagcgcagtgtaggtatatatttttaaagaaattaatttcctaatggcgtattttcagaaaattttaggccgatttttaaggggtgtatcttaagaagattgggcagaaaaggcaaaatatttactaacattgacaaaactttaaaaacttaaaaaatttaatcgattactcagacctatcattaactcaaaacattcatcaagaaaatttaaagtatacaaatctatatttttctaatctatttaacagtctcgcgggcagccggcgccaattgaggcgcctagccttaatgtgcgccaatcaaggcgcacaaggctatataactggccgcgagattttgatatagaaattgccataaccatttattaacttaattaaaaatattaatcacatgcagtcggcgccaacgaaggcctctagccttagcgcgcgccaattgaggcgcgcaaggctatataaactgcctgcgaaattttggaggctaataaatggttatggtaattaaaattttaaaaaacaataaaaaagtgaatatgttgagtcatagatttttaaaaaagtaaaataatagggaaaaggaaactcaaattttaagaaaaaacatttttttcagataacatagcgaataggtaggcaatcaccaaaaaggcaaaaaaaaaatggggaatatgagtttaattgggttcgtaaaatatggacaaaaattgcgagatggcatgaaatttccgttaataaaaattaaattatcgaccttctagtgattttaatttatttaaaaaatgattttaaataaggattattttataaaaactgaaaacgaatggtttttaggaatacataaggaaaaaatatatgtatagagtaatgatgcaattgacagaagcatcccttggttgcgcagtggggttgtgagtgtgaagcaaaagtgaacagcagaaaaaagacggaacgattggcggtgattgtcaaattggagggagggggggggggggggttggctgtcaattactgcgcgattcgtttggaagggacagagacgtgcagtaattgaacagagagagcattgattggtaaattcccgcgaaggaaataaacatttttttggttgtaaggaat

SEQ ID NO: 11989 - DNA, 1430 bp, Heterodera glycines
ttgcactataaaaaacaaaataaatttaattaaaataatcaactaaaatcattagtaacaaattcacaaaggagcaataaaaaaattgattcaataaagaagtgttaaaaaataccataaaacacgtaaaaaatatatattcataaagtcttaatggctgcctgcaaatatatgatagattatagtatatatgtaaatttgaactcatacaaatactttaacaaaatttataatatattataatacgaaaattggcaattaaaatgttttaagaatccactgaaaatcgacgacacatctacacgaaaactagtgatatttttttgaatcaaagctgtatgaattaaattaattttttttgaatcataaataaatttagtcttaaatcaaccgaatatcgaaaatacacatattaaatgataaaaaaaaattatataatcaaaaagaaaaatattactttaaatatgattgcaaaaacttttgcattcaatgctaaagtatttgaaacttttataaataaaaatcaaaacatgctgagtgaagcataatagtatttcatttgcacttaatattaaagccacattgaatttatgtaaagaaaatgaatttcttatgtaatacaaaatgttcaataataatttatttatttatattgattatgtttaattgaaacatttaccaatttttaaaacgaagttttatattaaatacaataacttactaaagcaaattgaccgaaataaattttataaagggtgcaaaagccaataatataaaccgttaaatgacattagcaatatattaaaggttgaaaaaattttaaaaaatgcttaatactatataagtactaaaagtgataaaatattgtattattttcactatgcaaacagcaagactgattaaatcagtataagattattgcattttataataaaattaaaaaaagagatgtaccgttcaaaataagagattcataatagaaagtttatgaccaatctaaaaaagatgactgatgataattttaatctggaatttatatgcaagaactataagaaaaatgtttaattacacaaaaaattagaagaaaaaattaaaaacaaatattagttttcattaaagtgtagaaattaagtactgcgtaaaaataataattttaaatttaaaaggaaagttattacgatttctttgagatatatgtatgaataaaatataaacttaatcaatccgattattatttgagatagacaaaaaattctttaactaaataaaaatgaaaattaatttcattacatattcgcaacacataaattgaaaataaaaagattatatcatttaattcatatttattactaaatgtcagaacatgcatgaaaaaaaaattgaaaaatatgtgaaacgagagaatgaaacacttttttgttagaatgaaa

SEQ ID NO: 11990 - DNA, 3194 bp, Heterodera glycines
  unsure (1)..(3194): unsure at all n locations
tgcttttcgatgaccaaggcagaatttacactgaggataggcagaaatgcatgctttttggtaaaatattcaaacaaaatnttatgcaaagaaattataccatgaattacgcaattaataacaaaatagatagcctaatagatatcgaattaaatgctgccttggtctggaaagcacttaggaagttaccaaacagaaactcgacatctccagacgggttaccttatatattgattaagcaatgcgcagatttattggcacctatcataagtgaactctttcgaataatcttagattatggggaaatcccaaacttatggcgtacatcttttatcattccaatttataaaaaggagacaaatcgaatccaaataattaccgtcccatctctctgacatgtactttatgtagggtttttgaacgactattagcatggaacattgttaaacatcttgagaaaaataaaattttaactgatgaacaatttgggttttaaatccaggtcgaccaccacacaattgttggtctccctggattatttttataaatcaatagaaaatggacaaaatattgatataatttttatagattttgaaaaagcatttgattcggtgccaataaatttgttaattgttaaacttcagaacataggtatctgtggaaaaattttgaagtttctccaaaattttcttatatgcaggtcatatcaagttaaaattggagaaaacttttccgaaagctttagaacttattcgggggttccacagggcagtgttcttgggcctcttcttttcttggtttttataaatgaccttactaattatataccagctgcagtcggaattaaattgtatgccgatgatgttaaactttacatttcgcatgataatgacacgaaaagggatttactctctttagcgttggctaacttagccaagtggtctaaagacaatggcatagccattgcgcatgagaaatgcgcagcattatatttaggaaaaaataattctagacatgagtataaaattggcgagaaagtaattttaagcgtagattgtgtccgtgatctgggggttttcgttgatcaaaagctctcatttaacaatcatatttcaaaaattttaaaggcggcctattacaaggcatatcaaattttaaaaatattaaaaacaaggaatatcaataccttaatcctagcatataaaagctatataaggcctcacctcgaatacgcaagcgaagtttggaatatctcctcaaaagaacagagtaaaagaatggaaacggttcaaaaatttttcacaagaatcgtatacaaaaaatgtggcctcaaggctgcatcatatgaaaaaagacttgagatttgcaaattggagaaattaagtaatcgaaggtcgctcactgatatgaatatgactttcaaaataattagaggcttaactcatttagacccaaaaaaatatttcgaattttcaacaagatcgcaacgaaaaacatttaggattcaaaataaaagattcagtaataaatctcggaataacttttttattcgtacaattaatccgtggaattgcttacccaaaacagctatggaaatcggaactttagctaaatttaaaaattttgtgaaagaattttattcagaaaataagtcctgagtggtaattcatccctttttattttttattttatgtatttttactgtattgaccatatcatatttttctaattgtattcattactttgttttccgctataagtgcaactatgttgccttgcggtttgttcaaataaataaaaaaaaattgccaataaatcaacaaaaagtttttgaatagactaatccctttagtgaagtttcaatagcaaatgcacattaaaaagaatggtaagggttaaaattggtgtagatagaatttgactagtcgagatctttgaaaatgcatgaaatttatggggaaacgaatgaagaacttaaatttacgaaaatattgggtgaaatttcagtagaaaattagtagatttgtcttttttctaaaattgaaaaatccactagtaagcttacttgcaaatcaatttgatgggttcatgatttgaaatttaaaattttcgtttccatataatttttttttggtcggagatggaatgcttttatctcttttttattttatttttttaaataatcgtctaattaatttattatttttgacaccgatttgaattgtataattaaaattaaatatttttcatgtttggcacatattttagccttttttgagttttagcacatattttggggatttttggcgcatatatatgtacagatttggcgttttttagcatccctgctaattagataatttttatggcattttgtgcctttttcaagaaaataaccattttaaaaatttatttacatatttttgtacatatttttggcagccctactaatatgaatgatgctttttggcaaaagatcagtccgcggaagagtgtgtccaagtgtggcacccgtgcgaccgactggtggaacgacattcagtgtgaccgtgccaacctcgccggcgttgtgtgccaaaagaatgccgtctaaagttttcagcagaaaaacagaagaaatcactaaaatgattatacacaaattttttgatcggctgaattttgagtttaaaatgaattcgccagaagaaagtgccgaacaaatgagtgaatgaaagactttggttttcttatttctaagtaatatgaaaaaaattggacaaaatcttccttattttagctttaaatatttattgtctgccattgtaatatttataaatttttctttaattaaaataaattttagaacaaaatttaagaatagtttatgggcacaaaattatgctctaaatccttttagttaattcaagaaactttcaaattaattgacggacaaataatcaaaatgaactccaaaatgatctcattgactcattttcattgtttgtgtgagccgggcaatccgggcatagaaatcacactgtccgtgccaggcacatttcgttgggagtgatctccttaatagatcgcataattaatgaattattgtctcttattagttttacccttgggggcgtcaaatggcactttggctatgccaatgccaaactcggcacatttcgagtcaatttcactgatttgctgatcggactggg

SEQ ID NO: 11991 - DNA, 1365 bp, Heterodera glycines
tcggcttcgtccgtgccatgttcgtcattgccgcctctgcttcttcccatgccagcaacaacagcgaatggcaggcattgagtgcccagtttggtcagcaaatcagtgaaattgactcgaaatgtgccgagtttggcattggcattgccaaagtgccatttgacggccccaagggtaaaaaaaaattagagaataattcattaattatgcgatctcttaaggtgatcactcctaacgaaatgtgcctggcacggacagtgtgatttctatgcccggattgaccggctcacacaaacaatgaaaatgagtcaatgagataattttggagttcattttgttatttgtccgtcaattagttgttggatttgtaatttagcaaaaataaataattattaaaccgcttaattggaatacattttgcatagacttatttaattgaaaatacgattattaaatcattggcatttatttgccggcattttctgcttgcaaattcatttatcgcccactctttccaacttcgttcgccaacgaattgaacataatttgttggctaagcccaacaaattaaattggaaaataaaatggctaatttcgaagaatggcattgttttgtcggcattatttgtaaagcaaaaggaaatgagtgggcgaaataatttttggcccaaattcaattgcaaaaacggaaatgcgtgggttttgcaaaggtataaaagggcaagaaattttaatatttcgacaattatgcaaataaaattattttgccattcctttgattttccgccgctaaattcaccaaatttccaaaatttaaaaatgcttttctccttcggcagtttctccagcgaagaagcggaggccatcgttgtcggagtgttccctccgctcagataatccgagaggaaattcaactcaaaatggaagtgtttgtgctgcttataacgaaagaagaagcggagagatggcaaagcaaagcaaagaaagacgaagaaaatgacgaactttcaaaagaatttgatttgttttccaaatgttttttttataaatttgattttttggtttgagttaaaaacaaatttatttctatgcattaaaattaattccgttatcagaaaatgtgcgagaattgttgggcaacaaagaagtaataaacaataaccacaactgtgtggcagcgtttgcattccgaggccccaaaaatttttgggaatcagattccaaggctcaaaaattttttggaaatcggaattccatgccgtccctgctgtgtggccattacattcgggttttgtttcgaaaattattatttatttttacttttcaatggtagcaagcgcgtcaggatcagtcagctggggacaa

SEQ ID NO: 11992 - DNA, 2166 bp, Heterodera glycines
ttaaaaagatcataaaatccacctaaaatattcaaaattagatcgaacatagcataaaatgaagtctcggcggtgccgataggcgttggcattaaatacttcttgaaatacaaacacttattcagaaaatttttcaagtttgtcgctttttactgaaaaatatttcatttcgggagcggtgggaattttccccttctggctacggacatacgtatgcaggggtaacagaacaaaatgacgctaggacaaaatgacgccgctagaaattaaaaaaaaatttcaaaataattttttcaaggaaaaatatgaaaatttcaaaaataattgatgattgaaaaattttcatgtatttaaatgtcgttaaatttttggatgctcataaaaaaaagatatgaaaaataaaattaaaaaataatttgttaattaagacatttttaatgataaatttttttaagcacgagtaattattttttgtatttcttattgaaaataacgatttaattgggtactcaattaataaataatttatttggcaattaccgcggttagcactccctgcttgagcaatggcacaaagttggacagcaaatccttggtgctgaccaaatttcgcaacactgcaatgccattcaaatacgcctcgtgggctcgccatgagccggtggaccctttcatcaaattgttgcaactgaccaaaatgcgatccaatttagcaaatatcaaatgctaaaaaggggaaaataattaataaaatggaaaaaatatttgaaagaaaagaatttcaattgtaataaatggcaaaaaatttaatttctctcaaaaataaaaattaaaaaaaaatttaatataaattttaaacgaaaagtattgcttaatatcgtaaaataaaatattaaaaaaatttaaaagccaaaattgagatatgattttaatgatttttaaattttaccgtccgcttttgtgttgcgctggcactgatttccgcgtataacattggcaaaatgcgatgcaaattggcagtcaattgttgcacaatgtccgcatttccactggacaaaaggtccacaaatgggcccaacaacaatggcacagatgccgaaattgacgaagagtttttggcattttttgttcccattggcgcaattttgcgttgtgcaacaatttcgtgaaagcctgaggcaattatgctgcgcacttcgtcgtccgagtcgcggcaaaactgctccaaaatgggcaacagtcgcccgctgaacacgtccgcctcctcgccaaacaccgcgacgaaacactgtaaaagtggtacggtataatagtataaatcttacaataattttatgacaggaataagaattagaagcagttcgtacaattaaaaaaaacttagcctaggaaatctaagtacggtagaatctgccaatttgtacgaaacaccaagctttaattaagcaactgcattgtttttaaccaaattaactgttttttaaattaacttctaaaatattatattatcaaaccggaaaattgtaggcacacattcttcggcatgccacgcacaattgctgaagtttttgttgttgcgcattgcccgcaactgctggcggtgtgccattttcaactgatgctgtaggaaagagtcggtataattcaattttttatttaaaaaatgggtgcgtcaatcgcccctcgcccccgaaaaaaaaatctcaaacaaaaattatcaaagaaaaaattcctagaaaataaattattttgggatttttaatgaatttgttaagaaaatttgatcatttaagaaattcgccggcgactcatccccccagaacttttacacccccctccccttcggtgcaaagggtcccccattttgaggccctttccgtgcgaaggggcggggggggggggcgtcgggtacaccccaaaacgtcgccgcaaacaaaagaaaattttttcaaaatttcaagaaaattcaaagtattttagcttttttgagtataaaactaaatttgctgaatttccaggaaaaatgaaaaactttaaaaaaaatttgttcgaaccgagctaggaactaaaggttacccgacatttgcggacgacgacatttgctgataaccgacatttgcggacgacgtttttaatcatcatccgcaaatgtcggttttaaaaatc

SEQ ID NO: 11993 - DNA, 4033 bp, Heterodera glycines
  unsure (1)..(4033): unsure at all n locations
cccccccccccctaaatacgggcctgtttctacctttgctaaagtgtggaagacattgggccatggagctcagaatggcctcccgtacggatgggtcttcgtccttgaacagttggatgatgaaaggcaatggcaaagtgcaacaatcggtggaattgctaaaaatttgaaactaacaacggattggtcactgagaaatttattctgatacgaccgttaataaatttttaatatagtttttgcagcactgacttcaaaaatgctttgaattggaataattggttgtttaacgttagaaatttttttttgtcgtcacaaaaaaatttcaatagcctacggtagcccagccgaatttgaaaaaaatttactatgtaagaaaattgaaggaaatagttgtttttctgaaaattgagcttttaagtaacatctaggtctccaaaaaacttcaaaacgatttttttaaatattttcttgtttaaaaaacaaattttgcggcaacgctatgtcccgaaaaaattttgggtgcgggggggggggggtgtacggcggtgcggcaggcatcgcggagaaaaaaaattgaaattttgcgtgcaatatattacctaatagatttgtcaaaaagaaacagaatttaaattttatccggttttttttcataattttgctgcttttccccttagtcgccactccctttccttcccgcgaatttcttaaattcttttacattcaatttttaaatttaaattttttacggctaatattgattatgtattcgttagatgctctttccactaactcacatttcattggccaccagcagtatgaccatgtttccggaacccgcttgtgcaacggctaatggaaccacctaaaattaagattgtaataaattaggtataagcgaaaaattttatggcacaaagcttgagaatttctttggcattatgccttcggggacaaaatctcgccgcagaaatttcaaaaaaaagaaaaatttaaacttagaaatttttcaagaaaaaaaattcttagaaaatttttcataagagaattaaaaggagaaaaaatgtttgaacattttattataaattactggtttttttgaaaaattttcaaagaaaaacttaacaaataatttttttttgaaattgtaaagtggatttccgatcacttccccgtttggtctctggtctcttctccgctaaatccttttccgagatttcccgagcattttatcatttcatttcatcatttctccatcctttcccatttcgatcagttccatccttccccatttcgatccgtcatttgtattttccattcatttcacatttcacaagcaaaggtttaattacccaagtttgagatggaacaataaaggatttctggataatatttggactacagcgatcctgggaagggccccccacgtttcactggtagcaccggatggttccaaactcaaagtttggaacagctcataaggatgggtaagtttgaaccattgcgcaattttttttaaatttggtgaaatcccgttagggagtcagaaaagacggccgtctataaataaaaagagaaaatttgagaaggaatacctctaaaagagaagagacgtctataaataaaaagagaaaatttgagaaggaatacctctaaaaaaagagaagagacgtctataaacaaattagaagcgctagtgatcagggatgaaaagcccaagtgatcagaaaatgaaaagcccaagtgatcagaaaatgaaaagcacaagtgatcagaaaatgaaaagcacaagtgatcagaaattatgagccctacagatcacaaattaatgagacaaactgatcagaaattgaatgtaagggcgaaacgggctaaaatacagatgtatgtggcgaatattagtgccaaaaggaaaccgccagaacttacttacagtaagaaagaaatacagtaattttatggggactgaattaactaaacagagcagaaaaatttgaatttgggcgccctcagcggagaattagcatttttgctcataataacgatttaatctccacagctccaacagacgcgacattttgccccccccctttcccatttttccccattttctcctttgaattgtgttgatactgccctccctctgtttatgcagaatttgcaattggatgatgggcgttattcgttggccattgaacactcatcagagtgcaaagaaacaaatcttttcatttgttgacattaatattttttttcattttgttttcatctctaagaacaatttagtgaaggacaaatttatttacaaatttatttttgagtttcgaatcacttctccgagttcgaaaaggtattaatacttaattaatgatttaaataagtttatgtttggcgttaagttaaaatttatatagctattttttctcctcaaaaatcgccgaaatcgaccattaaatttgtctcttttctctatttttttaattgtttttgttcgttgtgcgctatttttatataaaagtttattttgccattttcctatgagatttaacaaatttataagcgctttgctggtggcgtagaagcattttcggcaactgtgaactttgcggtgctaaaccaaggccacctgccacctaacactaacaaatatgtgaacccccccaacaaacagccaaggggcggccgagacagggttcagtggtcgttactgtggacatgccaccattagaaatgaattacatataagtaaaataggttaaatggcaaaaataaaccaaaaaaaagaaataaaagcaattagacagacaacgaataaaataattataaaaatgaagaaaaacacagattttttttttttttttttggtcgttttcgagagtgagaaatagggcgtcggaaatttttttgttttcgtttttgtgtttgttttcgtatttggtttttttttctctcttcattatcggcagtaattatatggctgtaagtttttcgtaagtttggcattcgacaaaaaaaaacgaagggtcaaaatcgattcatttctaattgattcccattcccatctcagtgccgttgaccaacaaaaatagaggaaatgaggcgaaatgtggacaatgacagtggtgcaaacaatggcgcgaacatcagcagcaacccgaaaattgcccgggatgcggaaattgctcatgttgtggacactggaaatggcgcaaatgacgcgtttggcgacggaatggacattgggcactgcccaaactgctcgtggcattgtaatgtgtgcagtaagtgaatttttctgttttgcattcaatttcgttcaaacatttcttttaagtctgtcattaccgcctaatttatttaatttactatcaaaaaccacaaaacggtcaaatttttctctatttttcctgttatcaatttaatcaatgtttttgggctgatattccactaattaattcactttactaacatttttttcttctcctctattttttcgtcaaaaaaacattgccgccaaaagttcaattctctatcgaaactggcgggcggaagtttttccgcgatttgattttctggacccgtagaaaaagactgtaagggttaaccgaccgttacccgcattaatcaagattgagaataattagtgacttttggactacatatcaaaatccgtttctggggaaaggcgcgcctgtttcactaattccgtgttaattaatttgaaaataaatgcgagacaaaaggttttgaaaacagttagagatgagttaagcccattttgcaaatgtgacaatttaattgtataaaatcaagaatttagaacccagaaaatgcattttctgtccaaaattccgttgttaaatttgttgttaaatgtccagttttatagtcctttgaccacaccaaaaccgaaagcacagtacgacacaaaattcaaaattccttttttagttctgatgggcctcatttgtgtgatcatttgccagtagatcanaaggcatgngaatggaaacatggcacaggaaacgaa

SEQ ID NO: 11994 - DNA, 3661 bp, Heterodera glycines
  unsure (1)..(3661): unsure at all n locations
cggcgatgtgacgagggaaataattgtgattgattctatgagagacggagacgaagaggcgaagtctaatcactaatcatcaaccaaagtgaggacgggaaagggggagacaacaaaagtgagggcgaaaggggccaaaaaacggaagagagaggacacgtgatttgtgatttgaggggagtgcacccatcccatcgcggaacgacgacgtctttcaatgggcaaatgtttaattgttgtgtctatttattatgtgattgcgatcacaataacgctgcgggcattcctttctccgtcacactccaattgttcaattattgtccaatttcctccccttttgctcacgtgtccctccctctttcgcccctctcaaaattttcaaattttattttattttctttaatttgattattttttttttgattgtctacgtgtttggtggatttatctggttttgatcatccgaattttttagtttccgccggccgtcgcccattttcactcatttccctcctcctcttttgcgggttgtcctcctctttctcccttttctgctcctttttctcttttttctgttcctctttcccttctcccccctttttctgctgctgctctctccgtttcagttcatctctcatccacattttgcctcgttttgtccgtgcctttggcgaatacgggtcgaatggttgccaatggtcgcatttgcgttgtccgagacttcaccgtcccatttccgatcagttcgactcgctttaaaactttgctctttctgttgctgatcacttttttcctctttgcggctgaatttgcctttgtttctctgcccttttgctctgtctctctgccactctctcgtttacctgcgttcatttgccattctctgcctcttttccgtctccaattgttcctgcagtgtttgcactgtcttcttcagtctctctcctctgtttttctcttcctccaactttctttccattaaatgcctttttaatttgaattttgccctttcttttctcactttgttcccatttgtcttttgtgcttttcgtctcccaatgcttctctttccgtttccaatgctttttctaattcccttttttcgctttccaatttttccattaaaatttcttcgggaatttttctgaaggaattcgcacggtcaaattgacaaagaagtgaagggtttcgttttcggatggccaattcgatgtctgaaatttgcaaaacggttttattgtaaaagggcaattaaaattaataattaatttgtgtaattttaaactgaattcaccggcaatccaaagctgtcgctgcaattggtcaaagtgcgcaaattcgaaaatgccaccgaaagttaccaaatgccacccgaacaatcccttctcatgaccctcctcactttcttcatttgtgtactgtatttattatgtacagtatgcattttttgttttccattttttacctttacaaatgcgtctctttgaaatttcactgtgattttctccgtcgatttgctcggattttcttgacattttttttggccaattgcctgaggccacaaatgcaattgtcctggcaccaaaacacacctcaacaagagcagcaaaaaagtccaaaattattctccttctgtcatttacccaccaaaatgtgtgccatttgccttttccccccaacggatgacaaaatgccgcaaaagttttccgctttttttgctgccattttaataatttgtcggtgggcggacttttcgaattttttggccatgaggcgatttgacgggtgaacaaaaagccctgttttgtgaacagcagctggtcaaattgaaaacaaacaataaagtacggcacctttctgatcagctgaagaacgtaacggccaaacaatcggtcgacgatcgattcgaactgacgccggaggggcaaaaacgcacaaatactccgaatgaacagacggaaggtgacgaagtcttcttcatcggcattttgaactgctccaactccgtctgctgattggtctccaattccgagctgagcatcctcttccgaatgaagcgaagggaaaggacgggacggaaaaatctgccaaaaatgggacacaaaaaaggacagacagaacggaaacgaagcgaacgaactctttggcattacatttggtctcggatttggcacatttggcatagaatgaattgggactgagtgcgacgaatgaaacggaggagacgagccccggggcaatgccaaaacagttggttgccagcaaagagaaggaaaacactgagagaagcataggaaaagcaatcgaattaaaaggctatcgaattgaaaaacaaatttaaggggttgagaaattaccgaaaaagtcgctgaaaatggacggaagagacgagcgaatcgacctcaatttcggtcggtgatgcttttggtgactcattcagcgaattttcatagcatttggcggccattctttcggccaaattcaaaagcgaatcaaaagactgatcaacaactcaaatcaaaagccaaagccaaccaaatcactgacccaaaaatgaggcgaattggcagctgatgacagctgctgctgttttgggttgggcacctccaaaatccaaaagaagaagcgatggcgaaaagtgaattaattaatcagtgtcaaaagaagcgatggcattaaaatggccatcgaattgagtaaattaaaatggcagtcaaagcattgctaaccgatgcgtttctcatttcaaaatataaactaattttcaaaaattgaaagtgcttttcctccgccgttggcttttcccatcagttttgtttaataggcggcggtgaatttgagggatttcctcccgtcgtcgtcgagactttcgtcccgcgctcgccccccccccccacacgcgcggggctatcggaagaagcgatctttgatttcccaaatgaatttaatgactcaaaaaatgaaaaatgaacttttatgggaaaattatacaattaatttaaaaaggaatattattaaatatatttttatttgttaaaatttgcacattttacgtgcgttttttccattaatgggaagggaaacaccgaagtaaataaacagcggcagaaatgtttggtaacaattaaataatcattcaatggatgcaaagaacaagaagaaagagaggaaaatgggccaattgatttgggaaaaagaaaaacccgaaaaatggggggggggagagaaatagtaaagaaaagtcattttgatcaaccaccagcttttatcgccttgcgctttgtattcaaacagtgcattgctttaccctcctactcctggtgatcagtcactctttttttgttctgatcagtcctccctctcccctcctcctcctcttctctcccctctttcctttctcattctgatcagttcctccttttgtgctttgatcactcccccctcccctctcttcctcttctcttcttccttttcttcacttttccttcttccnctgaatttctttctcacattttcttccataaaatattcaccaacctctacttcacccccctcatcttcatcatcatccncttttaaagggctaatccatcttcactttttctgccgtttctcccagtgagaatttcttctcttccgcgcccctttatccgctcctcca

SEQ ID NO: 11995 - DNA, 1187 bp, Heterodera glycines
tgttttgtgaacagcagctggtcaaattgaaaacaaacaataaagtacggcacctttctgatcagctgaagaacgtaacggccaaacaatcggtcgacgatcgattcgaactgacgccggaggggcaaaaacgcacaaatactccgaatgaacagacgaaaggtgacgaagtcttcttcatcggcattttgaactgctccaactccgtctgctgattggtctccaattccgagctgagcatcctcttccgaatgaagcgaagggaaaggacgggacggaaaaatctgccaaaaatgggacacaaaaaaggacagacagaacggaaacgaagcgaacgaactctttggcattacatttggtctcggatttggcacatttggcatagaatgaattgggactgagtgcgacgaatgaaacggaggagacgagccccggggcaatgccaaaacagttggttgccagcaaagagaaggaaaacactgagagaagcataggaaaagcaatcgaattaaaaggctatcgaattgaaaaacaaatttaaggggttgagaaattaccgaaaaagtcgctgaaaatggacggaagagacgagcgaatcgacctcaatttcggtcggcgatgcttttggtgactcattcagcgaattttcatagcatttggcggccattctttcggccaaattcaaaagcgaatcaaaagactgatcaacaactcaaatcaaaagccaaagccaaccaaatcactgacccaaaaatgaggcgaattggcagctgatgacagctgctgctgttttgggttgggcacctccaaaatccaaaagaagaagcgatggcgaaaagtcaattaattaatcagtgtcaaaagaagcgatggcattaaaatggccatcgaattgagtaaattaaaatggcagtcaaagcattgctaaccgatgcgtttttcatttcaaaatataaactaattttcaaaaattgaaagtgcttttcctccgccgttggcttttcccatcagttttgtttaataggcggcggtgaatttgagggatttcctcccgtcgtcgtcgagactttcgtcccgcgttcgccccccccccccccacccccacacgcgcggggctatcggaagaagcgatctttgatttcccaaaatgaatttaatgactcaaaaaatgaaaaatgaacttttat

SEQ ID NO: 11996 - DNA, 2807 bp, Heterodera glycines
ccccccccccctctcaatgggccccacaataacaacagtttttacacccctcccctataaaattgtctttgtctttggccccacttaaccataccactgctggaggaggaggagaaaaagtgccacaggggctgctggacaaaatcgggcagcctaaactcccttcccttccctccccccctcccgcccagtcaaagtgccaatgtcaacaatggcacacaatatgtgtgccccgtttaagagatgttgttattcatttgttgttgtacgtacattttacataaagcttccctgagcagaaacaatttacacccacctgttctaggacaaattgtaaaaaaacaaacaaaaaagcaaatccttaatccacaaggattatgcaaggtctctgcctcattttggcaatactttttattaaccttgaattgggcttttgctaaaacacccaaaaagggatgaggtccggattgggtttggatttgtatccgagaattattttcgaaatctaaatttaatatatcggatttaaaaagcaaaaattttcaccacccccccctttttatgtacctaaaatatatatttgtaaatgcttatttttttattttttaaataccaaaatgtctcgtctcactcgcggttatgtttttctaaagtcattttcggcacagtttcccaccacatcatgtttcgtaattttaatgtttctaagcagccctttttgtttctagcagacacgcaaatgctaatgtataaaaatttgtctgaaatggcaatttatttattttatttttttaataaatgccaaatttcccacccattcactcctcctcctcctctttttcctcctcctcctcccccaatggcatttgcggtacagtttccccacatttttgcttatgatttcatttcatgacagtagctggctggcctgctgcaaatatcgccttcttaattatacaaattgccaattttttttatatataaaattatatgcatacattttgtaaattaatttttctaaaatttctagaaaaatccaatacaaaaattagcttacctccccttccgctgtctgtccaacccctcatccgactacagtactcttttctctgtgaatgtccctggcaccctctgctgccacttcttctacagtcggcacatcattaaccccaccagcagcagcagcgcaaatgctgttttcgcccttccaattgatgcaacaaatttcggctgcatcatccgtcactgctcaacacatcgcttcgtcaatgtcgagcagttcgccaccaacggcagcaacaagcagtacaaaaacggaacaacaaacaacaaatacgatgacaatggaaacttgtgacaacaattacagcagtttgatgagcaacaacggaatgcagaaccaccaaccaattcatggtggggattttgggaagaaactggataatttatatgaaaaaactttataattagggggaactgttcagaaaatttggtgtttaattaggtgaacattcaactgactatggaaacattaacaaaaaaagggggggataaagccaaagttaattttgttaaaattacattctaatggatttttatcttttttgaatatgtaaaattaatttggcacaatctggcgacgccgtggaaatatcttaattttaattcttaaaaaactttattaatttttcaaatttatataaaatgcaattaccaaaaaattattgttgttaaccataataaaaatttggaatacaaattaaaaaaaaatttagctgctgaaaatccgttgcacactttgccactttcggcactgcttcagcactgtgagcagcaaaagcacttgacagacgcaattaacaaactgcaacaacagcagaaacagcagacacaaaaccaacaaaatggtcgaacgataacggcacaatgccaaagttcgccaaatccaaattcggcattcagcgcgccaaatggacaacaaaaatgttgcaacgaaactgctttgcaacatgacgaggaggagcaagacgaacaccacaatgacggtaaattttcaatacactttttccattttgaaaattttgtaaaaaaaatgaattttgacaattactaacgttttaaaaagaaaattaattttaaaataaaacaatttgatcctggacgagatcgggatcccgccgggattttcccgggattccgatcctcggctttttttgttgaaaaactagccgagatcaggatcccgaacacaaaatccgggcggcaaaaccgggatttgaataaccgattatttttttttcatatatttaattattattttttcatttgccactaatcttaatagatgaaaatgacgactcgacactgacttccgcatctgtgaatgggtccttctcgaccgagtccgcgagctgtgccgttgccgcggccgcgtcactttgctccaatgccaacacaacacaatcactggccgaagcggcgggccgcgcgagtgcgccaccgcttgacgatgagcacgtgaagcgaccgatgaagtgaatttaaaatatttaaaacaaaaacaaaaaattaagggttcaaattctgcgcgacaaaaaaaattttttgagttggacttggcccgtaaccagaacaaaattcggaggggcaattcgacagggggagggacaattgtgtctaatccaaacaaatattttgtgccataattttttttttcaaaattggccatttttaatagcgaaaatcacatttataggttaatgctagggttgagcggtaccggtaccggtaccggtactggccggtaa

SEQ ID NO: 11997 - DNA, 1570 bp, Heterodera glycines
attaccggtttttaccggtaccggtaccggtaccggttgaaaaagttggtaccggtaccggtaccggtttttgcagtaccggtcagtaccggtaccggtttttttgcaattaccgattaccgctcaactctagttaatgctaagcgattagaaaatttacaaaaaaaaagttatgccttgaaaacttgaaaatattaatattttgcgaaatttattggtgtttcatttttttagtggctgataaagctttcaaattgccatttctgtaaaattagggcgaatttgaaaaaaagttttccgaaaatttgacttataaattgacggattggtcctcttcggaaaactgaaaaaaaatttttttttttttgctattcgttaaattataaaattattaaaattttatgagtcataagaagtgaaaaaaagaacataatgtcatgatttatttgccttctttctacctttactatataaacaaaatgtttttttttttttttttgttaatatgggaattcattaaattaaacattacagtaatgtccttcttccattagccctacaatttactgtagctacaatgtcaaatatagcggcatgaattatttttgctagtgaacgttttgtgtaattttcagtgcctttatggtgtggtctcgtggaaagcgaaagcgcattgccacggagaatccaaaaatgcacaattcggccatttctcgtcagttgggccaagagtggaaattgctgagcgatgttgagaagcgaccgttcattgacgaggccaaacggctcagacagcttcacctgtacgaaaaatcattaataaattaattggcaaaataatttgttaattacttggtcaaaaaattacaggcaattaaatatattttaattaggggggcggggtcctcttccggtcccgatgtccccgatcttcgattcccttgttccccgacattgccatccccgccttttgtgtccatgacggctcggggaggaaccctaattaattgtttatgataaataaataataatgattcattcctaaataaatccaaattgctaattacatataattaatgaggcattcattggaatttgatttctctttttcagttaaattataatggaaaaataattttttttagcctccaacacccaaattacaaatatcgcccaaggcgcaaaaccaaacatcccattgctgttgacaacatttgccagccgcataataattgtgccaatttgacaacaaaaattggcactttcggaatggaaaaacaacaacaccaccaacaacactttccaccattgaaaatcccgaaaatgaatggtgaaatatgcaataaattcgagattgaaatgccttttaattttttgattatttacttaatatttaatagatgcttaataattattgattgatttttaattattttttaatattttcaagacccgttcccgacaatttcttcaatgcagtcctcccatgtgccgaatgctttcgcttcaatggcagctgctgctgcttttttgccccactcagcagcaaatccgctcgctttgctgagag

SEQ ID NO: 11998 - DNA, 2498 bp, Heterodera glycines
  unsure (1)..(2498): unsure at all n locations
tgcgagagncagcaggaatggggattaacaantcggaatccttggattaggttcaatcggatgccaaacccaatgaactttgttttctgaccatgatatgatgacaatcagcgaagtaggcacataagtctggatgatatggtgaagcattgcccgttccactaaaaaaataagtaataattataattaattttaaaaattaccgtaaaacactgccgtctgacagctccaagttcctgaaaacccaattgtgaaaatttgcagaaaaatataagcaatatttaaaagttcaaacccgtcacataagacccattgcactcgccggtggtaattcggaccaattccatgtcttaaaaatgaattatgtcgcttgcagaaaattaaatggcacaaaaacaattaaatgattttttacccggcattttgatgcccatatttctgtcaattggcggatcaattcgtttggaccaccgcaagcgcagatggttttcgggataagcatctgaaaaagggggagggggggggggggaatttaattgaaaattatgttaaaaatacaaatttatttaaattaaataaaatttttaaaattattgaaattttttcaaatgatatttctaacagctcagaatacggagttcgcatgtttgggaatccaatgggtacttccacagatccatcatgcaaatggcaaccagcgaaatgcggcaatcgtaccaaatccttaaaaaacaaacaaattaaaatttaattaaatatttaaatattttgaaaagcattgattgactcccttttcaccttccatttgggtaaatccaaacaagaaagttgtcttctgttatttcttgaaatgaagcttgtctggcgttggcaaaataaatgtcggggtgccacaatttctgtcaaacaaaaactttctaaaaattttagggaacattttaaacaaccttaaaaacggctttatcccttatcagcaggggacctgatccgttgtgtttcaaccgttcgtctttccattccttcaattaatgaatttaaataataaattgattaatgataaattccttttttgtaacataattaaatatttaatgataattaattttgcttaatttaatcacctgataaaaataaacgtccaactgataatccattgtctgagcactgaaacttgaaatgccttcaatgaacattgacattgacacgttagtggcagtgcctttaaattttcaattaaaatttaaaaaaattcaaaataaaaattgaaaaaccgcacctaaatgttgggtgggagtcgcgtatttattgtaacgcctctcatcgtccaacagagaaataaattctaaaaaacaataattttatatattttagtttaatttaaattgtttttgttcaccttttgtcagtggcacaagtgttgtttctcgttttgttgttgtggtttttgccgtttttgttgtcatttcggctgtttgtgcagccaaagcattgaatgagagaagccaaagcgaaaattcaagcataatttgctatgaaaaataaaaaaaatatttatttggttttttgtttttattgggcattaaatcaaaaaaacgacgattaaaaaataataaaaaaaccaaaataggcaataaaaataaaattttattttggttcaatcgaaatcacattcaggaaatgctttttaagttaaattctttgttgagcattttcggtttttaattgaattttctgaaaaaaaaatttcagaaatcctaaaaatgtttgcatagaattggcaaagaaaggcattagtccaaaaaggatatccaaaccaatcttccaagaaaaaagaatgccaaaaatggaatccatgtgataacggatttcccccactcatcagaatgtcgcttaattgttagccttaacctgtgcttgtcgcccccccccacccaatttatccccccccnccccccacactttaatggcattttaccctcccaaaatgtgtcacttgcacatttcccacgtcccacgccaaaaagctaagtttttgacagattttcatccgaattctgaggcaaagaaacaaataaaattttggttttgttttatatttattttttgattaatttgagagcctcaaaagcgggacaaatcaccgcaaatgtgcgttcaaaatgcatttggcagagaattttttattgcttttgggggaattatcattaaaataaaaggtcgtcaagcaattagaagcgccaatttgtcacacatcttatttttgacgcatttggcctttttcattttgaaaaaatagttttttttttattaaatgtaatatgtaaaaatattagtcgacaaatgtctccaaattttggcgaaatttaatccaatcgaacttagttgccgtcatgtaaaaataattttactgaatgccatgagaaaattatgtaataattcccacgaattttgacggctttacaatacgaaaatattacgacagaaaataatttatggaa

SEQ ID NO: 11999 - DNA, 2208 bp, Heterodera glycines
aaaaccgaggcaagagaagaaaagaatatggaaatattaaattttgaggaaaaataagttcagttaaaaatttactttgacaagtggtcaataaataagaataataaattaaaaatggaaacgaacaacattaaaattaataaatatttaccaccattttttgaaaaatcaaataaaatatttgaaatttgaaaaatgataaaaattattattttgtttgtttaaaaaagcagaaaaacgggaaattcgggggtttaatccataaaacaccaaaaaagcaaaaaattgattaaattctgttcaacaaaaatccggggccataaaaatggaaaaatatgcacgaaaatccattcaaagcttcatctgtccccgccccttactcacaatatttaccactttttttacactttgcgcctgaggcaaattttgtgttccgtaaaaaatttttttttaaataatgcattttgttttaatggttaaataaaattttaaccaaattcggttattgtgaattaagctttttaaatgcttaaatataattaatgttttatttgttttaattgaaacaaaaaagtttgaaaaattattttttgttaattttttcatgtgaagatatgatgtttattcctcattactagggctgccaattttatgtaaatacatattttttcctggcttctccttgctctaaatagcaggaaaaacactttcttttttgtgtttgcgaacaaaaaccgggacttttatttacatatttttacatatttcgggattttcttacatattcatattttggatttttttcatatatattttcattttttttacatatttttgagtattttttacggaaatttttggaaatcctcaaaaaaaaatccaaaatttcggcaaatatttttgtacatattttcatttttttacatattttgaaaatttataaagaaaaaatagtttgaaatgttgcctaaaaataccaaaaaaagtaatttttatgtcattttgtggctatttcatattttacggggattttctttcccaaaaaataccataaaaaaaaatttatttacatatttggggtttttttgtacatattttgggatttttcttacatatttatgtacatatttggaccactttttatacatatttttggcagccctaacaatgacaaatttggcactttaaattcgtcacacatttttataaatttgtttgattgtccacaaaattttccgggcatttttgaattcatttttcattgagaatttgttctgtattcatttcccattttttacttttcaattttttcattttcatttttatttttattcttttttaaatattgaactaaaacttgcaatatatcaaaactaaaaatttcaaaaactccaaaaaatgtttatttgtaaataaaaaggacatttttcccgatttttagtgcttattttatgcatatttgggccttttacgggtttttaaaatatgcttttgcctatttgcgagaaaagcacgaaaaacgcattttgcgcttggtttggtgagtctacgtgtttacgatgactttttacaatgcctatttttgcctatattgaatttttaagaaaatttttcatttcttatgggtctatttttgaaagtttttgggtcgattcttaggaatatattttctgaaaatattttggtcgattcataggggtatatttttcggaaattttttggcccggttcttagggggtgcatttttttttgcatttttgttaataaattttggacaaaacgccaaaataaggcaaaaacttatttaaagggccaacatctaaaaaatggatttttaaggtgaacatccaaaataagtgtttctaaggtcgaatcagagcattaaaacgcaaaattctcgaacaaaataagtgtttttcgtgtatttctcgtccagttaaagctgcataaaaaataagtaaaaacttataaatcccgtccgtaggcgacatgtcgggggtcgggtcggggaatatgtcccaaaaaggtctcgggtcgggtcggggaggaaccctagtttaaactttctttttttataaatttcgtggtgccgatatgcttcgtcgacaattttttaaaaatcttttggtgcgatttgttaatggatttacaacctgaaaatggaaaggcatagaataaagagatagatagtttttaataaaaacctcc

SEQ ID NO: 12000 - DNA, 4656 bp, Heterodera glycines
  unsure (1)..(4656): unsure at all n locations
tttctttttaaattgtttctgaaaacatattaaaatctttccaaaagtaaatctaaagcaacataaaaattgtagatacatggcgactataaaattcaaaagtgcagcagcagccttttcattccatggccaatacaatgacatcgaattcaattccattgaatcggagaaatgccaactgcgttttgtggacacaatagagacagtgagaattgtatatcgaaaataaaaacaaaacttttgtttgtaaaattattatgggcaaataaggcatcattcatgagcaggggtcggcctgggtgaccttcgtacgacgtacggtttgcctagggggtggggtcggtcaggcccgatttttattatggtccatttttcgctttacctccatcgacgatttttaaccaaaaattactccaaaaaatttaggtctcaaccaaaaatttacaaaatgacgcatttgcaggaagaagaagctgccaacattgggggccttttggcagaccaaatgcattctgagccaccgatttgttcggtttgtttggagcggatggaggaaaacaatgtgttcaccatcctttggtttggccattatctttcgtaattgatgacattagactttcagtaatcactcatttcatgcggaatgcattggccaatgggcagacaccacgtaaaaatcggcgaacaaaaacgaaaatttaaataattccttttaaaggtgtccaatttgtcgttatacacaaactccagaactggtcccggatcagaaatgtttcggtacgtacgaaccaaagcagaaaaaactgctcgaataatgacattgactgtttttatggcaccaaatgcatattttccgggacattttcatttgttttaaatggttccctttttgcacagattgcggtcgtaccactgacctttggatgtgtttgatttgtgggaatgtcggctgtgggcgttatgaggctgcccatgcccaccagtgagttgagtgttttctccacacattcttaggcatttccccacaaatgtttttcggcattacgaaaagacatcgcacatttttacgctccaagtgggcagcaaattggtgtgggactacccccggtgacaattacgttcattcgctgattgaaagtgcaacggaccgcaaaatgatcgaatacgacggggggcggagcggggggcgcgacggaggtgaaaaagggggggaaaattcggggggattgggaaaggggggatcagaaggacgaggaganaatcagtgccatccaattggagtacacgtgtttgctgaccagccaattggagaaccagcggatgcattacgaggagaagttgcgggaaacggagcaacgtttcagcgaaagcggaagactgacccaaaagaaagtcagtgtaaaaaaataataatttaaattcctaagttaaatagtttaaaaaaatagttttttttgatgcccttttcttattttcctcttccaacctgggtttttattcctgtagctaaactcactcgaggcggagctgtgcaccgtacggacggaacgcgacgaggcgcggacagaattggccacgacgagcacagctaaacagcaaatggagaagaagtgccaacagatgcagcagaagacacagaacttacaacgtgaattggaggaggagcgacagctgaactcactgctcagcaaggataaggaattgttgggcaagcaaaaggaggagttggagagagtccgaagacaggtcggaggaagtggagaaacgaggggaggggggagagactgtcaattcacttggaaattaaaaaaggtgaaatcaagtaaacgcattcctttccaatgcctattttatttgtcaataaacccaaactctaaaagagtatcaacttttttattctgataccaggaaattgccgggttggaagagcaactgcacgatttgatggcacactttgacacgcaggcgaaggtacaacgacaagtggagacgggagcagtttcaaaggaagagttggagagcagcactttgggactgagcaaggaaaatggaagtggggggaaaaagcagcggaggaataaaaagtgacgaccaacggagcacgagaatgatcagaagagagggcaattattgtaattaattttgtataaagagaaaaatatacaaaagtgagtgaataaatcgggacaatcagtccatgtgcaattgtccacctcggacaaaagagtaaatgccccatttagaaaatgaccgtattggggaaattagtgctcggtgtttgatgtgtcttctatctacgcatagcgcatcattgttttccctccaattctttcaataagcactcagcataatttgtcgtccatgccgtgccgacggttggctgggaatctaaggaagcgaggaaattgaacatttggaagggcagtgctttttccattagttctaccatatgctgagcccagtacagtcgatggtaccgtctgtcctccataatactgtagttatctctctgcggttcgtacaaaaatggctccgaatagtcgagtccacgcgcccgacctccccaatacatacagaaattctcaaaacgagtcgcatcggccggcacttggaagggacggcgcgaagtctgtgggacgcgaactaagaaaaacttcagaaaatgtcccttttacgggaggcaatggcggaaggaacggcgacggcgcaatgttcagttttgcatgtgttccatggtgcaatttttcactaaaaagcaatggcaattgggtggggaaactgccccgatgtgactgacagctccgtcttccattcattccgcttcggtttgtacggatgaaaaggtcttaggtcgggtgccaccaaacggtccctgtcaattggaggactttgccttcattttcatgttcctttgttttacttcaatcgcattgcgtttgtcggtgccaatgcgctgtaactcttcgacttgcgaagaatgccaatttccgggtgataccttcgaagggtttttccgcatttaaaacccttcttttgttcgctgataaatgctcgttactcacatgtcatagaagcgacaggcactggcatttctcccagactttttcacctcatcaaaacttaaatttggaggaccatcagagagggggggggggtcttcgcctgtccggcaattctcgtcaccttctcatcacaatgtcgctaaatgtcgcgtgcggactgtcgccgtacgaaccgagccaatgcgaatcgcgcacccgatctttgatctattaattagcgaatgaggggcagcggatgagaaaagacacctcacgattgagcgaatccattcgaattggatgggtggagaaaaatggaaatttcaattttaaatttcaaagtgatggctaacgcttctcacagaaagtgaaaggactctcacaaacggatcaatgggaacgccgtcggcggaggggaaacaaaaagatctttccttcgtcaacgaaaagcgaacaattggtgctcacatgtcgccacttcccaacggacggacagatcgaagtttatttactctccttcccaaaagcatggagaaaaagaacacagggaagagaagaatgatggaataatgggccaaatgaaaaagaaaagaaggaaagaacggaagaattaataagaaaggaatttcacaggtgggatgaaaagtttttttgctgaaaaatacaaagtgaaaaatggacaaaaccgaatttattcaaaaagaaatataaataaaaatttaatgtggagggcagactaaataaattacaatttaaatatcgcatagtagcataattagatatttaccaaggtgatttctgaagggaactgggcacccaaataaatttaaaacacaacagaataaactcgccgccgaacgttgccgttgaaaaatatggtcaaaataaatgaaaatcatttcttttgcttcatatcctttctaaaggtagggttggtctcttctacctatataaaaatatccagcacacggccatgaggaggcctgcgattggtagtggttagcgcaccattttttttgaaaaatgagtttccgaaaataaaaaccgattcgaaataaagaggttgcaatagcagcgctctataaatcaaaaatttacaaaaaaccaaagggcacaataaacctccgaagaagtgctcccaatggtcgaaaaggaaaacagcaaatattattatttttaaattgtgtgttagccgtcgcaagtactcaatgtttgtggatcgtttgttcccccttgtgaattctcaaaattcgctcatctatttgtcgaactttctacatttggtcggtgcctaatcccccctaatcattaattcgtatttaaattaattctgtcaacaatttcaaaatagaggaatgtgcaccgacaaatgcttatgaattcgtttgtgaaagttttttttccaaatattttttcacgtcgacgttttgtcccacgatgtttcggctggcgacatttttgggtgtaccgatttaaataggagcaaattgcaaataaacatggggatgcgtatgttcaaaaaaaacaatttttgttttcgaaagggtctaaccatagaattctgaattttccggggattttttattggtaaattggctcccaataaaatggagac

SEQ ID NO: 12001 - DNA, 1425 bp, Heterodera glycines
tggcctcctcaaagacactgaaactctcatccaaagatttggacggaattgaggtcgttaattaactgcacaaattgtaagcaataaacgcacaaatttggacagtcgccggaagagcgtcgcttggacactcccgacgcgcgcttcttggcatgttgccaagctcgtcagttgcccgacccatgccttaacaaatgctcattcaccgctttcactcgccaatccctccaggcaatgcctttgtcttttatcccaccgattgttcccccattggcactttctccccaattgaccccccaattgtctgattagaatatgtacttccgtgccgactcgtgcccaatgcaagcagctgccgacatgcaattctgtgctgcccaaggccgcgaccaccgcgagtgctgcacgcgcaacggagtcggctcgactttggccggtgccaagtaatgtttttacgtcctttttgctcatagttgtgccattttcttcatttcgtcagatgtctcactttttgcaaccaaatccccggcaatgtcacccaattggacatgagttacctcagctgctacgaccgctttgagaatatgaagggatgcttttggcacgacttgcagcgccgtatgagccgcgaacatcggagtcggaagtgaaaagggacgaaacgaaggaaaagcgaaggacaattgggaatggacggatcagtccgggaggagaggaagaaatcaacaaatggccaattcctcctcctcttcctccgatcactttgacaattttcgtcgtccgatttatttttgatcattattcacttgcctatcgtttttcttaccttaattttctttccctttccattccattttaaaatatcatttgcaattttgtccttttttgccaataacctaaataaagctgcgagttttttatttggcagtccaattgaaaattaatttgaagccgcttttcgtctcatttggacggcactctccgcgaaagggcagcggtggcggcggaggaggaggaagaaccggttttcttttcttcctttttttcttctttttctcctgctctcttctcccttctcctccttttctcctcctcctcttctgctccttcttctcttctctctttttccagtgatttttttccctcataaaacccatctctcagctgaatggcctcaaaagccaatttgtcctttccattggctaaatttgccgcttttgagctgcccatttgtcgctcagcaaaattaattttgcttgaggccatttttttcaaaatttcttaaatgaatgatgaaatttattccttccaattttttataattcatataaaaaattttttgtgtgtttgaaaatgccattggcaaatttagttcaaaatgcttaactcccctcaagatcttgaaatgccacgccgattttcacc

SEQ ID NO: 12002 - DNA, 2644 bp, Heterodera glycines
gtgttttttctcaaacacaataccatggggaacacaattacaactcaaaacacacggaaaataccctcgttcttcagcattacatccgatttttaaactgtattttttgtattttttttatcctctcaaaaatacatttacaatgggaacacaattacaacacaaatagattttgtatggatttgattccggtttttaaactgtgtttttatccactctttccaaaacacaattacaaatgagaacgctatacaactcaaaacacacggaaaatacacacagtgaatgcttttgattccgatttttaaactgtgttttttctcaaacacaataccttgggaacacaattacaactcaaaatacagtcgttctgcagtgtttttaaactgtttttttttgtatttttattcaaccctttccacaaacacaattacaaatgagaacgctatacaactcaaaacacacgaaaaatacacacagtgaatgcttttgattccgatttttaaactgtgttttttctcaaacacaataccttgggaacacaattacaactcaaaatacagtcgttctgcagtgtttttaaactgtttttttttgtatttttattccaccctttccacaaacacaattacaaatgagaacgctatacaactcaaaacacacggaaaatacacacagtgaatgcttttgattccgaattttaaactgtgttttttctcaaacacaataccttggaaacacaattacaactcaaaacacacggaaaatacacacagtgtatcttttggttccgaattttaaactgtgttttttctcaaacacaataccatgggaacacaattacaactcaaaacacacggaaaataccctcgttcttcagcattacatccgatttttaaactgtattttttgtattttttttatcctctcaaaaatacatttacaatgggaacacaattacaacacaaatagattttgtatggatttgattccggtttttaaactgtgtttttatccactctttccaaaacacaattacaaatgtggacgttatcccagtcatcctgcacggaaaattcacgcagtgaatgtttttgattccgatttttgactgtgttttttctcagactcaataccttgggaactcaattacaactctaaatacagtcggtgtgcagcgtttttaaactgttttttttttgtattcttattactccctttggacacacacattttcaaatgcgatccctatcctttcctcccctccccggatctctctcagccgagaccgcccctgttcccccattttgtccctatccttgtgttcattatttatgtcccgtttcgtcgtttgccttctccagctccttgagtaattccctttcgcgtcctctccccatttttcactttgttcgtcggattggatataaatgcatgggatgagtgagtgtccatttcccccccccccccccctcccgcctttttcgcttcgctttcccgatcggttgtttctcattgcttaattagccaataaagtgccaattttgggggaagaggtcattcagtggacagacagtatgcattgttatgagtgcatgttaagccaatacgaagcgtaacaaaacttattttatttgggtttcagtgactttgtcggtgaaaaggggcgagggggggggcggccacggcacagccaaaatgcccttccgccccttaatccacttattacttcgcttattaggcaagtcctctgacgcgggttcgcccgacaagaagacacaaagttatgatgataaggaggagtttgtgctgattccttcgttggcaaataattgccgaccattcgctaccgtattaccataccaaattgacaatttaatttccgccccccccaccaatccccaagaatagtcacaaaattagtttcttttaactcaatattcttaaaatattttattttgtttttaatttggcctttttgtttctttctcttccgccctctttactttgttaactttttctttacttttttcctttttcctctttctctgtctttgctttttccgccccattcttcaattttacaagcactgagagaatattgagacaagacaaaaagcttaaaagcgggacaacagagtgtggaaaggacactccgtcaacaagggatcattaaagatcattaaggatcattaatcaatggggagggcgcccaggggaaagggaaatggtaacggaaaagggaaaacggagagaacagcagaaaaagaaaaagaaggaaagagaaaactcagcccacaactcataagtgcattccaaaatcactgttcatcttttaaaatctgaccagaaatccgatatcgtttttccctcttccgccgtcggtttgacaatggcacttttgccaaatttctttttaattaaagggctctgatgcatttgccatacttttgtcaactcctccgctgaactgttcgtcctttcatttgcctcttctgctggatttcgccatttacccttcctaaaaatggtgtccaattaactttcttttttctctattgataattccatttggttccgcacctattcctttttccaagatcgagaatggcatggcaaaggtaattatcgtcgttcatttacc

SEQ ID NO: 12003 - DNA, 1770 bp, Heterodera glycines
ttcggtaggaattttgaaaaaacatcggcactctcccctcccccccactcgttttttatcccatgccctttttagcgttcccccttttaccccttacccctttttaccccccttttgcccctcccccccccattttaacacttcgccaacttatttttctcttttttattcattattctttcaaattaatgaactaatttcacttgagtggttgatcgtgcgcagaatgactacaagagattaacacataaataagaacagaacagaaaagtggcattttggtgggattatttaaagaattgaaaccacaccacgggggaggggagggattgtgccaatttataaaagaagaacgaagtgtggacggattggcgttagagaattgttggatttggcacggagggggatgccaataaaagcacaaaagcacaaaaaagaattggcggaaaatccatcgcattaacaattattttggcattttcttctttgtgaatattcaaaaaataaaaaattatactttcttagaaaaaatctttagaaattaagaagaaaaaaagtcaaatacttttaaaggatttttgaaattggccaaatgagagaggattaaagggaaaatagattaaaagtgaagacaatttgggatgatctgtacacatgaagcttgtgctatcacaagaaagataaaatgtattagaaaataataaaagcgcaataattgtaaatctgccgatcaatcaaaatcaatggcacggcatttccgaaaagggtttcggaagattttcaaaaagttttttcttaaaaagggaaatgctttttgacacggattttgatttttgtgcattttaagcggactcttttttcttccccttttctcttttccctcttttctaataattcccattaattttctgctgttctgttgccattttacttgctattttttcattccaatgtttaatttaactaattataattaattgccgtaattgcactttaaaagtggccattcatgattcacttttttatccgttaatgccttttcaatttccccatttgcaaattgcgttagcgactgaatgaatgcgaaaatcccaaatgaatcctcccaaatctcttttcgcactgatggaaaagagagcacacttaacgatcggcaaaggagcgtttcagtttggttgactggaggcgtttaaccgtccaacctctacccccccccccctccccccgcagttaaatgcgaaacttaaccttctagagattgcataaacatcctgacaaatgataagtcttgtatgccctcaatgaattccaattaaaaatttcacgaccgtaatattgcgattttcatgtctcgcataaacgtgtgaccgatcattggtatcggtacaacctgatcagtaacatccaaatgaccccattcaccattcggtgatgtcaatattcgcattctaaaatcaggcaaaaggtaacactttgacacgccaatgtagaattgactcgagcgtattttaaaatgaaaaagagagactatgactgtattactcttcactatctcgaaaacctttgacgatgatacttaaacatatgtaggtagtatactgaaacagtctatcatcattgctaattgaatcgatgctgatcgagtcaattatgtgaaatgccattatagtcttctttttttaataaagtccaaatgcgtctgatctgagtctctttttgcttttaattagtggtttggtaatagtttttccaattaaagtctggtgcgat

SEQ ID NO: 12004 - DNA, 1874 bp, Heterodera glycines
  unsure (1)..(1874): unsure at all n locations
gagttattaaaatagtttcttaatcacaatgaaaataattngacagaagcgactngatgttttgctgatggtagtgaagaattattgngaaatgttcatgggccaaaaagttggatttaattattaattaacaaaaaatanttaaatttggaaatgactaattttgcgataattatttcatcagaaactttgaaaaattgctaattattgggaaatatttttaaaaatctacatttatgaaagtgaatttaaataatttaaatttaaataaatttatttccacaaattttgcacctccaaaagggccttaattgtgatgagaaaacgtgcaaagcgacgtgcaaattgccaaaacggaacagagaagtgccattgaaaagggaggacgaaaacccagcggaatatttctgttacccatacgaagcaattaagaaaatataattaattaattaattggaaaattaaattcagctgatttacgaccacgcaaattccattggttgtgccgttcattttgagaccaaacgcaaaacggagctacgcgccaaattggtgtgcataatgtgagttcatcttgaaacaaaaaatgccaaaaaaaaacggaaaaatgccattaaatttttaaggagcactgagcatggccacaagaaaatgctgcaccatcacaacgtattcaaagtgagtgccgacaaaattaatggccaattttggcactttctgttcaggtgggcccgtcgtgttcaaattgtgatcgaaatttcgaatgcgatgccaaaaacagattgtgcatgaagcgaagcaatccgagccaaaacggggcacaaatgccaacgatgggaaggggtaaaataaagcaaatggaagttaaataaatatatttaaaatggtaataaatggggcaaaagaaattaatcgggacaccgaaatggatttaaataaattcaaaaaagtaactccaaatattttttaatgaataattttaaattaattttcccccaatttttctcttttaaggcatggactaccaaatgagaaaatgaagcgagggaagaagaagcattggatagaaagaaagtggcaaattactgtacatttttttgaattactctcttacagtatcccctcccgcctttcagttttaaattactgtagatggatataatataccgtaacttttttttaaattttacacaaatatcaattgtgaatttgtgaatgggaggacatgaacgacatgaaactgaaaggacaagcgagcttttggcacaaagaaaagccatgacaattaaattcgatttaaaccgaccaatttaagggttgcccttgtaaacatgaaatttgattagaaatttgcctatcttaagagagaatggcaattcgacgtggaaattgcgacagatagaaaatgccgacacttttttcgactcgatacagagacgttcgagcagtacttgcagtttgaaagtagaagcattctccactcagcagctgacttgtcatttcgatcacatttgattttactttatttggcctaatttaaaatgccttttaattgctcgaaaaattgttgatgaagcgaattgcccggagggcggctaattttggcttattaaccttcgcttcggcaaaatttgccgctgccctccttttgaaaatttgagtataatttgttcagattttgcccaaaaattgtccgaattttgtaattttaagccaatttttaagaaaacaaagtatttttagggtccgaaattacgctttaaaatttcaattttttgaaattttaagaaaccttttcacgcctagtttctctccataaaagtcaaagtgaatgtagacaattgttgtgaaacaaagaagctacagtaactgtt

SEQ ID NO: 12005 - DNA, 2946 bp, Heterodera glycines
gcagagataaagcaaaaatgagggatagggagtgggatgggacggatacacattcatgtcacgatgatttaaattgaaataaatattttattgctttttgacccaaaagaaaatgggaaatgggaaacggatgtgcagcacacaaacaaatggccattttccaatgtcaaaagggttccaaaatggcacctatggttcatccaccagctgaaccagttcattaaaattgcagtacattaactatttttacagttatcattggggtgaaaaacttcaatttccccccccccccttttgttgttgttttgttagtgtttgagttgtgaaggggaagaaaatgagggacaattggacaatgatcgagcgaatgggtgggcctcatgcggcgcatctgttgttgaacaaatgagccatttgacaacccatcccccaggaatgtatcggaattgaatatagatgagcggaacacagtcaatcgagaggagggctggacataattacggattacagtaattggaaatcagttaaaaaggaggccggattcgcactctgcgcctcaaaatacccctagaaatatgttattagaatttttagttttaaaaaaaaatttgttcgggaccagtaaaagacatgattgccgaggaaagcgtggtttttccgggtgaactatgcacaatttttgaaaacaaaagttgcccaaagtaaaagaagtgccgggattgccaatgccaattaagaaactaatttcttttaaatttttatatggtcgaagaagaaattctttttcatttttttgtcgtcattaaaatcaggacaattgcgtgaatatgatgagatttaaatattttatatgctgcgccatatatcttcaacaaaaaatcaaaaaatcggctgtcatcaaaaacgagcaagcgccatacacacaaaaaatcacttctgcgccggacgaaatttccgttgactgcccacccaaccaccgccaccgctagcgccacctccaccaccaccaccaccaccacggcttgcatgcgacgaagaatacacaacagcctaaaaaagcaaaataagaaaataaaatttaaaaaaatggaagggagacaaatgaatggaatttaaacactttaacttcgatgaaaatttttatatctcaacgccataaagcaacaaaacccattaaaatgagaatataatgcatttaatagttaaaatacacaactgacgcaccccggaatagtgatggtgaacattgcgcggtcgctggggatgcggctgatgggaatgcggttgctgcgagtacggttgctgagggtacggaggatacggcttttgcggcagcggttgctgatgttgctgctgcggttgctgctgttgctgcacgagtgccggatggccagccgccacttggaactcatgagcgaatatttccaacagtgcgcgctgcttttttgctgaaaataatgaaaagtattatcgaataaagcatgtcttttgccgttttggccacaaaatgatggaaaaaacaattccaaaaacttataagtcgtaaacgcatctaataatataattaggtagtttccaattcggtgagggaggttggtggtgtacttttttttgtaaatgtatgagccacgacaatttttgtgtttaacggaaactcactgttcggacagaacagcgccgtatgctcctgcgagccgcactcctcacaacgtctgtcaatgatggatggcgaacgacgcacaaaattgttgttcacattcccagcacccgcaccaccaccaacgctcccaccagtgctaaccctgttgctgtaaaatgaaagaatgagggattgaaacagacaacatttttgctaacccatggtgatattgatggaaacgaccaccaccaccaccggtgccaccgcctccgccacccatttgatgatggggttgattttgatggtgctgttgctgatgatggtaattcacacgcccgtgatacggcatgctggtcatgaccactttcttggcctgattcggaagaaggggaggcggagcagcaccctaaaaaagaatggactcacaatcagagcagagaaaagaaaagcccccaaactcaccctggacatatcgcttttcctgttctggtggtaaggattgcgaggaggaacattctaaacagcagaagaaacgcataaacaggaaaggaataaggaactcaccttgaatgagtcggttttcttgatcggcgacgggggacgaggagaagccgcctaaaacgaatccgtagaaaaaaactgactgtgataaactcatcactttggcgtggtcttttttcttgaccggtgacgcagaacgcggtggagtggcattcttaaagtattcaagaaatagtggttgtaagaaatgaggcgctagttaaaaagtcacactgcaaacgggggggggggggtccatttaactttgttcgagtttggtcatagattcaaaattagtaaaatgaatgccagatttttgttcagcttaataaaattcaatgggtgtgagacaaattcaccttgacatagtcagtcttcttgaccggcgtcgaaggacgcggaggagtgacagccttaaaaaaattatacgacaaaagtgagaccgaccgatagactcactttggcaggctcttcaatcttcttgaccggtgacaaaggaggaggcggagaaacagccttaaagaaaacaatcgtataaatggaggacccaaaaaaggataaacgcactttgacctgctccgtttttttagtgtctactggagacggaaaacgaggagaaacaaccttaaaaaaagaattggaacaaattagattggataatgaccactatgcccaactgagttcaggtaggcgctaaggatatggaagagaaaatatgcacttaaaagataattgtttttgtgatttaaaattaatggagtgattaa

SEQ ID NO: 12006 - DNA, 3951 bp, Heterodera glycines
  unsure (1)..(3951): unsure at all n locations
cgaaggaatgaaacgcggcgtgggacgacccgcggcgttaaaaacaaaggtgggaaagaaattgactcaccattcattgtcccctaacaacggaggggcccatcaactttattctgtaatttagcaatttgggcattaattaactaattatcctctaacttcgcattttcctttataattgattaattaatgcctacttttgattcttatcttcaatatttccctttctttatcatttcaaaaatggaaaatattttaaagagaacgaaccaaaacgaacctaatcaaagaaaatttaacagaagagaaacggagggaaagggaatttatttttgtttttttttaatttatttggttttgattcgtttcgtttcgtttttgggccacggaagtggcaaagagaaagaagagaattcaaacacagaaatggcctttaaaagggaaggaaaagtgaacagacatgggaaaacaattaatcatagaaaagggagagaaaatgacaaaaaaaattaaatcagtcgatggattaaaattgaaaagggaaagggaaaataggacaaatcggaggaaaaaaccattcgttgatcagaaagaaagaaaggggaagagggacatgaaaatgacaaaataaaagcaaaaaagaaaaaaaccaaaaacattttcagtcgaaaagcaaatcaaacggaacaaagatggaaggccgaggaagcgatcacagcacacaaagggaaacaaactgtgggaattcatcagagacgcactgaaagacccgcgcacgtgcccatccgtagtgaggtgaaaaaggggggaaagtgccaatggaagggagtgccaatgaccggccatcgtttgcctgcaggtgggaggacccgacggaaggcgtttttcgaatcgccgaatcggaacgattggcatttttgtggggtcaaaagaagaacaaccaaaagatgacttacgagaagctgagcagagcgatgaggtgactgactaatgaatggtgtcaatgacaacattcggactcaaactaatcatgccacccctttaaggacgtattatgagaagcaaatcctcgtgccggtgccgaagtcagggctttatcctaaggtgggcgagccttagccttatgctttttctattccttcttcattcaagaaattggtctacaaattcggcccaaccgcgcacgggtggcggaccgccgcgtccctcgcggtccaatcgcatttggcactgatcggcgcgcaaggcataaacatgtaaaactgaaagcgaaaggatgccgaaattcgggccaatggcccgccattctccggttcaatgatctcacaatgattggccaacagcagccaaatgagaaatgcttatttgacttttaacattcgacgataacacaaattactcccccccccccccccccgaaatttgattgattcacccgagtagtctttttggagcgggatttgactaattatatccttttcaccggttttataaaccgatccgatgccccgtccctttctctttgttctgttctctctaatttagaccaaattggccattcctttcccttcccttttaattgcgcaattcttgccctcttctcttctcttacgaaagactgaccttttttggtcgtttcataaaatagccgcagaatcagattctctttgcttaaatttatgtttttttaattcttatttatttccttcattaattaatacaagtacaatgtttttactttgattgtccggttcaggaaacaaaattttgcttcccatttctgtgcttactctctcagaatatttgtgattttctatagctatattcttttcctatttgtccatttgattcattcctttaaatgacccggttaattcataaattttatctttatataatttatctattgatttaaatatgtaaatgtctagtaaaatgtttaatacagaataaaaatgaaacaaaatacatttgagaatagtgaaggtgtcaaggcatatggtaagaattaagttgagaaatggttaatcaccataatagagtcagtcgatgtcattaaacattaattatagagaaaatgcaaatgtgacacattaaactagaggagttaataatatccgtgagatatttggtcaaaataggaaatatgttaactgtccatcaatcacataaagttgaatattaaagctgacaatgagaaaaaataaataaatttgaagatgagcgattatggcgtcggggagaggtcgaggatcgagtgccaaatggggctgttgtccaaattggacaccaacggctggacaagcatctgaacgcgaattttttcaaagtccctctggaaagagagcaagaaggtcattttgagcaatgccaaagtccattccgcaacggcggagacgcagtggaggttgtagccctgaagaacacaaaccaaataatgtttaagccagtcatgccacgacgtacgggaagaactccgtgtttccgattccatggtctcggagtggggaggtccggataataatggtggaaagtgatggaagccatcagcccaaaggaaaaggctaaagaaattgagcgcggtttagcagtgattgaggcaatcaacgaaggcgagaagactgaccagtgacgaagcaaagagaagcagcaattgcaatcacaaatcgaatgtaagcgatttgagggtcgttgtaaagcggactcattctgagagtgcaccacgactgaagaagcatgtacacacagccggatccgaagcagaggagggcgccgagcaaatggatttgaaaaactgcagtctcttgaacgttggcgacgatgaacatgccgaggccagccaacatcccaacgtaaaatgccaatcggttgaccgctctcagtctcagatccgaacttcggttgagctcaacgacgaggctgtacctgaaaataaattgggcatatttaatggcaaatgggaataaaaaacctaagaatgatgagaagcatcgaaaaaaaggagcaaatgttgagcaacattgagaaaatgcacgactcggggcgaaggtcaccagaggcagaaatgtaagggaagacggggtcaacatcaccacgccaaacggagaaaacgtaagtacagcctgaaggagttggaatggcattgaaaaaagtaatgacgacggatcaatttaaggaataaaaacaccgagcatagtcgcgaaacaaacagcgaaaagaatgggcaaatgaccagcaccaagcctaaaacaaagaatgagtgtccctttaaagtcaaattcaaaccaactttttccagtaaagaagtcgcatttttttttgttttttttagctgttgagtccaagaaataaagaaagaaaccaagattcgccttttgaaaaagtgacattaaaaagaaaaaatttttttaattgttttcattgcaagttactttgaaaaaagtccgagggttggagagctttttgaatattttgatcaatttcttaatagaaaaaatgaccaaactattttttttaaagttattttttgaaagctggtccggcggttcgacaggcaccgccgggaaaattttcaaaatttttgaatgaaatttgcgatgaagatggctttacttaaaatcaatatttgatggcatttacatattttaccagatgcttttcagtaatctcttaagcgttcgactgcacaattaccttttttacacttcaaatgcaattttctgggttcgttttatatatttttggtttgatttattaatgcccaattattcttaattacatagagttgcggttggggcgcattggccgttggaatttggctttacacgcagaaaaatgtctactcagtattggcgccaacgagttattcggatagtgccggaattggtgatnctnccgatggtagggctctaatgtagaagaaaatatttaacttttaaaagtcaatgaaag

SEQ ID NO: 12007 - DNA, 1410 bp, Heterodera glycines
ttaatttttcataatcttcaggagcatggccgaaatgctcccaaatcgcttttgccctcaggcttttaaagtttctatcgctttaagtcgttttttatcatctacttttaactatcgccgaaaatgtcccatttctgatatatcaatgataattagcgttaattaatggttaattgctttcattgcctgctgaatgaattgtacgccgtcttgtccatgctcaatttggtgtccgtctagcagccatttgacagtcggtggtgggtcgccgctgatttgcactgtccatttcagtggcattccttcctccacctcctcactgactaaccgttgcacaaaatcgggcgcaattgttttggctaatgaaattttaattttttaaaattcaatcgaaaaaattcgaaattttttgaaaacgaaaatttaattttgagactttaaaaatgggtgggaggtctgaaaattaaaaacaggactttagcttggtcgaagttccatatccatgttttccatattagcgcgtaaatattccgaaaaaattatttgttaggaaaaattttctcgatactattattttaattatttactaattttgtaaaaattttggaaaccataccctcaattaagaaaatgtatttgcatgttttttaagcatatttcttgattttttgtccatattttatggccatattcctcgattttatatctattttatgcctattctaattggggacgggacaaaatatcgccgataaaaaaacaactttttttcaaacctagaaatttttagtaagaaaatttcaagaaaaatattttttgaaaaacttttgaacgattttttcaaaaattttccaaaaaaaaaaaattttaaacgattttttgttaaaatttccttataaaaaatttcttaaggtttttttcttgaaaatttctaagtttgaaaaattttctttttaaatttctgcggcgatattttgtctcggcgatattttcggcggcgatattttggggtgcacccattctaattatattttaaaaatatatttaattataatgagttaaaaaaaattaataatactacggatggaatacaattttttggattttgttaaaatttaaaattaaattcatttttcaaaaaagtaaatttttacttttatttttttgtaaaatttttcttttttttaattgatttaattgcccacgtctcagcaacagttgggcacttgagctggccatgcccaacgcgttttcagctgtgcaacaatattttcccacatcgtccggccccgctttttcgaccaccaaatagtctcggccggcctcggaccaaaagtacacattgtcactctgcgccaacggttcaccgtatttggaccattcaatgcgcggctgaggggtgcctaaaaa

SEQ ID NO: 12008 - DNA, 1911 bp, Heterodera glycines
  unsure (1)..(1911): unsure at all n locations
tttggttgtgtgggtgtgcgatgcngaatttgttgggcatccatcaccaattgtggggcatgtgcctacngcgagaaaaactttgtacataaatnnttgtttaaaaaattatatttttgttntaggattattttccatccataaaagcattncataatgatagctataattgttaaaaatttgcacagcttcccgcattgattcattgtgcatatcaaccggattaatattccagttaaattaacgaaatatttctaattatttagatactttatttattattttgcgaaaaatattttataaaataattaaaataaatttcgaaatgaagacaatttttaaatttttgcgggttgatggcgaatattggtagcatagcattaacagttaatttccttggctcttaaaacggcttaattatttgggccattcttatatcggcttaaaaaaagcaaaaatatcaccggctgtgataatttcaaaaaataacacgaatatattctaatattccaaaatttatatcttaaaataaaatccaattaaaaattattaattcaacatccttcacccttttatcaaattgctgctgctgctcgttgtgctgttttgtcccattcatcaacagttgtggccgtgtcgccaaggctgtagttgttgctgctgttgccttaattgatgatgccagtgccgtaatttgctgccatttgtgtccaccattttgttgcttctgattgtaaatggcataaaattgttgttgttgttgttgcgcttgcgcttgttgatttaatgagtttgttgctgctgcttttcctgctatttgttgttcgtctgtgcgcatgaacagttgttggttttgttgctgttgctgtggcggtgtgctcaaagcacgctttcgttgtgccttcaatttgaaacgtttttaaaagtaaaatcctaataacaaaacctcattaaaatatcaccaatttttattttgaatgctgccaaatttggtgtgcacaaacgttcccaaccgttctttcttccccccccccccccgttgcgtttttcctccccgataaatttaaaaaaaaaacagaaaattttcaataaaaaatgtaagaaattttttcaattttctactatttttttttgcaattattttagaatttcgaagtgcaccccttgaaaagttgtgtaaattttctgtatttagtcatcattgaataaaaatttataaattttcattttatttttgttttcaaaattcagtttttctgtacaattttgatggaaaatttgttcattaaggtaattaaattccacttttaattatacgtgtttattatttggaaaaaattaaagatttcgtggtttctaaaatttttcaaaattcattaaaattgcttacccaataccgttcatgctgtgagcgcaacagcgcctgaatgccaccggtgccggcgcccaggcgcgcgtcgccaagtgagcgccgttggcgtaatggtttcggaatcatagacttcaaattttaaataaaattattaattaaaaaaatttttttttaataataataattagtcactttgggccggatgtggacgagcgtttgcgcctccacccatccgcgactgttctcggcacaaaggcggtaataacctgcgcattccaatcgcgcaggtgcaaaacgaatggtgtaagtgtcgccaacatttgaaaacttaaatttttaataaattatgctaaaaaaaattaattaaaaattttccttgccatatttaaatgatgtgccaggaacggtcccggcatttcggcttggggggggggggacacccctgggcgacaacctttttttttttttgattttcattgctattattttgtagtttttaaatttcacgtgcgaaggaatctttggggggaggggggggg

SEQ ID NO: 12009 - DNA, 1975 bp, Heterodera glycines
cccctctcccctcacccacccctgggaccgttctatgatgaatgcatacacaactaaaaaatattctttttacatattcttaaaaattaaaatttaatcgaaaataaaaatattttaaaatttgagctaaaaataataatatttcacttttattaaaataataaataaaattaaaattgaataatttaattgcttatgcaatattccaacaattttttacctcaaaaaatccaggactggatttgacgggtcgatcattgaagaaccagcggattttgggcctcggattgcccaccatcagacagtccacctcagccaattcgccttcattgatggtcacttcggtttggaatgcgcggatgaattcgggcggattggcaaggctgctatagcctgaaattttttgaaaaatatatcactaagaccttaatttccgcaaaaacctaagccgggtgcactgagttccaacccctaccccgtttctttcccgcccgaaaatttctttaaaattttttcaaactcaaatttatcgagtaaattttttagaaacccttttatagaaattaagaaaataatttttcgaaaaatttttcttgcgttttttcgaaattttatgctgaatattaagtttttcagaatttttccaaaaaatcgccaaaatttttcagaatttttttcttgaaaattttcttataaaaaccttctaagattttttccttaaaacaattgttttagaatctttttataaaaaattatcggggagaaactacgcatatgggagggggacgatctgttccgacctaagcctgggtcctcaaaatcactgctccgtgccgactcggcacggtccgatttgctcagtgtgtacacaatgccacgcggtgacgaggccacactttggctgccccaactgcgctgatcagtatgccgccgttgctggtggtgatcagtgttgttattggcttccattgtttttgaagtgccaaaatcgccaaaattattgttttggtaaacggacgaagaatgctgctgttgaaacagctgaatgttattaatttattaaaaatccaaaaaatggaagcaaattttgctgagggaatgataactttttgtgatagaagtgccggaaagtttggcacatctaaggttttagaaaattgtctaaaattcttgttgtagggaaacaaaaagtttttgggattatgttccatttggcacaaaatggagaataaaagaccttttaaaaaattaaaaacttttacttataatttgaaattgtttgaacccatttttgaaatgccaaacttagattcgaattttaaagaaattttgtttttattgatttttttgtttatgtttgcctgcggcgaatcaaatccactggttggacttgttgtagctgttgtcgtgaatgttgtttttgaggttgtttctaaaaaattagatttaaaaaattaaaatgtaaaaggtttttaatgatttgaaaaaaatttcaaatttatatgaaaatatattattaaataattaatcaaaccaaatacaaaaatgaaagttttggggggcctaccatcaagtccaaccagtacattcaatgttgccgatgagtgtgcttggcccactttgttttgtgcttccaccgagtactggccagaatgtgcaagcgaaacacttaattaaacgataatatatattttttttaaacttcaaatattaaaaaaatatatatataaatatacgaaaatatataaattaatttgaaattaatcactattttcgatttatatcctttgagaatttaaatattcaatccatttgcatcaataggcttatagaaccggattacccagaaatttttttgtaatttcgaaaacaaaaagaattttagaaaattttatataagaattttaagaaaaaaaatttaaaaaattattactagaaatgttcaaaattctaatgatgaaatactattgttttt

SEQ ID NO: 12010 - DNA, 1890 bp, Heterodera glycines
  unsure (1)..(1890): unsure at all n locations
cagacaaaatcaatttcttacggataaagggaggggagggaggaatgtgtgagnaatgatgggtancagtgtatggggaagggagggaaaagancaataaatgagcaaaaagcaaagtaaacnncnaacatttttatcgacatatttattttgttttattttccagtttattttacattttaaaagtttcatttgaattgtaaattgtagcctgctaaattatcacatcataccgcccaattgaataaaagaaaattctgaaatcttaaaaataatctattttcttttttttcagactttggctcaaattttgaagccattgtaaaaggtgacgcgtgaaaataataataatttgtggtgaagattgaattaaaaacttaaattttatacttaattgtatttttaaagaaaatgataataaaaataataattactttgtacataagaaaaattcttaatcattttccatagaaataaataggattaaattcagttgctgcaaacaaaactgatccagtaaaaatataaatttctgaaaatgcctataaaacagcttgtctaaattaaaaataacgaaaaaataaaataaattctaaagctgattattaaatgtttacaaaacggctgtaaataaatgacaattttgcctaattcattattttatataaagtttttaaagaaaaatatcatttactcttatgcaatacgacggaaacttaagcaaacaaataatacgcttaaatacaaaattataaataatgtatattctatgctactaattctgtaaacatctaaaaaaattttaaaaacatgcaaaattaaataatatattaaaaaaatttcatgtcctaatattctgccgaattaaaatgaatgaagaaaattttaaaaataaatctccattcatagccaatattattttgtgtttgtaattcattttggcaggagtttggtcgaaatttggcattatggtgattcctttgatcggattatagtcaaaaacctgaaaaatttattttaattaataaattaaattttgaatttaaacataagggtgaagattttaaaaagtagttcaagaaaaaattaaaagttatatataataaaattaaaattaaatcacgcaatttattatttatcccaagtaactcattaaacttgtctctataaaagaatggatacttacatcgtttttaatttaatttcaattatatgtatgagttctgccaaagtgaaagaaattaacacgaaaaataaaacaaaagactgaagaaaataatataaaaaacaaataaatttaatgaactgaataattaacaaaatatataatgattaacataagcagcttttggtaatacttcaaaacttgtttaacatattcgattcatttaaaaacaaaaaaaaatagaaaaaagaattgcataacatgaactcaggcatactgggtatggagcaagaagtaaaattaattatttcgagtcatggctcgtgttttgttgaattttaaaaaattaaattttaaaaaaatttcgagggacaagaacttaattgacaccctaattaagacacagattttttttatttgtttgataaattaataaaatcagataagtctaagttaaattataaataaatatgagaaaagcgtccgttttgtataatggaacaattttatgaaattattatttaaaatttcacagggtactaaacaaatggaagagatttttaaaatgtcgttcaatgaaagacagactaatgacacaaaaatttgaatanatacacaattgatgatattaagaggtgtaaattanagaaattgatgcttactaatattattcatttatgaatttaaaaaagtagtaacataaaataaaacttangaatataaaa

SEQ ID NO: 12011 - DNA, 2408 bp, Heterodera glycines
  unsure (1)..(2408): unsure at all n locations
ggtaagtgagtgttcccagggacctttcagctcggcgttaggcctcgttttgtacgtcgaacggcacgcacagaaaaatggcaacaaaaccattaagttcgccaccatcgctgcccctgaattgcccaccatcatgcgcattcaacgacggcacatgtctgaagcgatggcaaacgaactgcactcgcagagcttggttcaaatgcagcttgtgaccatcaatcgtccgcaaggagtgctcatttcacagcactacttcctgcccatgggttttcctttcaaaaatggcgacgaaattttggcattcaatgccaaaataattgccaaggtcgacccgaaagccggatttatgcatatccttttgacagcaactccacatgggaacaaattggatttggagagcgagttatggcatgcgcagtcgctgcagaacgagctacaattcaccaagagctgcaacgattaactctcatcacggagctgatccgagtcgaagaactgcaggaaacgcaggtgaacatcacgttcaggcaccagctgaactccgtggccgaaatgatggacatgttgcaaatttgggaagaagacacggcaatcaactgccgcgtcgaccaaaatgacgaaaccaagccatgtgccctcggatttggcacaggtaagacgtttacggcggcaggaatcatgtctgccatcctgcgcgaggatccgtcggcacgcatcctggccatggcaccgcccaacattgccgtctgtaagctggtgctggaaatggagaaagcactgcgcattgagggacaacccgagccaatgatcgctctgttcagcggcgcgggaaaaatcaactatgctgaagagttgaggcgcatttctcagcacctcttagcagccgccgtggacactgaggaattccgtgagcatttggaaataccagacacccgaaaagtggacaaatacgtcgccgcgtgtgcgcgtaacccgagattggcccaagaaacgactgtggcccgcattctgaaagagcatgctgagcgccgcatctacttctgcacactttcatttgctgaacagacagctgaactctttgccggcatcactcatctcctggttgatgaggcaggtcaagccccgtaaacacaggtcttgtccctcgccttccgcttgccgcatctgcgaaaattgatgatcaccggcgaccacagacaattgagtgtgcacttgccgtcactcccgttcggagccagggaaaatttgggcctcgacacagtgatccagcccctcgactcatcggaatgtgtcgacgtcacaacgctcagcgtctcctaccgcccgcacccgtcaattgtccggtgtgttgacatagcattttaccgcccgcacggagaaaaattgacacccgggcgatcagctgaggaacgtgccatgctcacggggcaaaccgtcatcaaactcccggtaaaggacagcccaattgttttgattcaccagggagaagaagcggaaccggacgagttgtcacgttcgacctcaaatcgtgcgcagtctgacaccgcaatgttcctttggcggttggcaagggcagtgccacaggacaccatcattcgctgcatctgcctctacaccgcgcaaattgcctggcgccggttcatcgacgaggcagtgcgtgagacaactgtggttggtcctgactccgtccatgccattcgacaacccaactgccaatacgatgaccgtgggcgccttgtgctcaaaggggacggattggtgagatcagaggagttttacgcccggtggagaggtaatgagggccgacgatcaggtaatggtaattcccgctcgggagacagaagggagaataggtttaatccttattcagttcagggaagctcgcgcggaggcggcggcggcggcggtggcgataggcggtcaagacgacgatgaacgatggaggacaattcgctgagacggatggatgatcctcggcgctgacgtttgttttccctcccgtcccttccctcaattttgtacatttcatttccatttccttttgtttcttttcttttattcatttctaaaaatgtttcctctcaatttctctcttttgtatttggattccggctgccttttctctattccattctcaaatttggggcaccactcctatacagctctcacaaatcggcactttcttctttggcaccgattcatcgcactactccgagacggaatgagctctggttgatttcctccagcatccttaggccaagactgatcaaaattttgatcagctggtgctcaggtggttggattgggaaccgaagggcaaagccgttcttggactggcgcacaatgatcaacattcatcaaggatcgcggacgatcccatggaagggngggagctgtaagggatt

SEQ ID NO: 12012 - DNA, 1053 bp, Heterodera glycines
ttgcccaaaatttgttaacaaaaatgcaataaaaaggaaaaatacaccctaagaatcgacccgaaaattttcaaaaacacaccccctgagaaatgaaaaatttttcaaaaaatcatctccaaaattaagttaattattttattgacgataatttttgattttgaaaattatgtatctcattaatggtttggcataatatttttgctttttgaagagaattttcgattttacagcccctaaattgccccacgcgaaaagaccccgaccccttaattggcgtccttcggaaaacggcaaattgtgctaattgccacaaacagatttaattgagtaattaaaatcaaacattatttggcattaaaatcattacctttttcagttacatttaccattccgtcgtcgcatttcttcgtttggcaaaggcatcaatttccatttaattgtgtcgtcacataacaacaacaacaacaattacaacaatgtccaccgaattttgaatgtttatgtctatgcaattttgcccattttgcgccaaacattcgccatttgatcctttccgatggtgttaatttggacaaattgcttcacctcacttcgccgaaaatgctcttcgatcttaacattaactcaatcaattctggtcgtctttcccaaatgccattgattacggcactctcgtcagaaatcattgaattggtcaacaatttcaaggaggtgtgccacattttcgtaaaatattttagattaattgccaattcattttcgttgcccatttttaggcatttctccatgccatcacttctgccagctatgaaattcaatttactgtttatgcgccatttcaataggtgaatgaatggaccagcgaaatgctgacaatggagaaaggctttcgtggatatgtcagtgttgattggctaattaagcgatgcccaattggggggacgacggccgcgttaaaatgggaggacgaaaattggcaatcgtcaagaattggtgtcccaacgaaaaaaaatgttaaaaattcgcagatattttttctaggcttaaaaa

SEQ ID NO: 12013 - DNA, 2315 bp, Heterodera glycines
ttacgctttatggaaatcgcattgggtgagcgtcaacatctttttgcaataataatcaaattaaatttgcgcttaattaggccattgtcgccaccggcagaagaagaagaagaagcgggacaaagcgtcgaaaaaggggcgacttctgacaaatgagtgacggacaaaagaacaacaacaaaagcagtgatcactgatcagcagaagaaatgaattaattaattgggaaatgcgatcattttgtatcatgattaaaaggaattatgaagagtagttgtaaaatatgtgtacatgtaaataaatctgatgtataaaaaatgacaaaaataaatgggaaatcaagttttttagaatttgtgtaaaaaaaatcataaattagcatttttgcacaaaattcggtatccagagaattatattcatagatgaaacaaactgtgaagagcaattatcagctatcaatttacaggattttacgggattcccgctcccgtaagacttcggactccaactcccgtaaatcattttttaccgggctctagttttcactaatgtcagaagaaatgattagggaacggatttcaatgcagaaaaactgacaaaaagacacccaaaaaaggaaaaaaagggacgaattgaaaaaaggaggtaaaaatttcatgagcttagaattccattcaaaaacagacaatacttggtgtaaaaatctaagttaaagtccaaaatcccaaacaattaatcacctaaatgtattcaaacaaaaaaagcaacaaataaatatgagatgcaattatccgatcactttccattcgtaaatgatcgattaggatttctcatttgccaataattcttcactttttcttgcgctgtccgcttggcccggcactcattttcagaggactttttgcattctttttgtccgcctttggtggagacaatggcctaaacgaagtgcaatttgaattacttttaaacaaaagaaaatgctgcttccactcacccaatgcaagaagttccacaaagcgataagtcgacattgttcaatttgtccgtcttttcgtcctcccattgaattgtctccccaatttggcatcgcttcattacccatcgctcgtgccatttataaccgtattctttcttcgcattttcatcactgttttctttctccaatgtcagcatttcgttggtccgttcgttcgtcaattcaaatggcgcaaataatggcattgactcaagaagtttaattcgaattatgtaactggccgaagaaatggtggcacggagaaatgactataaaatgggaaacgaaaagcaaatggcatctaatccaaaatcttacaaaaaagtgaccacacctctttaaaattgtcgaccaattcagtggttttatacatataaccggaacaactcaattgctttggctggccatcgcttctcggcatttgcaaccatttggacaatgcttggccagcagttgcatttggcccttttgcatcagcaaccaccgcgggcaacaaatcatcggaatcgattgatttgacattgaggtcgtaaagatttgtcggcgaagtgtagcgaagcaaattttcaagatgacgagccttggcaaaattcaaatggcgaatgtttggcgcaaaaattggccaaattccacgggcaaaagcattccaaattggctggaaattcttggctttataggagaactgcggcacgtgcaaatccaaattgatgcctttgtcaaaaatttgctggttggcacggagaaatgtgatgacggaatggtcgatgtggctgaaaataggaatatttatgtccgttaatccatgttggaattgaattaccaaatccgaagatgcttaaaacgacttttgttggtcagcgaatggtcgggcaacgaaaatcgcacacttttgccatttctcttctcaacaaacaattttgcttttgttcctttcttgtcaattctaattggtctccaaattgtcagttcgcttttgccatcgaaatgtttgtccaccaacgcattgaaacgtggcgaaagaagtgccattttgagaccgagttgacgacgacgaaaaagcggcaaaatgtccatccaaatgtcgttgcaaatccaactgaaatgtggaaaaattgtattaaaaattgtaaatttttaaaaatttcttaccgtcggctcttcgttttcattgccacacggagacttcgccgatttccaaatgtcacaaatgagcccaacggtttctgttgttcagttgcagaaatgaggcggtgattggcggaggaaagttttttcttttttttgacgggtgccattt

SEQ ID NO: 12014 - DNA, 746 bp, Heterodera glycines
tttcgcaccgcgtggcgcgccctcttggcgggcggccaacaacactaaaaaattcactatagtaaaattggttaaaattaattccatcccgcgtttttggggtgcattacgttgcccaaccatttcctcccacatcttttcactcccaccccaagaaaattgaaaaaatatttaaaactgtaattttttttgtacccatctttgattcatacaaaaacaaacttacacaaatggcggtcgttgcgatggccaccaccaccaccagccccccgccaattaacacccttaaattttaggacgtcattcgtaaaaattcactatttctaaaacttacaggcatttcctcctcctccttttgctgctttggctggcacggcggcacgcagtccggcggctccccgttaacgatggggccgaggcgggcggcagcagccttttccaaaagccaaaaggccacgccaacggcaaacaactgaaatttttgaaaaaaataggtaaataaacagtgaaaaagaaaggagcattgtttcttcatatttttgttttttttttaatttgcattttgtaatagcaagttttgcatggaaaaaaaccacgagttttggttcacctatgttgataagcattaaacagtggtcgaattcagtgaaattgcggtccaaaatttagcatatatgccaaaaataccacaaaattaataaaatggtacacaatttttaggcatataaacgcaaatttatagggca

SEQ ID NO: 12015 - DNA, 1437 bp, Heterodera glycines
aatatgtgagtgagcaaaaacattttcaaaaaaaaaatcatagctttaattgaattgctaattgctatcaaattagtaattttggatacaaatttctaagtaaattagcccaattggctaagtgttttttctgcgccatagaattccttaattcaattttcaactttttttttagcaaattcccttcaaaacgcgcatcagtgagccgctcagaaatggacaaacggtgcacgcagtgggaaagatcaaaatgtacccaaaaaggtacgtaaaaatagaatagagaataaacaatatactgtataccgtaaccccgtcaaaatttgtgaataaaatacccaaaacggatttgcctggaagaattttatgccactgaatttcgaattcattcctactcctacaagaataccgaatattcaaatataatttggtatttttagagtggtcgtaaacttccaccagggtggcagcgattatgacgacatgccattgcatttgtccacccgttgggatgaaggtaaataaaggccacggatcaaacagatttttccgaagattttgacaaccgtaattatttttttccgaaatagccaaaaaaaaaaatccatcgagaatctcgaccctaaattgcattattccatctttgtcaggactcttttcgggcaatgtcgtgttcaacacgtacagccgtcggaattggtctgaaccggaggagcgagtttcaagtccatttccggctgatggagaattcgacattcgcattcgacttttgcctggaaaattccaggtccaaaaggatttaaatttgaaaattaaaatttaattctggcatttacttttgaaatcccttttttaaatgcaattttttgtaattttaaaattgaaaaaagctcggactaaaatttcacgagataacgaaattccagcttgaaacgagacgggggagaaagactccaaaaccgttagttgtgattcgagatcgagacttttgagagcactattagcgccttcctcgtttccttttttgcatccccgcttccgtccccgattatcatccacgtccttgaatacttaacattttttgtgaataaaattaacttcagtttttcctaattttgcttgtattattttcctaattttgcttccgaatttttaggtgtttggcaaccgtgtggaaattggcacatttaaacaaagggccccactgactggagtcagtttcacacatttggcattttcacagatttaattggccctaattacccgaaggtcaaccacatttcgattgtcggcgatttggagaatttgcgcctctttcactatggtggcacttccttcccgaacccatacaatgccattgcaaagcttgtgccgtacagcggttggacgtttccgctctcccgacaggttgttttatcgtgtttttaccctttgtcg

SEQ ID NO: 12016 - DNA, 2420 bp, Heterodera glycines
  unsure (1)..(2420): unsure at all n locations
cacgtgtcaattcgttacagtgaaggcgcaattgtacggacgnccatgaatgcgttcagtgngggcgaggaggagcgcgacgggggcttcccattgnccaagggtgaaatgtcagtgtgtgggaaagtgaattactgtacaaaggcagtgagtaatgtataataccagggaaatgggggagggggtttagtgaaaatttgaaattttacacccctatttatagataaactttttatatcaatagcatgttttttactaaaatacaaataaatgtattcagatttgatactattgtcacctaaacctttttggttttgtgtttttaatcatctaaaccctttttattttgtattttacaaattttacatcatctaaacttttacccttttgtcatctaaacaattatggtgttttgtgtttttcatcatctaaattaacatttacgcttttatcatctaaaccctttttgctttgtgtttttagattatctaaacatttttgattttgtcgtttttactataaatatatgatgtactcatctaaaatctttttgttttgttttcatcatctaaacctttttttttgtgttttgcatcttttaaacttttacgcatttgtcatctaaacacttattgttttgtgttttacattatctgaaaccttttttgttttgtattttgcatcatctaaacttttatgcttttgtcatctaaaaactttttggtttgtgtttttaggtcatctaaacttttacgcatttgtcatctaacctttttgttttgtgtttttacatcatctgaaaccttttttattttatttttatcatctatgcctttatgatttagattatctaaacgtttctttcgtcttatatcatctaaaaaccctttttggtttgtgtttttagattatctaaacttttttgattttgtcttttttattaaaatatacataatgtactcatctaaaccctttatgttttgttttttcatcttctaaaccttgtattttgcttcatttaaatttgtacgcttttgtcatcgaaatactttttggtttgtgtttttacatcatctaaaccctttttttgtttgtgctttcgattatctaaacttttacgtttttgtctttttactaaaaatacttgacacatatactcatctaaaaaccttttttttctgggttttctatcatctattttattactatgttttttaactaaaaatacatgtctacagttattcttacttgacagtaggtttataaaaatgaaaattttcagaaattttcaataacataaaatttttaagaaaaatcttcatttttgtaaaacttgaaatcaaattcacgaaacggctgtgaaattttcagcttttgaaacattggacttttaaaataggtttataatgtataaattttatgaaattttgcaggaagagcattttcaaacttcattaaaaaataaaaaattatataatcctgccctgaagataaaactaacccaagccaaaaaatagtcataaaactcaaatgttaatttaacaaaaaaaaatccttctgatttttcagtttcgaccttaccattgtgcatgagcctgcgcatttcctagtgattttgaatgggaaaaaattctgcacggtatgccaaaggaagtgatcacaattagagactggaaatttcaaatttgcggatcccgctgcgggattggaatccaaaattttttgcgggacgggatcctgcgggattaatcccgcaaatcccgcatttataatttgcgggatcccgcgctggattgcgggattttggaaattttgaaaaaatttcaattaaatttcaaaaaatttccaaaaaagaaaaaatacctgacattttgaaaaagaaatttttaggggctggcgggatgcattaaaatgggcgactaagatttttcgaatggatcaaacggtaaaaagagatcgggaatcaaatctgttactggtccataaattagactattttttgcttttcaaaaccgcttttttcggagcaattttttcaaaaacctaggaacaaaggggcccggcggtgccgataggcgccgggaatttttttattgaaattttgtcaatttcttaactgttgtccaaaaataacgaaatgtcgcactttttgactcatttctacagcaggattaataagtaaaaaccgattcggcggtgccgataggcgtcgccgggaaattttttgcaaattctagatgaaacttgagatgaaaaatggatttaatttgattgaatttattataaatttattcaaaaattttgtcattctgttcattaaaattttcaaaaatcaatgaaatcccgcagaatcccgcacaaaaatttcaaatttgcggatcccgctgcgggattggaactcaaaattctttgcgggacgg

SEQ ID NO: 12017 - DNA, 4223 bp, Heterodera glycines
aaaaacctcatctgtgacgtcgttcaaaatgcctgtgtactgttcaccctcgacaaattcgaccaccacttgtgtgccctgcaaataaaaggtcaatcgcaaacaaaatccagcacatacaataagtttatttttgcagccggcaattgttggtgcttcttgctcgcgtttcccaacattgtcctttgtaacagatatcataatagttgtttaaaatgactcagattttaatctgaatatgaataaagtaaaagtcaggattaccgagcatttggcttctttaaccaatttcgaataaccccggatgcgaacccgaaaaagtaaatttcaaaattttactgtcccaaatcaaaattttaaaaacgatagaattgatttaaaacgactaaaaacgacaaattatgggcgagctgggtcggggtcattttggcgcagacaagtttaaagattgataactttttttaattcgaccaaataaaataatgttgatattaatcaataggtctaaatgttctttattagcctgcaaaatttcaaaaaattatattgggttttaaaaaaagatatggcgcgctgcgccaaaatggccaggaaaatgcaattttttgaggttttttggccataacttttttgtttctcagctaaattttttgaaactttgcaggttaataggcactatcaagccacttaaaatcataccaagattatttaattttgctgtgaaatcaaaatgatatagagtcttgcgccaaaatggcctgcgccaaagtggccggttcccggcgagcttgcagtttttcgtataaaaaacagttgaagtttacactctctaactgggactcagttatcaatagccaaaaataaatgtaaaactaaagttttattagcacctagtttctgtgtctttgttttttgattctaaaaaattgtgaaaaaatctatttttgcctattttggcttttttccccgaagaacgtacttttcggttttgtggtgatccccctgaaatattcaaataagtcatttctagggtaatttgtagcgctgatgacgaatatgacctttattttgcaaaatttagaacatcgaaccttattcgaacaaaaacctcgaaatttaatttcgaccaaattcaaatatgcaacaaaactttttggcacctacatatgtatttttccatttttaaaaaatcgtatccccaattatgaacggtacaactgagtacctagtaccggtttttaccggtaccggtactagtatcggttttcccagtcaaaaagtaccggtttttcaacccgaaaattaccagtaccagtttttttacaattaccaattaccttttaaatgttttggtctttttcatctcgttgttttctaaaatatttatttaaatatttctgcattttttaaatgactacccgacttttggggtttgcaacttgtggacccgacttttaaagacccgattcaaaattctgctacctcatcgcggtgagtccggaaacagagttcatttttaaaaattccaaatgtcgggttccctaagtgtcgggtccccaaatgtcgggttccctaatagtcgggtccccaaatgtcgggttccctaagagccgggtccccaaatgtcgggttccctaagagccgggtccccaaatgtcgggttccctaagagtcgggtccccaaatgtcgggttccctaagagtcgggtccccaaatgtcgggttccctaagagtcgggtccccaaatgccgggttccctaagagtcgggtccccaaatgccgggttccctaagagtcgggtccccaaatgttgggtcccaagttgcaaatccccaaaagtcccttaccacgttataaatataaatccgcacacttttatcatatgaatttatcgttaaaatattgtttcaattgaacaatgtttgggtcttgtgaatgtatttttggacttcgtctggctttcatcagaataacggctttcattactcattttcagacggacgtcactttcgttttctttcatttggtaattaaaggctaaacattaattagataatcctctaacaaatgtttaattcttctcacctcacaatttgctccgcaaattgcctcttctctttgtactcctccgtgtcgcccatttcgttaaaattccgtccaccgcctcgcttctccaaattcagagcatttatcgaagcacccttttccccaataaaagcgcgtgccccgcctcgtttctttccattcgctcgtccgtcaaaattgtgattgttcgtgaaaaagggcgacgaggagggggggttcaccctttgcacttccgaatcatcgttgccaaaattgtccaaagagccgagcagaagtgaccgccgaggatgcttaaggaagataatcccctgtcgaccccctctttccagagattttagcaaaaattttggttaacccccctccctttgttcatcggaaggacaaggcgttgtggagcccaataatttgcagaattaaaagggcctttggtgcctctgcaatttgctattataaaatgttgtatgcaggctctatttgagtttatcccccaaaaacatataacctgaaattcggttcgataatttttgatccggattattagaattttccattggtatttattaaactttttccttggcacggggttaatattgttggcatttcatttttggaagttccccgaggcaataagcaaatcgaatgaatgttgcccactcgaaaaatgagcgaccgccgccacgtttggccatccatccgccgccaaacggcacatcgtcaaattgacgcaagaaatatcgtccacccgctgtaagcaatggatttgttcgatttgttctccgtgttccacctcttttccacgctccgtcaatgtatccgccgccgtaaaagggcctggcaccaccgcgttttgtcccttccggcacgaaactgtccccgtcagatgaaaggtcactcatccgaaataaccgggcaccggcacgcttcagttctccagccaaattagcatcgaaatcgtcgttaattgtctgaatgccacctgaaaacggaacggactctgacaaatgaattggaaaagtgccaaaatcactcgacgaacctccaaaggcacgtccgccgcttctcttctcattcggcggtgggaaagcagcagaagcaaagagattgaaggcgcgcgcaccgccacgtttctgttggtcggacagaaaaggcgcgccgtcgtccgaaacggcacttacgaagtcaatgcacgacaaaaggagaagggctgaaacaaacggagaaatctctcaaaaagacaagtgtcgctttttcaggggtttcgtccgccactttcaaatgcctttggcactgtcttttccttggcattttccatttttctcttctcttatcatttccattattttgccatgtgactcgtccaattttcgcctttttctgtctcttcttaatcccttgtcatattttttacttcacaaaatgtgttcgtttgccttaaaaattccccagagaaatttgctccgccgttgctgatcagttttgtttgttgcaactgtttagcacgttccgccataattaattgtgccattggcccttctgccaaattcgctcgcttttccctccctttcctttgcttttctcccccgtcgcctttgacaattcccactcaattggccagaagcatcgctgattatgagcaaatgaagttttgcggacggaagtcggtcgagtggggcgaacgacgctttcgtttgttgacgttatttgccgttggctttgtccatttcggttgaagccaattttagtgcaaaaatttgttttgcgtaattctatcacaaaaagaggagaaaagggagaagaaatgccatcccattcaatcattcaattcgacaattctttaactgcgtcagttttgcgacaaagaaacgaaaaacgaatgaatgccaaagtcagtcaaaagcaactcacttggcattcacttattttggcccattccttcccattttgcttcaaaaaaaagagataaaataactcattttccgaagaaaaattaattggacatttaaacaagggaataatgcaaatgggaaggaaagaaataaaaaaataatgggcaaaaaataaaaacgaaattgccttttagcaaaaaaaggaccaacgaaagtgccggcaaatgaatgcatagaaattgattgggaaa

SEQ ID NO: 12018 - DNA, 1349 bp, Heterodera glycines
ttttaatatagaaaataaaataaattcgtaaacttcatttctgttagtcaatattgttcttttttcttaattatcattttttatgaatatctaaatatagcaatcaaattgttcgagaacgtggaaaattccaacggccaacggctgaaccactttttccttataaattttcaaaattttggcgcatttataattgagtttaattttctgaattaattgaaaatattcgctcattggggctaaaggagtccaaaaattcattttttttttaaatatttatataatatcttttgacaatttattgtttatgttttatgagtttttagcaattatttggaccattaaaaacatttgaaagaaaatgattggaaccgccaaaaattaaattaatcattgtaaataaattttatcggatgagaatcgttgtggagaaaaaaaaatcaaaaaatacacacgcattgaaaatgaaaataaattagagaataaattaattgttgttagagtttttcccgagatgttaaaataaatggcgttccgtagacaaagcagaaaacgaggacaacgactataattcaagtcattctaatgaagaaaaaagagctaaatgaatatttattaaaaataaaaagtggaaatccgactttaaatgatcaagaaattttggcaatttagaaaatctcattaacaactttaaaatattgaaaaaacgaaatatatttgtaaacttaattcctgttagtcaatattgttctttattcttattatcatttttttattttggtgcatttataattgaattaatttaaatgactttctcaaagaagattttctaaattattttaaaatttttcgctttttaggcctaaagaggtcaaaaattcattttttaacatttagataatattttttgacaatttgttgtttatgttttatgagtttttgcttttttggcaattatttgaaacataaaaacatttgaaaataaaatcatttggaacagtctaaaattaaattaatcattgtaaataaattttatctgatgagaatcgttgttgagcataaaaaatattcaaaaatacacgagcattgaaaatgaaaataaattagagaataaattaagtattgttagatgtgttcacgaggtgttcaattaaaatggcgccccgaaaacgaagaagaaaatgatgaccatgaagacaatcagcccaagaatcaaccaaggccgaccaaacaaaaagtggtggcagaaggaaaatggcgaattgcgacatcactgaaaataaaaatatattaatttacaaaattaaaaaattcactaaaagaaacaaatcattaacccgagtgggaaa

SEQ ID NO: 12019 - DNA, 2007 bp, Heterodera glycines
  unsure (1)..(2007): unsure at all n locations
tcagctgcaatggcaatgctgaaaatgtgtaacagattaattcagaattagaattaattaatataacaataatttaacactgaatnttctgtttatttaactaatgttatataatttattaaactaattaaaatgcatttttaaataattatataaacaaattccacttcctacccacctgctgctgcgcttggtgtcttctttggccggacttttgttcaacggtttcagtactttctccaacgatggtccaccagcgatatcgctgtttttggtgttgttgtcgtcggcgctactttttgtctcatccgtttgtccaagcgaattgtccatcatttggtcacggcactgcaggaccacctgatttggcaaatgatcggctgcggtagcattgctgaaacttggtggcaaatttaattcataaaaagaattaattaattaagaaatattttttcaaaaatcacaaaattagcaattttggtgaaattttgagaaaagtgcttcaaaacaagacaagtgcgaaaagcaaaaaaaatcgtcgcccgggggaaatatccaccccccccccttaagccgaaatcatgggaccgtcactgcccaagtctctaaaaattgtttccgggcttgctcaaatggcatttactaattgaattgaactcataaaaatgagtttttatacatttatataaacaaactccgctgcctgccacctgctgcgcgtggtgtcctcactgtccgcacttttctccaacagtttcagctcctcctccaacgatggtccaacgttgctctttttggggttgatgtcgtcgccgccttcttcgtccaactgttcctccatcttctttgtctgcttcttcaactccgcagaaagtggtgtaaatccgagcggacatgaggcgtacgaagaggggccaacagtgctgacgttggtcagcggattttgaaaaaaaacgctgctgcatctgtgatgaatgccgttttttccttctctgcggcgtccctctctgcctcataacgaagggcttggcccttataaaactccttcgactccttctctttctccttctccttccgctcttcttcccttcccttccgctcttcgtcccttcccttccgctcttcttcctttgccttccgctcttcttccgtctcttttcgcgattcgtcaagttgaaaatcctgtaaaaaataatttatttaataaaatttaatgttaaattgtttaatattaagccaaaatatagtcagtctatccaatctcacacctttttcttgaggtcattttctaatttggccttttcttcggcaattagtgctttttgttcttctgttaggaaaagctgttcgtgtgcctttctattctcccttttctgcttttctagttgttctttaagcggttgttcatttgagtccatgttagagttaaataaaatatttttgtaaaagatctgcagaataaaaatttaaaaaattttcccacaaaaaaagaataaatggttatattttagtttagtggataaataatttgaaattttttatgacacttttccaataattaagacgtgtcaatgagagtgagttggggattaatgcataaattctcattgctttcggcaaacttgcactcaaatttttagcaaaaatcaccaaaatgaactattcaaatttgatttgacatacaaatctcaaaaagattatcggcatagacacgtaaaaattaatgtacgacaaaaaattggacattttaataaataatagaacgcataaaaattaaaggacgcgcaaaaattgggccttaaaaaataaaagaacgcaaaaaaattaatggacgcgcaaaaattgggccttaaaaaattttttaaaaacacaaaaaattaatggacaaactaatgcgaactctanatattataggctaaaagatgggacacgtaaaattaatgagacgcgcgtaaaaaccctacagtaaattaaaattacagatcaggtcactgcaattttctattt

SEQ ID NO: 12020 - DNA, 1387 bp, Heterodera glycines
attagtgtaaagaaattgtgggagagatagcaaacggaatggagatacaagaaatggcatggctggctttggttgaataactgtgaaagtagtagagaagcagagggtcattgcgacagagacgcagagaatttgagcgctgcggggcgcataaaaattggcaaaattaacaacctcggcggatgggactggaacactcgaaacctaactcattagaaaatatgaaggacgataaaaagctagaattgtgcgaggccaaaatttttggtaaaaaccgagaccgggactgacgggaccataaatgccgtgaccagcaatttcaaccgggaacatcaggcatcgctgcggaacttttcaaaaattaatcttaaattcaacagattttcaccaaaatgtttaatttatgccttttaaaaaattttgtttttaattacaattgtaggagaaagacaaatcaacatttttcctttaaagaatattgttttttaaaataacaacatttacataaaattttgtattaaaaaattttttggcgtgaaatttcacttggaatagggtaggccgggctcggttttttgaaaattcaatacccggtacccgacccggtaggtccgggtacccggatacaaaatcggaattttttaaatattaaattatagaagtagacagtttattctgtgtagttacttttaattaaacccaaccgaaagaaatattagaaaaaccataaaattttttgaaaaaatcgaactaacatcatctggtcatgcaacggaaatggaaatttaaaaatttacgaatttatttgttttttccactttcttagaagagtgtctgttcaaatttccaataatccggcaatttctctatcactcggtgaaggagttcctttcttcattttataataaatattcattttgcttattttttcttcattcgaataccgaattccatctaaaaataataaaatataaatataaaataaaaatttaaaaaaaaatcaaattttaattcaaattttaattgaatcacacttttgtcaatttcaattccaaattcttttttccatttaatgaatgttttttggtcaatgtccaattctttcgcaaattgcttctgttttccttttcttaaccttctgtaaatctcatcaattcgttcaataaattcttgctttttcttttcataataatttttatcatttttcttaattttctttaaattaaattctttttccatttataaattttcgttcgattgattcccaattttacagcaattttttgctcaattttattccaaatttttgtggaatatttcccccgtttcttcattccctcttttaatgccagaaatttatgaataatttcgcattttttctgatcat

SEQ ID NO: 12021 - DNA, 1435 bp, Heterodera glycines
atgcttatttgtgtttgaactcgaaaaggctctaaacacgcggaaaatcctttatcaattctaatgctttaaaatgtcgtgatttaaaaaaaataggcgacattcgatgctttttgtgccaaaaactcccgggccaacactaatattacaaaattattataattaaatcataaaaattaattatttgccttcatctgtttcttttaaatctaattcttgcagcatttccaatgggattattttgcttgggcatttaataaggagcgacgccttttgttcattctgtgtcatggacatttcatccatttcatttgtcaatttttcttaattaagcgaaattaatgaatcaatccattcactcatttcattacaaataatacttgctatttcggttatttagttatttagatttattgacaaagttttttcagactttttaatgtcttaatgacaatcccaaattaattaacttttaatgtttcgtttggcctccaacgaaccaaggcatcattaattagtgcatggttaattagtcgcccatggattgattaaaatatttacctaaggcccaaaagtgtggcgaaataattccccacttctcttcggcaaacgcaaaaacctttgtcaacattggcatcgccgtgtttttattcctttgaaagtgttttctgaattcatcactttcctcataaaattcttcgaaaaatatcatttccattcgctgtacaatcatttgccatttgctcgacagtttttgttccccaaattggtccctcaaataatccaaaagttgccttaatttgatcagcaaccctttcatggagtccaattctttatttgctttgaaactctcaagattccgtttgaataatttccaatattttccaagttttgccattttgtcctcatttttatcgtctgtcaattgctgctcaaaatagttaattattttcccgcataaaacggcgagcaaaaggtaatgtttgtttagcagtgccatttttaaagccaattctccctcaaacaaaaccatcccgcggtacgccgtccttagcatcgaagtgccaattatatctgaatttgtggtgtttttattgattgaatttcgtgtctttttagcacttaaatttataaattcattttataaaagtttgattggtgatacgatgccaggtaaaatgaaagcaattttatgatcaaacttttgaaaatttagaacaaaagtatttttgtcaatttttaaaaattcaagtgaatttaggcaaccaattacggcgataaatgctatcagaaaatttgtaaaattaaatttaatttttaaataacttttttttaaaaaggcttccaattttacttaaaatgtttcattgttcgcttcttgcggggggggggggggaatgctttccttaattccctagatcaaacaatattctca

SEQ ID NO: 12022 - DNA, 3721 bp, Heterodera glycines
  unsure (1)..(3721): unsure at all n locations
tttctttataaaaattcctgattgtaagtttttttgttcatctttaggctgaacggcaacgaaaaaggcagcgtaaggagcagaaaagcggcgccaaatccggtgcaaagggtgtgcagcaaacggtcggacaatggccaattttgacggtcatcagcagcagaagcagcaaatggaacagtgtcggtgtctggcaatagaaaaatctgatcaaatcgcatggatatttaaaaaaaaaataatgacaaaattttcaataaaaattatttaaccgttaaaataaaaatgctacacggatttttacagatttagtccaaaaatgaaaaatataatggtacttttaattgttttccttttttaagccagtgttgaaccataaatgcgaaatcgaaaaatttaaagtttcgactttttttcgaattcgggcctgctggggttcgaaattgatcgaaatgggggctctattgcagttctcacgaccataactttttctataagcatccaaattaaacattcttggtatcattcgttagcccaacgagtcctctattagtctgctaaatttcaaaaaatttcattgtatttgaaaaaagctatgtccaaaaatgtttcgagaaccaatttttttttaattttctggtcataaattttttgaaaacaacgaattttttttgaaattaagcggactaatagaggatttgttgggatatcaaatgataccaaaaatgtttaatttggatgcttctagaaaaaagttatggtcaattaaagttgcaaaaaatttttatggtcatgtgactgnaacacagcggcccaattttgggctccaagtacaattatgctggatttttatttagtaatcagaacgccaaaactttgcaaaacttaaaatttttttgggattttcccttgtaaaaatagaagagccgatctcgagttaaaaactagacagctaaaaaataaactgtgattcgatagagggggacaaaatatgggcctatacaaaattttaagaaaatcgcaactttggaaaaaatttttcccagggcaaagttttttctttttctctcattttgacgcactatttccatgtctctaacatataagataacacatggttcatttttttgccaataaacaatttttttaaacttttgactaattaagaaatattcttcagaattctcccttcaaaatgagcataaaatggttttatttggtctattattgaaaaagttataagctaaaaaaaattcataaaatcacgggtaaaataaaatgtttaccttttattgttcctttggcgttctgtttttattatttttttatttatttgctttaaaaaaatgaaatttatacacaaacacagaggacttgaacctgagaccccccttttggtgactaactcactgaccactaagacgaaaaaaccaacttatttgcgcttggagcccaaaattgggtaatagtaccgatcagggatggcacggaattccgacttccgacttccgagttccgacttccgacatttttggggtcggaattccgacttccgacttccgaaaatttttggggcctcggaattccgacttccgaaatttttgatgaaaagtcggaatttttcggaatttttctgagttttttttttcaaaaaattagcaatttttgtacaatttatgttaataaattgcatagaaattttcaattttttttccgacggcacctatcggcaccgccggactcaaaaaaaaacttaattttcttgaaaatttgctcaaaatcgctaaattttccattttttggacaaaatttgttaacaatttacattaaaaattacaaaatttttcccggcggcgcatatcggcaccgccggacccttccttccccacagtttctcaaattctctttggataaagcgcgccgcaaaaaaagggtgtaactttcccaaaaaaaaatccaaaataatgtaaaattacttaaaatattttgatctttttaaaaaatatagaaataaactaaaaacagtttgaaattaccttttacatggttaaaaatttaaaaatttagcctattaaatattttttaaaaatttattatattttttttgataaattccgacttccgagttccgacttccgacatttttggggtcggaattccgacttccgacttccgaaaatttttggggcatcggaattccgacttccgacttccgaaaatttttagtgcctcggaactccatccctggtggggcgtacccatagtgctgccacctccgaaaaagcttacacaaaaaatcgacgttttgatgcagaaattttataaaattaaattatagaaattgcctgaattaatggcaaattttggcgtgaaggagtgaccttacatatcaatgtaaagttcatttttatcattaagtttatccaaagttttaaaatttttgaaaatttttttttataataatcccataagaagctttacattttaccctgtattatagggattttgcgaaaaggaaaataaatattagccacgagaacgagacgccctaaaaacacgagaatacgagacgagacgaataaatcccggctttacccctcgaaaacagaacatttttgtttctaactctgtaaacgaactgctctgaaatttcaaaaattccccactgcggcgcttgtggacaccgccgtgttccaaactctcatgaaattaaaatttacgaaatcgaacaattttatgaacttttttacagccataattacctcttgatacattttcgtgttgaaaaaatttatcgggaaatttttcatgaaataaatatgtgaaaagaatcgaaaattagaatatttcttacaatataaacctattgtttttgacaaaaattgctttcttccaagaaactacgataaattatttaattgggagcataacttactgtacaagagaaccattgcattttaatagattgtcttaatggcatgcaacggctatgtctgccatgggtgtaattaaaaacaatgacataaatagatcgtgcttataaattctaaaacattattctgaaaaaaatgggaggacaaggattaccgtaagaaagatagtaatttccatctgaaaactgaaaagccacgaaacgcaatatgtaatgaagaaagtcaccattacaagcagtacaaatttaaacagttttttcgtcacttcccaaagtttgcttctccaccgttggcgctgcccttcgctcggcacaatgccacgctccacatcaaaagcgctaccattttgtgccacatttggtgccgacgtcgctggcatttgagtggtcgtctcaacagattcagttgttccattagattcatgttggacttcaatttctgttatttctccaaacccactttgtaaagcggaagttgatccatttggcacattttcatttggcacacgcttaagtcgcctatgatacgaaatgggaacggttttaattgattaaaagaaccgcgtgaccaaaaagctattcaaatgaacatttaatttttgctgtttatttgcaaaataatccggcataagaaaataattcacaaaattttttttttttgaaaatggcatttttataaataaggaattanatattggatcaaattactangggatgcgatttctaggcacaaaaatcgcgaaacaggcaccctcaaaagtccgaaaaatctcaaaatagtaaagcttt

SEQ ID NO: 12023 - DNA, 4870 bp, Heterodera glycines
ataggaaacagccctcagtttgggcaagtcgcggtatggaggaacaacggcttgagactgaccacgacgatgcaagcgaggattgactggggggggggggggtggataaaatgaaaaagcattttgaaatttcaatttcaaatttacgatgggcaacggctcgagcaaagggccaatccaaagaatgacagccaacaaaagtgtgctggagaacaaagcatggagctaaagcaaatctgtcactctccaattttttgtgcttttcaatttggacctgcgttttcgcccctaacatttcgcagagcgacgaacgcgacagagaagcgccgaagggatagacggggaagaaggagctgagcaacgaactgaggcccaacgcgtacaactcctggttggcattcaccgcgtacttgtgacgcttggcaaagattttctccagcgaaatgacaaaaacgtaacagatgaggccgatggagagcacatttggccaaaccaaaggcagcaaatcccagcggggtactgtggggagtggcatactgtacagggaggggagaggaggggtactgtaatggtgggacaacgcaaagtggcaaaattgatttactgtctgaaaaaactttgaaaaattgtccatttgtttgctttactcacccatttggaacgtgttttatgattttgacactgtgcttttcttcaattttgaacagcactgagaatccgattgagaagatcacctttaaaatttaaatttaaaatttgcttaattttaaatggaatttaataaattgagttaatttttccttaccataatcagttccaagggaagcggcacgttaaaacgttttcggaagggcgggttcaaaaagtcgcggccaacgctcaaaaaaacgatgccgcacagcgaaatgccaacggtccacaaattggcatgccaaaatgaaagtgacaaatcgcgcaacatctgacaaagaaattcaatttctctacaatttttctccgtattattgtcataaaatttatcgaaatgtcttacgaaaatgaccattcccgggcctccgtacggtttcgatgccacgccaatcagttttggcacttgcgcgacgagcacgtgaaaagcggccgctgttgtaaagccactgaccagcggatcagagatgtaaacggtcagaaaagacagccgaaagacggccattgtaagctgaacattgtaaaattagttattcatatggagtgagtaacagaatataaattgattaggctgaattaattattcaaaaaaattgggcaattaggcagccattgagagggaccaagccaaaagagggaagggattgggactattaattaattaatacctgaaaaagtcccgctccaaaagtgattgcactggtcaccaccaatgggttcagatcagcgccagaaagtgccgtggtattctctgtgccatttgtagtcaaattgcttttgttatcggcaccattcaaatgcaatttcgccagagtattgccaaccatcatactggcaaccgcaaatgtgccttaaatgattttattccataaaaaaatataaaataaaaaattaaatatattaaaaatagagaaaatattcgcaccaattgaaacatgaaatgatgtgcccaaaaacagataaaacaaggccgcaaagaagcaagtgtaaaggccaacagccggcggaacgcccgccaaagttgtgtaagccatcgctaaagccatcacaattatattattttaaattgtactaccattaattatttttaaattaattaattgaatttttaccgcatccgccgcaaaaatggcagtttattaattgtaacattattggtaaataaaaacaaaatcaccttgtggcaccaccataatgccaattgtcactccagtgaccaaatcactgtgcaaattgctgcgcaaattgtattttggcagccatccgacgatcggaaataatttcgtcaccacctttttcgggcttgtggcacgaattttcgtcgttagcattctgcaaaatttctctttggctgtttcattttcggatgaattcgaatttgtggacataaaataaaaattttgcagaaaaatctgattaaatttggagactaattgagagggaattttttaaattatttggagaaagttatcggagagtaaacaaaaaaaagaaaggctaacgtcaggaatatttaaagaaggaaaagcgaaaagaaagcaattcaaagaaaagcgcaatttaaaaagagacaaaaataataatgaaaatgaagaagagaagggggcaaattagcagagaaaagaaagagtaaattaatggaagtttaagaaaatcagaggcataaaactaattaatgaagcaaatattaagattttggaataataaataagtaagtctttcttaagaatttcgttgggtgggaatgttttggcgtataaattactaactttataacataattatacttaatgactcaatcacatttcttgagcattctctcccccccccccgcgtcatccttcttctcatgctgattccgctgatctgctgattctctgctgatcgtcgtccgttgatttgttgtagtcttcgatggttggctgatcgctctgccaaagtttgttcgatttgtttgcgttttgcgctgtttcgccgtaccaattggcgttgcattacaaacaataaatgcggcgccacccgctaattacgttggaccaaatttgtgttaaatacccaaattgggaggggggaggaggctacgcacttcgcaccgattgatggattgaattgatcgaattgcgccgatcgcccgcgggtggaagaggggggtaattagcgtttggctattaaaagacaagtcctcggcactttattattattattggaaaattaaccataaatttattttaaaaaattttttggggtttctgtcttaaataattacaaaaaacatatcgttaatttgcttacaagttaaaaatcgaaaaccgaaattttatagcagtttttaaataagcatattctaagtaatttatatgaacagcaaaagagcaatgaagaaaagtgcttaaatgtttacatgaaaaatttatagacttattgtaatttacttatcattgagaaaattaaattatggaaaagggcaaatgttgtgattaatttccgcatgtttcgaccataaggcgacaaaaaaaaaagaacaaaatttgccaaatgacgaaggttgcgcagcaaaaaagtaaaacactcgaaataattgcagtgaaaagtcaaaaaatcatttgatttgattggcgaatgaacgaacgactcgagaaaaggcaattattaatcatccaaattgtcactttaaaagtccaaagacttggccattagtgaattcaaaaattcttttttgaagtgtcctccatccttttaattttaactcagacaaaaaaaaagttttttttcaatggcaacgacaaataatttaatttaatttaattttttaaaatcggagataaattcataacttaaatcaaataaaatttattgaagctatatattaaaaaaacttatcaacattaaaaaaaacagaattttaaaattttttaaacttgaaaaaatttatgaacactcactccatttaagagggtcgccaaaaatccaaaattaatattcttttttgttccattttttcatgttttttcacagaataattcatctctcagttttggatgatagcacgcttgagaaaagaagaaaaaatgaaaattaaataataaaaaaaaacaattttatggatacaatgactttgattatacaacaaattatgggaatttgaatgatctaacaatatgcaaaagatttatcaaagactaaaatttaaaatctaactttcttctaaaatttaaaaattaaacttggaaaattaaataggaaaatggaaacaaaaaatcggaaggtgcctattatatttaagagaataaattaattttaataaaaaaatcgaatcgaatatgtgattcttattttctaggatggtaaacgaaaccaaacgctttttaatcattttttaaatttttgttcattttttaattttaaaaatttatttttgtttcatcaatcgaaatccaagtcttctttttgccgcgttcattttccgcctttgtattgggacgagcgatagtcgggatggcacaatgagtgaatttgttggtgaaagagcagtggcagcagcctttgaaggtgcagctgtggcatcctccgcagcacgtcactccgtccggcgtgccgtcgccggtgcacactccgctggggtcgcaatggatctgatgaggggtaattgggtaattaagaggtaattaattaattattggaacattaattagtggagaaattattaatcaacccaagaaatcaattaaactcgccaatgccattccgatgccggaccgggcgaacagacacaacaaaacaaggcacaacttcgttttaatttttgtatttattatttaaatttaattacttctgaatctcggtaataaggagccctaaattatcactgatcacattatccattatgttcagataccaatttttatgattttattttagtttttctttttttctccgttggtttactcaataaaataaatggatttttttcaccattagcgaaagatgccatcaattttttcgcaatcatcagtccattttcattcgtaataaagctaatgctaaacgatttgtgatggccaaaaaacggttggctcggactttgcgatcgttttccccccgccgtccctcgcgagtgcggcgtttggcttttaatggacggacgaaccccagcggcagctcattaatattcagcagtcccccc

SEQ ID NO: 12024 - DNA, 1163 bp, Heterodera glycines
caattgtttttcggttaagtttaacattgtttttggttaagttttacaattgtttttcggttaagttttacaattgtttttcggataagttaataaaatacaattgtttttcggttacgttttacaattgtttttggttaagttttacaattgtttttcggataagttaataaaatgcaattgtttttcggttaagttttacaattgtttttcggataagttattaaaatacaattgtttttcggtttagttttacaattatttttcggctaagttaataaaatacaattgtttttcggttaagttttacaattgtttttcggataagttattaaaatacaattgtttttcggataagttttacaattgtttttcggttaagctttacaattatatttttcggttaagttttacaattgtttttcggttaagtttacaattgtttttcggataagttattaaaatacaattgtttttcggataagttttacaattatttttcggttaagctttacaattatatttttcggttaagttttacaattgtttttcggttaaattttacaattgtttttcggataagttaataaaatacaattgtttccggttacttactttgctatgaaatttctggaaaaaggccaaaataggtgctaaaattcggaaatgccaaaatagttgggtgccaacccccgttttaggtgtttttaggtgctaaaaagtcgctctaaatcaaaaatggttcagtgaaaatgtgatttttgtatcctctcatatttcaaggtatcattcaatagctttaaatgatatctatcagaacatgagttacaaaattatcccttaaatataaaaaaaaagttattttcacaaaatttcaaaaaaagaagtcagaaatttttgtccaaaactttttttaatcttatgaaattttctgaaattttaaagataaatagagaattcttacggttatcgaatatataaattaattttggctcaattgcactttaaagatttgaaaattttaaatgtttataattaaatatgaatgatcattgcaaaaaaaaacataggcgtgtttaatgctttataacgttttttatatttaaggaaaaaattttgtaaatcatattctgatagatatcatttaaagctattgaatgata

SEQ ID NO: 12025 - DNA, 3688 bp, Heterodera glycines
tttcaaaacgaaatttattcatttttgagtatttttcattattcatgatttattattattctctgcagttaaactcaataaaaattatcaccgaactaagaaatcagccatttgataaggattttttaataaatacacacaaaatgcaattgtgtctttcgattcatttttcgatttgccactttattttacagttccgtaactaatcattctgttaattaatcattcgattttctaattatttcctttttctccaatggtttctcccaaaatgaattcttttcgactttcgcgttgccaagcccttctttccgtcgctttggtcgttctcagtctgatcaccataatttcccttctcatcgcaattctcgtcacgcaaattgcgacaaaatatgagcaaaacccgaaggaatttgggacagatggtcagaaatgaaatggaaaatgtatttttgtaagtgaactgatttaagagatccgttcgtccatcttcgccaatatcaattcggataaaatagcggccaatttggaggcattcgctgagaagccgcacgtcacggggacagaagcaaacaaaaaggtggccgatctgataatggaaacatggaaggccaacggactcgagggtcagttgagggacaaaaagcaaaggcatttcgagaatcagtctcgaaaattcatataaaccacccgggagtcagtctcgaaaagccacattcgagaatcactctcgactctctctccatggccaaatgcccatctttcccctgttaagatgtccaccaaatcccttacgaagtattgctttcctaccccaaatacgactcgcctaaccacgtgtacgtgctgaacggcgacggctcagtcctgttcaagacggtcggacttagtcctgacttgaccggggcaagctttgggtctcacaatttaataattgactacggtattgcatttacagaatgacagtagccccgaggcgagcatccaatggttggcttattcgccggaggggacggtgcagggacagccgatttactgtaattacggaagggtggaggactttcagacgctggagaagcaattcggaattgccaatttgaacggtaacaattattattaatatttaaattgattttatataaatgatcaggcaaaattgcggtgatgcgttacggtagaatatttcgcggggatatggtccaccacgcgtaccagcggggggcggtcggatgcattttgtattcggacccggcggaaatcgccgcggaggggccaagtgaacaaataataaataataaaaaaatgaatatgtaataaaataaaaaataaataaaataatataatccatataaaaattagatgagacttttccgtccaaaatttggctgccgcccaacggagtgcagcgggggtcgacacagaaagtgcacggggacgcattgagcccattgctgccatccaaaaaagactttcacagggaaaggacaattgaagaggcaagcggcaaattaaaagcggaaattaaattcaaaaatacaacaaaaaaacaggtgaaaagggaccccgagacattgccgcaaattccggcaattccgctcagttacggcgacgcgtatgaaattctgtcgcgcgtggatgggccggaagtgccgaaagaatggcagggggcgctgaacttcacttaccgagtgggaccaggcctaaaaagcggacgaggccaaacggtgaaagtggaggtgcattccaagttggaagtgaggtaattagggggtaattacgaggaaaataaattggggaaaagtcaaggagaataatgaaaaatgaggaaaagccaaggaaacggaaaaaatatttttaagcgaggttagggttggtagaggtcaggaattttaactaagccaagtgcgaaagtgataacgtaaaacattgaaaatgaataaaaaatggaaaagaaaaacaatttattcacaaaaaatatttgtccaaaatattaattaaaatttggcattttgccaattaataaagtgaagaaatgatcaaacttttcattatgaagatgccattcccacattttccttgtaggcccattcaaaatgtgatcggatacatttggggcagtgaacggcccgacgagtgggtgatgctcggcaaccatttcgacgcgtgggttttcggcgccatcgacccgaacagcgggacggccgtgctggcggaggtggccaagggattggcccaaacggtgcgcaccaccgggtggaggccgaagcggacgattgttttctgcgcttgggacgcggaggagcccggactgatcgggtgggaagcactcactgattatgcataattaacaaaactgatcacacacattgacaaaactatatctagtatatattttaactttcactaatttttgatcatagatcgaccgaatttgtggaggaatttgcggatgttttacgcgagagagctgtcgtttatttgaacgtggataatatttccagcaatgtcacactgtgattgaaattgcttaattaatcaattattataatgattaagcaatattcatgctgtgccctcgctttaccaagcagcggtcgatgcgtccaaatcagtccaaaacccaaatggccaagggtcggtgtttggcccgtggattgagaattacccgtcgagaacgagttggctcccggatttccctcacatgggcatccccgggggaggcagcgaccaaaagtgagtgaattgtgtcgctttgatcactaatgagggcggagccgttggacaattaaaaaacagaaaatccaatttttttagatcttttctcgactttctgggcattcccgtgatgatgatcacttacattgaccccaaacgtggtcaatacccgctctatcacacgcgttacgaattgccatttgtcaacgaacacattttcgacaacaatcagttggcggtccgtttctcaaacatttttttttgcatatttcgaactcaattctttaaaattcaggtgcataaagccgtgggcgaatattgggcggaattggcacgtctttttgccgattcgccgcttttgccaatcagtgcgaccactttggcacatcgattattggccgactatttggaggggatcaaaaaagttgctaaattaaattcaatttgaatttcgttattatttattttattcagccaatcttggatttgagcagccaatttccgagtacgtgtggaccggcgaagacccaactggacaatctgatccaaaatgggcaccaatttatggcacaggcggaagagttcgaacggcacgcccaaggccaaagtgcgggtgccaatttggcccaattagcgtgggcaaatgaccgactgagaaagttggagcaatgttttgtgaacccggcgatgggactcgcgcgggaagaaccgctcaaaaggcacgtgctgttcgctacaggaaatgacaacagttacgcggccaccacactggcaaatgtttacaacaaagtaaataattattaaaattaacaaataattaattaatcttttattttgaaagattggccaatttcgcggtgcgaaaagcgacaacgaacgcacaaaacggggcaatgaattggccttggaattgaccgttgtgcagcaggcaattcgctgtgccgtcagcacacttagcaaaggcatttgataa

SEQ ID NO: 12026 - DNA, 1592 bp, Heterodera glycines
  unsure (1)..(1592): unsure at all n locations
tggtaaaataatttgactgataattctttgaccatttatgaccaataactttttgttacttttggaataaaattttccccatttctattctgatacacaacacttaatgctagtgagtactacccatcattatgaatttagatgatgttgggccaagatacgagtttgtatgacatacattttttattttactacaaatctgccagcatttaagaaacgcccacttggcagtatttaagaaacgcccacttggcagtatttaagaaacgcccatagtggcagtttttaagaaacgacctagcacccatttgaaggtgcatttgcgcgtccacacgggcgagaagccatttgaggtgagttacggatctttggtttttaaaagtagataaaaaacaattttttgttttattaaatggatgaaaaaccgttcaagtttaaaaaagaaaaattattttctaaacttattttttaacaaatgaaatggagtaatatttaaactaaataaaaataataattaaatgattgaatttaacttattttttgattaaagtgcgaattttgtgagtggagatttgcggagaaaggaaatctgatcaagcaccgccgtacacactctggtgagaaaccgtacgaggtgagttacggatttgtgcgatttaaaaatgaagtaaaatattttatgaacgcctgtttaaagaaaaaaataataaataaatattattattatttttaaatgttttattaagtgcactgaatgtgggagaacatttgcgcagaagggagctttgcacattcatcggcgtacgcacaccggggaaaagccgtataaagtgagttgtggatttgcggttttttaaaaagatacactaatatgatttatttgtttttagttttataaataatttgaattttaataatatttattaatttctgatcaattcagtgcaccgaatgtggccgagcatttgctcagataagcaatttgcatgtgcatttgaacagaaaaaaaaagtgcggaaagaaatgatcaaatggaatttggaatttgatttcattttaattgttgttggttaagccatttttattgtcgttgttttgtttttgcgcattttccattatttgttttttcggatattttccgttcctttttatttttgttttgtaatttatcgtataaaatagcacacatattctcttcgattccattctgtttttttagaatatttttttttgaaaatgcacaattaatatttttaggaaaatttatttatttttttgcattttaattaataaaatttaaatgaaaatttggtcattagtaatttgatgaaattttgagctttgatttgtccattttgtcagcacatttgactgcattgcgacggtcgtttaatgctcattaaacttgggtctaaaaaacaattaataaaattanatttacaaaagtttaaaataataattanaattgtaccgatttggccgatncaatagacgaacctccggcgtcgttgcaaccgtttggatgcttttatgaagcgaatggattggagaaccaagaaaaattgtgtaaaacatcccaacggaaaccaaaa

SEQ ID NO: 12027 - DNA, 1068 bp, Heterodera glycines
cccctcgtttaccctgaatttttcattaattttagggtaactaattaaatattttaaaaaaatcaaagggatactgaagaactcatttttcctttaaaattggcctctgaattttcttacccaatctgagcacaattgacggttcttccttaaacgaatttaaattaattattttttaaatagttttattaattattttaattatttattttttgaaaattttttctcgcctggttgacaattcgtttttcggcccctattttttgttttttcgagtttaaaagatggattctcttctcgttctcctcatcattgtcaacgggtggcagcggacgaacgacgccaatgctaacgccaaaaacctttaaaaaattacaattttaattaatgcaattacctaattagtaaaataataattaagtaaaaaaaattatcatttattagttttacaagtaaaatgacaacaataattagtgtaaaaatattagtaaaaaaaaaatttctatttattttattagttgttatttgaataaaatatttttaatgaaaattttaaacaaaaatcaaaaatggattatttcttcaaaacaaattgtaaaaaataattacagtaacaaaaatgatgagcagtacacgaagcattacggtagggtacagtagttgttcacgtcggaaacgcacaccgacactcatcagcagggaactgagcccgaacagaacggaaattgagcacaatgaaaggtcgaagcagaagaagaagccttcctgaaaaggtgagaaaattatttgcaattagtaatttttaaaatttccattttaatctttgatcacttaatcgaaaatgattaataaattcattgagtgatcactgatcaatgtttagtttatgaaatgtctgatcgaatcgaaaactcatgcgagaagagccaaatgaatgatcagcacaggacatcaaaatcataaacacaagcattaattagttagtgtttattctgatcagagatcaaattgcggttcgattctcgagactgaatttattggtctcagacaatggattaacttgcgagt

SEQ ID NO: 12028 - DNA, 1595 bp, Heterodera glycines
  unsure (1)..(1595): unsure at all n locations
gatcagatgaggccaagtgccacacgcgggtggccacacgcactcggccanccgagaaatttgaggccggtcggaatacggcaaaagcagcacttccatttctcgtggtcgggatcgaagtccatcagaaaagcttttgaaaatttaaataacccagaaattaaaattactaaaatcccttgagggattttatattgaagtttatttgtccaatggaaaagaagccttgggaaaaactaaaaaaatcaaatgtaaattagagaaaaaacaaaaatcaaaattttttgaaaattgaataacaaaaacttactaaatttgaaaatgcttttttatagttaattttgcctaaattaaaaaaaacaaattcaaattttagagggaataaacggcgcccccacaaagtgtccaagccacgaaatgtccaaaagagtaaaaacccacgaacaaaatttttcaaaatttataaaaacaaaatgagtctaatttcgaatttttagggttttcggggtcgctgaatacgaatatatacgaatataccctttatattaccccttgcctaaccttaggcccatctgaataataaaaaactcaaattcgagacttggacattttgtgggtcagcggaataaacaataaaattcttaaaaatttattcaaaaactaaagaaaaagaggaaaattatttttcgttaagcgaaactttcttagaaatgaattgattaaatttcctgtgagaattaaataagaaaaaatgaaaaagtgattttattatattggaaatatctggccaataaaaagcaaaaaatagccaatggaattttggccagccaaaaagtaaaacgacagcttaatgggctatcgtttaggcgttaagtgatttattagccaaaagaccgatcgttggccatcaaagcagaggcgagatgagtaattaatgggccgagaattaattggtttttcttttcctgtggcgtatttgtcgggaattttatttgaatttccgattaaaaattaaaaaaaacgtaaattagtaaaatagaaaaggtacttttgtagactgactgatatttttcgagtgaaaaatcaaagatcgacggtattttgattttcgaaatattgtaaatccgaaattccggaaaacttttttccattggcaaatgcgaatttccgaatcgaatatgattcttccataacatgtgctatcatttaaatttcccattcttcgcattcattttttttttgcaatttcagtgccaaatttcaattaaaattcatgccaaaagacactctcattaaatggtagtggaataaaataattttaaaaaatttaaaattaaaaaaaaattccttttcccaagccaattggccaataatttgttgtgacatatggcggcggaagggctttttgttcttctcacgagggaatgaatggataaatgaatggggatgaggaagtttagccccccggggggagggggtaaagccaaaggaatttttggatggaatttgggccaaaaagaaggtaaaatagcagaagaagaagcaaaccgcgaaaggcttcttttaaacagcatcatcacacaacacataaagca

SEQ ID NO: 12029 - DNA, 1539 bp, Heterodera glycines
  unsure (1)..(1539): unsure at all n locations
aatgaaaaaagaaattctcaaaaagtttctttcgtggcaaaaaatttttaatttaaaaaattttttttaggtaatctattttggggttttttgatcttaaaaattccagtcctactcatttgcaactgcaatcagtgaataaaaattattttgctcaatttttggctgaaaattatgtcactattcgtcactattttggactttttggcactatttcagcatttttactcactattttagttaactatttcgagattttaagtcactaaaattcccatccctattcattatcatttcactttttttattgcgcacccccccccccccccagcaaatttgctgatggcgagtcgagagtgttggcgaaagtcgagaaaataaaatttaggacgcctggggggcatttgacccgccgagagagagagcagaaacaagcacaaaaccggtggaaagatgacaaactgctctgattggaagatgggaaagaaatgatattgggagtgatcaatttcgtcggtctctcgcccaatcattttcaatgccatttcattaattgatttgatcacttcgtttgtctgatcagaccggtggaacgcagacaatttgataccaaaaaaattattggtaaaaatattaaaatcaaattttcaatatttatttatttatcttttacgatcaacgggacggcaaagtgatcaacaaaaaatacaccacgggtcatgttgctattcgggtagcacncaagagtcaaattcactgaaattcgagaccagcaattcacttccgaagctcaagagccgagtccgataattaacccccatggcttaaaaagcccaataacaatgccgagagacgggaccccccaaaaaagccgagaaattttctagcaccgtttttgaaaactcatttctaatgttgttgtttttgttttcaatttggtgaccccattttcacgcggggaaaggaactcgtcttatcggttttgtcgtcgttgtcaatcgtcgtttttgcccctaccatcgccatcgacggaccatcaatcgtttcgttttcccatatttttccataagtttaaacagtcgccattttcgccgatttgatcatttctcctcccccattttcacattttaaaatgtttgctgtttgttggtgggatgttcacacaacgtgatcaaatcgtaagattaaattgtcaagaaatgtgagaatgtaaaatgggaatttgttgtacaaattgtcaggcgtgggaagaatgaatggaattctctgtttttggctacctatttttagtgtcggaattcgattaatttcctaattttgtaaaattcaaaaataaattaatttttgcattttttttttttactttttttggattttttatgcaatcggcaaatatttgttttttgacaattgaagaaaaattaattagaacatttgaaatttaaatctcttccttctttcctttagcatgagacagtaagcaaaatggagagaaatgaagagaaaaagataaaacggaacgccatttaaaattttttc

SEQ ID NO: 12030 - DNA, 2193 bp, Heterodera glycines
tattactggttgagcagaaaaagagatagccaattttccatatttttcccaaacaaacgcgccgagaaacaaattccagaacaattagtatcggcgtaattgttctgagaatgcggttggaattcctattactgttgagcagaaaaagagatagccaattttccaaatttttcccaaacaaacgcgccgagaaacaaattccagaacggcgtaattattctgagaatgcggttggaattcctattactgttgagcagaaaaagagatagccaattttccaaatttttcccaaacaaacgcgccgagaaacaaattccagaacggcgtaattattctgagaatgcggttggaattcctattactgttgagcagaaaaagagatagccaattttccaaatttttcccaaacaaacgcgccgagaaacaaattccagaacaattagtatcggcgtaattattctgagaatgcggttggaattcctattactgttgagcagaaaaagagatagccaattttccaaatttttcccaaacaaacgcgccgagaaacaaattccagaacggcgtaattattctgagaatgcggttggaattcctattactgttgagcagaaaaagagatagccaattttccaaatttttcccaaacaaacgcgccgagaaacaaattccagaacggcgtaattattctgagaatgcggttggaattcctattactgttgagcagaaaaagagatagccaattttccaaatttttcccaaacaaacgcgccgagaaacaaattccagaacaattagtatcggcgtaattattctgagaatgcggttggaattcctattactgttgagcagaaaaagagatagaagatgcggtttagttgcacagattgttgataaaccgtgccgtaaaatatggcaaagatcggtttatgatgaatcaccacaagcaatatcagcacgagataaagcttggaaaataaacgctgtcgttgagttgctgactgcgccaaaatttgttatgtccgaagataacaaattaaataagtttatttgccggagaaataaataaaataattaatgcagagaataaattggagaggtcaaattggtgggcacaataatcaactgaatgaggggaatgggagggggaagatggcgaagtggcgtggggtcatacacctaatcaataattacttccttctctaacaattactgttgagcagaaaaagagatagccaattttccaaatttttcccaaacaaacgcgccgagaaacaaattccagaacaattagtatcggcgtaattattctgagaatgcggttggaattcctattactgttgagcagaaaaagagatagccaattttccaaatttttcccaaacaaacgcgccgagaaacaaattccagaacaattagtatcggcgtaattgttctgagaatgcggttggaattcctattactgttgagcagaaaaagagatagccaattttccaaatttttcccaaacaaacgcgccgagaaacaaattccagaacggcgtaattattctgagaatgcggttggaattcctattactgttgagcagaaaaagagatagaagatgcggtttagttgcacagattgttgataaaccgtgccgtaaaatatggcaaagatcggtttatgatgaatcaccacaagcaatatcagcacgagataaagcttggaaaataaacgctgtcgttgagttgctgactgcgccaaaatttgttatgtccgaagataacaaattaaataagtttatttgccggagaaataaataaaataattaatgcagagaataaattggagaggtcaaattggtgggcacaataatcaactgaatgaggggaatgggagggggaagatggcgaagtgatgtgcggtcatacacctaatcagtaattacttccttctctaacgatactgttgagcagaaaagagatagtcaatttttcaacttttcccaacaaacgcgccgagaaacaaattccagaacaattagtatcggcgtaattattctgagaatgcagttgggattactattaatgatggacagaaaagagatagtccattttcctaattttttccccaacaaacggcggccgagaaaacaaatccagaaaattagtatcggagtaattggttctgagaatgaggttggaattccta

SEQ ID NO: 12031 - DNA, 4527 bp, Heterodera glycines
ctgtggcatcgcccgtctccgggagaagtctttgagaaacggctgctcatcaagtacattaggagaacggcaccgatccgatcaccggccacaaacttgacacttccaacgtttgtgttttgggtggagaattttcttgttatccatgcctaatttggcacttttgtcccttggacccgtgcctaatttctaccattgaaaccttttctggttaacttttctccacgtttctagttggtcgagctgaagcaggacccgggcattcgttctatgcaaaagtgagtccatttatagtgccgttatcagagataggattacagccggaagagcctccgaacttgaaaatattgtcggaaatattgggattctcaacgaatttcccgtttaacaataattgttacttaaccaaatcggttgaatttttcaaaattttttcattaattttttttgaaaatcaaaggattttattattatgactagggcccagattcttagttttttaactattttttctgcggctttatttcgatgagaaatgcacaaaaaacacattttaactcggaaattcttcgttttaacgccactattcttcactaggaatcactattttggagctttgccattaaaaaaaaattattttggaagttggcactaaatagttttttgccactattttggcatttttttggaaaatttcccaaaaattcaataaaaacgaacaatataccccaataatcgacctaaaaaaatcaaaaaatacacccctaagaatcgacctaaactttttcaaaaatacacctctaagaattggaaaattttctcaaaatttcttccccaaattttttttcttgctcaatatttgctaagaaaatattggaaaggaaatgttcctcatttgtgactgcaaacagtgaataaaattgtttgccttaattttaaattattttcaaattaaaaaacagctatttaaaaaattacacccctaaatttggaactttttcgccactattttgccactattttaaatttcgcgacatttagattgacgatttaataaaacaacgttttccattccattttaaggccgttggccaccgcctcgttaccttcgcttctcaccggccaaaacggcaccgacacttccaacgtttgtgttttttgtaatgaaaaaatttgacccaactttggatccgttcttaatttctaccattgaaaccttttctggttaacttttctccacgtttttagttggtcgagctgaagcaggacccgggcattcgttctatgcaaaagtgagtccatttatagtgccgttatcaaagataggattacagccggaagagcctccgaatttgaaaacattgtcgtaaattattgggattcttaacgaatttcccgtttaacaataattgttacttaaccaaatcggttgaatttttcaaaaattttttcattaatttttttttgaaaatccgaaaggattttattatttaagacacaaaattcgcgatatttggattgactatttgataaaacaggattttccattttaaggtcgattacttctggtggtggctcttttttggcgtttgcaaagctattagctgagtggaagtggatagtggtgtgttttgctttacaacttgccttctaattgacactaaatatgacttttccagattaataagaaatttcaaggaaacaaatgaaaattttcactaattggaaaacattttcaaaaaaaaaatcataatgaatcttggaaaatcgctaaattacgattattttatgaaaattttcctgtttttttatttttctggggggacgaagcgcgtgaaacgtcctgctctgtaaataaacatttaattgttttagattttgctgatcgttttgcaactcgtgttgggtgttcttgcggctgacatgtccaccgcgtcgtgcaattgggacgtgaaaatgctcataccattcttgtcgattttgacggggctggtagttatttttggttttatttgggcgatcgttcatgtgttggtgaactccaaatttgacgttgtattggcaaaaatggaagcgatgaaatcggatcagagggcagaacttcgtggagaaatgaaaggaattcgtggagaaatgaacggaattcgtgaaaatatgaacggtctgcgtggagaattaaacggtctgcgtggagaattcaacggatttcgtggagaaatcaacggaaagttcgaaattatgaaaatcgaattgcgtggagacatgaaaggtctgagtggagagatgaacgccatgaagtctgaactcaatggacggatcaatgttttgcaagcagagatgaatggaaaaagatgaggacattttgtatttcacaatattttgacagattttatctcagtcgtttttcttgttgtttagaatctcaatttatcatttacatcgtgtttattccgtaaatgagtatcaataattgaattaaaatttttatttatctattatacattcacattgtgttgttgtctgacaactgtttgtgtaactgaattattttacctgcatgagcattagtcctgaatgggagagccatggttatttattatgttttttaagatatcctttctatttgacaaatgtcccgttttgtgtgtgctatttctggaaatgagcccgaggtggctgtggcatcgcccgtctccggagaagtctttgagaaacggctgctcatcaagtacattgaggagaacggcaccgatccgatcaccggccacaaacttgacacttccaacgtttatgtttttgggtggagaattttcttgttatccatgcctaatttggcacttttgtcccttggacccgtgcctaatttctaccattgaaaccttttatggttaacttttctccacgtttttagttggtcgagctgaagcaggacccgggcattcgttctatgcaaaagtgagtccatttatagtgccgttatcaaagataggattacagccggaagagcctccgaatttgaaaatattgtcggaaattattgggattcttaacgaatttcccgtttaacaataattgttacttaaccaaatcggttgaatttttcaaaattttttcattaatttttttttgaaaatccgaaaggattttattatttaagacacaaaattcgcgatatttggattgactatttgataaaacaggattttccattttaaggtcgattacttctggtggtggctcttttttggcgtttgcaaagctattagctgagtggaagtggatagtggtgtgttttgctttacaacttgccttctaattgacactaaatatgacttttccagattaataagaaatttcaaggaaacaaatgaaaattttcactaattggaaaacattttcaaaaaaaaaatcataatgaatcttggaaaatcgctaaattacgattattttatgaaaattttcctgtttttttatttttctggggggacgaagcgcgtgaaacgtcctgctctgtaaatgaacacttaattgttttagattttgctgatcttgcaactcggcttgggtgttattgcggctgacatgtccaccgcgtcgtgcaattgggactggaaaattatcctgtctattgcagcgtttttcctcctgtcatgggtctctgttttggtattcattgctaactcagtgaaaggagaattgtccgcaaaaatagacggcgtgaagacagagctaagggacaaattagatgttgtgaaggcggagctcaacgagaaaatgaaggagatgaacgataaattcaacggagctcgtgtagaaatcaacggaaagttcgaaattatgaaaatcgaattgcgtggagacatgaaaggtctgagtggagagatgaacgccatgaagtctgagctcaatggacggatcgatgttttgaaagcagagatgaatggaaaaagatgaggacattttgtatttcacaatattttgacagattttatctcagtcgtttttcttgttgtttagaatctcaatttatcatttacatcgtgtgtattccgtaaatgagtatcagtatgactagtgatagtccaatttcgcagagcaagaacgccaacgacaacgtgctcgactccgttctcaacagaacctggcccgcctgttcgtccgcccagcactgaccaaagaacaactcaaggagttgaagaagaaatcctcttagacaaggcaattagccaattgcaatccttccaaaaacaattcccccaactttttaataaatagttctgcgaagacctccaacaaaacagcccattcgatcccactccttattcccaaatcgtcatttgatttcttcattactagggatgggatttttaagggtgaaaaagtccaaaataaggccgtaaataagggcgaaaaattcgcgaaaagggcgaaaataagatcgaaaaagtcaaatttagggtataatttttaaaattgctgttttttacatgaaataatttcagactaaggcaaacaattttattcatt

SEQ ID NO: 12032 - DNA, 979 bp, Heterodera glycines
  unsure (1)..(979): unsure at all n locations
agaacacaaaacancgcgctacacaaaacgacggacggcacagaagcgaaaggcgcgcgtgccgcccgagtgcgttcagctcccgtacagcacggcgttgatctcgcccatgatgtacacctcgcgcccgttgtacctcctggacaggtccttctccaactgaatgaaagggacgcaaaaattactacagattttggtatacaaattaaaaatgcaataaattaattaattccccgcaaaaatgtcatcaattttatttgagtattttttatttctttttgtttaataaatgcactttgtaatatataaaagtgcgcttttcggtgaatgaatagaaaaaaaacaacagtttacacaaagtaagagagaaagagcgaacactcacagcaaataacacattttgcccttctttttttcgcccgacaaaagcgtaaatatttacggccgcccgcgagttttgggtcaaaacaaaaacagacacaaattgattcgaaaaaaggagaaagggggaaataatcgaagcaggtcgtttccccctctcaaaaaaatatattattttttaaactacagcgattttttcaaaaaaaatccctgaaaaaatttccaaaatttttaaattgaaattttcttaagaaaaaagtaactaacaataaactttttaaaatgtctgttttctttccgaaatgtcacctcctcctgcagccctttggccgcctccaccactccgtccaaaagtttctgtgccgtccgaatttcctccgcgcattgcgtgtgccgtcgtgcgcacaactgctgctgctgctcgtattttgcctccaggcgacgcttttgctcaaaatgcgcgacaatttcgtccacaaacctgtggcggaggataaattgataaaagaaaagcaaatganagcattgaagatgccaatatttttgggagtgccgtcgccaccgggtgggcaggggccaaaactcactgaggcgacgt

SEQ ID NO: 12033 - DNA, 4237 bp, Heterodera glycines
ctctagagacaaggaaatggttgctaataattatacaaattcatttcctttctttattaattatatgccggcagagatgtcccaatggtaaattaaaaaaaaaattctgagaatatagtttttttaggggcgagtaaatgttggataaaatggaatactatcaattaattagacaaatcttgttcgaattcgcgtcttgagttttttacctggtccaactcgtccaaaaactctgtccgcacttccaaatgctccaaaaggggcagcgcctcctcccctcgggcaattccgtcgtccgccgcaacggcaccgccgccgacttttggctttacgccgtccccagtcttgtcattgatcagctcaatttcgcactcaacaacaccatttccatccagacaaaaatcaatctcatcatcgccaaagtcaatttcatcgtcctaaaaacggggaataaaatggtaattgtaagagtcgtccatcattaaaattgccaacatcggcggctgttatttgtccgtcatctgtcgggggagactgattgtggggtgctgcgccgaattgttcgacgagtacggcatttggtctctgtccgtggcgccattcgaaaacggacaattcgctgagcggccgttttgcgtcgccactgacaagcgaagggaggagaaagcgtgtgacggggaacattccttccaagtgtttgctgaatttggacaaacaaattgaaatgagtaaattggaatgccgtcccactcgacaaaagtgccgaaggcgtcgaaatacgtgacaattcggcccaattctgtgccgacggtggccaattccgtcggttccgttgcgcatgcgacggcgagcagttcggcccgcaagtccttcactttggcgggcagtgcccatttggccaattccttgtccaaatttcgtcgcacttccgccgcttgctttgcgtattccctttcctttcgttccgactccgaaaatggtatttttaattccaattttatttttcaaatcccagtttggcccacccttgacgtgttctcggccttggcaatttgtttgcgtagcgcgggaacctttagggaaaattaattattaatttccaaattttcaaagcattgcctcatattggacaaaacgttgcagaaaattggccgcctctgccaggcaaacgttgtccttttcgtacagtgaaatgatctcctaatggcaatggaaaaatattgtaagaattggcacaatctgatgaacggaccttccaatctttcatccgttgcgatgagtacatcccgaaaatgttcttcgtctccttttcagtgtcgcgcagaatgtccacaatttgtttgcaatggaaatagttgatgtctgaaaaaggggcaaaaattcattttaaaaacggattaatttcaaagggttaattcaaaacggtaattgaatttttcgtataattatgtattgtcattgaattcggaagagcacacattgtgcgttgctgagaatggccaagatctgctcgttctccggcatgtcctgaatggcatgtccaattttggcccgaatcgtctcgaccgaatcacgccaattcttgtggcaatggcgacgcgaaatgagccaatctgagggattgaaagaggagagagacgatacaattccaagacaaagaaacccatcccatggacgcaccaagaagcttattgctgtgaatgtcaatgggcaaatggtccatctgtttttcaaattaataaaatatataaaaaattaaaaataaattttaatgattggtggaaaaaattgactcatttagggctcgtttaatggaataaattttattcagaaagcgatgcataaatttaattttggtttttacaaaacaataaaacaacaaaaagcgttgaattgctgtataaataaatgtaaagcaaacaaggaccaattgcacgtcggaaacaaaaggaaaaagagagaggaagagactgaaaaagttaaatgttctgcaaaatggtctcgaccaatgccacggcattcgcagcggcgtaattctaaaagaatttaaccggtaattaaaaacaattcaagggttaattagtggaaaaccgccgcacctgccaaacttttccctgtttgctcgagccctgctgatagtccgagacgcccctcaccaaaagccacgagtccacgcgcgagccctcaatctgacggaaagggcgaatttgtgaaacattaaacggacagttaattaacggaaacaatggcactcaccgctgcgatcaccgcgtcgaagcccgcgtcaaaggcccgcaaatggtaatggaggcggaacctaacggttttgaaaggaattgtgaagtttattggcattcaatttgcccgtatttcccccgcacttttcgcgcagtctttcattgacgagtcgcacgtccctgctgccatccgtggcactttcgctgttcaaagaagtgtcggccgcgctttccttcgctttctcttccgaatcgtttgactcatcgccaacatttccaggagaaagcattggtccactaaaatgaatttgatcaaaaatcaatttatttttttgaaatacttcgatccaatgccatttgtgttgtccacgctcggaccattttgattgcctttgccaaaactaaaacgattcgtcggttttagcggtggcgttggcggtttctgttttttgttgctatcttcgtcttcgtccggccttttgtagaaggtgacctgcaaaacaattaacaaatgtctgatattgcaaattaaaattggcacaaatgcatgaaatggacggaccattgaaccaacgggacccaaatggtacaacggattggtgcgggactcattcggatgcgggaacaccaaaatattgccgttgttcgtcagctggagaatgacatcggatgtggcgggagggcgcgaaaagtccaactgttggtccctgtgtttgtcattcagtcggccgattagcgactgcgaattcgcatgccatgcgtccaaaaagcgcggtttattgctgaattgggaataaaaaacagtggggtaattaaacggacaattaattaattaattgcctacgcatttcgcacagccgcagccaatgcgttgacttttggcgacaaattatggacttcgaagcgtatttcttttgccttggggtcggattctgaatcagtaaaatgaaatttgtataaaattgtgccatgtacgtcttaccaatgttgtgtgcataaacatacgccccaattcgtccgtccgtcgaatgttcgtccatttcctcttgtgaaatgacaacatcgccaagtcgaatatgctttaacattcataaatgcattgttaaaggaagaaaaagcaaagcgaacggagaccatttcggggtcagtcaaatgcgcctgtccccccgccacgccgacaatgatcacatgttcaacgtgttggtatttgccgagcagacgtgtggtgatcgaaccggccgaagtggccgcctccctgtcggtgccgatcattgacagctgcaaaaccatggggggggggttgaaaaatcaagtgatcatggcattttggttgtgttacctttgtggcaacaatgcgatgtccggcgatttcacctgtgggagacaatgagtgaaaagccaatcagtacggacggaactgtacccaacaaataccttcagtgaaaatattcgaatcgcccgtgttcgaatacctaaaacacacaattccattcattgctggttaaaaaggggacgaaaaattgatgtacatcgaaaaatgtgaccaaaactaagggaatgtatgccttttatttttgcgatttttgcataaaaatgtctgccattcctccgttacttgtgctccgtgctgctgttctccacaattatgtccacgcacaatttctccgggaaaaggcaggtgatcagtgcaattttgggcggattctttgcaacaaaattgggttgaggcactaaaactgggccaaatgggcaaagacagctcccaattcgcttgtaccattgctggcctttcgtatccattcacccgactgatccggcactctttcaacaatcccatcactttccaattggtctaagaatgtttgcaattcgtccttaatttcgcatttcaatagaaaatgtatcaaaaatacaaaaagtgaattttaagtaccaaagtgcagcgtaaactgtacgccagaacttcttcctgcaccgaattggataagcatgctcaagcg

SEQ ID NO: 12034 - DNA, 2074 bp, Heterodera glycines
  unsure (1)..(2074): unsure at all n locations
gatgatgacacgtaaaacgaagcataagacaaatgtttgcctatttattagtcatgggcaaatgcaaatattttttgaggcttncagaggagttgtctaagacaataatacaaaaacttgagagccgtcaaatgcattttctcggttacagtaacagtaaagataaatcagtgattactgttaccgttttttaaaaagaaaataagacgggcattttatcactacaattggcatttttaattatttttatttagaaagttcccttgtgagttgccgattaaattaccattaatattttaattgctaaatattttgatgattttttaaatccttatttaataattttagtgagttaatttgtgacatttttgaaatgagcaaagtttattttaaatacagtcatggtcataagtgttgtcccatcatgctttgaaaaaaataattgcgtataaaattgtcattttccaatttcaacagataagtagcataccattggatagcattttttatgggctttccaatgataccatatttgcatttgtgacataaacatttatttgatttattttaccatattcacaatttgatcaaaatataggtggtcaaaagtgttgtcccatttcatttttaaaatattgcttctctggatcagcattaaaaaaattcaggtaagcataactttggatgctgatcaaaaaaggtagcaacaccaagttgatcagatcactccttcatggtgatctgatcagcccattttggctgggaacgaggggtaaatttcaaaaaaaatttctagggggttgggaaaatttttctggaaattttgagtaggcccattttatagagcacaaaattctctacaatattcaaaaaaccgcatgtctctatgacttataccggctgaggtatgggcacttcaattttgacgtagtgtaaaatgcactattttcttaagaaatacagtactttttataggcaccaaaataaaagtcgacgtatctcagcgggcctaaatcgtagacccactattccaaaggcaattcggtagcaaattttgtgctctataaaatgggcctactcaaaatttccagaaaaattttcccaaccccctagaaattttttttgaaatttacccctcgttcccagccaaaatgggctgatcagatcaccatgaaggagtgatctgatcaacttggtgttgctaccttttttgatcagcatccaaagttatgcttacctgaatttttttagatttttttaatgctgatgaaaaaaaatatgggtagtgttcctaaacatatgaccaccccgaaatttgactatatggaagaaaacacaaatttttacaaaaaggaataaagcaaacgaggaatgtgtggtaccaatggatagcccagaaaaaatgctacaaaatgcattaaaaagattattgattatttttctttcaatccagagaagcaatattttcaaagaatttattcaaaaaaaagaggtgttcctaaacatatgaccatgactgtatatttgtttacattttaattaaaaaaaaaaaaaaaaaaaaatgtggtccaattttgaacgaaatagtgcacaaaaagggagggagggttagacgaaagtgcccatcatctttacgtccagttggtgcttcaaagcttcgtgaaaacaattttaattggggaagtttcgagaaacacccacgcccctaaatccagagttttccaagtgaaaaattcaccccaaattgtaaatgttgtggcgttccgtcatgacgctgtgtgtgtgttttaagcaaaaagaaaaatagagaagacacaacaaaacaaattcaaaaaaatggttataaatttggtctctttctctctcttccgtcgctctcatcaaatgccctgacgccctctgccgcgcgaggcgaaagtggcgaaattggcccaccgattttgctgagtgaggacggcactctgaagggggggggggggggaggatagaataagtgctcaaattcaacaatttttataccctaattttgaacgcagaattagaaaaaagtccaaattatcaaaagttccaaaaa

SEQ ID NO: 12035 - DNA, 2074 bp, Heterodera glycines
tttttcctaaaaatattagccctaaaaataagggttaaattttttgaaatttttttcaaaaaatcgcccttaataaattagcaatggaaattttttcaaagagaaatgagtccctgtactggggagttatcccctgcaaaaaaaattgggggagttctgatctcttttccaaaaaattctgggaattaatttttactaaaattataagcctaaaaaataagggtttaattattttgaatattttttcaataaatcgcccatttccggcactatgccaattttgggcgggacagacctaacggggagatataaagtatagggaatatcaaatctattcccgaaggattcatccttccgaaactgtctgactgttctaaaatttttactaatttaagcctaaaaaatttgtctgattattttaaatagtttttcaaaaaatcgcccttataaattgcattggatattttcaagacaatttagtcctgtactggggagtatccctgcaaaaattggtggggttctgatcgcttttccaaaaattacttggaattaaatttttactaaaattataagcctaaaaaataaggttaattattttgaatattttttcaaaaaatcgcccttataaattagcattggaatattttcaagagaattgagtcctgtactggggagtatccctgcaaaaattggtggggttctgatcgcttttccaaaaattacttggaattaaatttttactaaaattataagcctaaaaaataaggttaattattttgaatattttttcaataaatcgcccatttccggcactatgccaagtttgggcgggacagacctaacggggagatataaagtatagggaatatcaaatctattcccgaaggattcatcctcccgaaactgtctgactgttcgaaaaaattttttaatttaagcctaaaaaatttgtctgattattttaaatagtttttcaaaaaatcgcccttataaattgcattggatattttcaagacaatttagtcctgtactggggagtatccctgcaaaaattggtggggttctgatcgcttttccaaaaattacttggaattaaatttttactaaaattataagcctaaaaaataaggttaattattttgaatattttttcaaaaaatcgcccttataaattagcattggaatattttcaagagaattgagtcctgtactggggagtatccctgcaaaaattggtggggttctgatcgcttttccaaaaattacttggaattaaatttttactaaaattataagcctaaaaaataaggttaattattttgaatattttttcaataaatcgcccatttccggcactatgccaattttgggcgggacagacctaacggggagatataaagtatagggaatatcaaatctattcccgaaggattcatcttcccgaaactgtctgactgttcgaaaattttttttaaattaagcctaaaaaatttgtctaattattttaaatattttttcaaaaaatcgcccttataaattgcattggatattttcaagacaatttagtcctgtactggggagtatccctgcaaaaattggtggggttctgatcgcttttccaaaaattacttggaattaaatttttactaaaattataagcctaaaaaataaggttaattattttgaatattttttcaataaatcgcccatttccggcactattccaagtttgggcgggacagacctaacggggagatataaagtatagggaatatcaaatctattcccgaaggattcatcctcccgaaactgtctgactgttcgaaaaaattttttaatttaagcctaaaaaatttgtctgattattttaaatagtttttcaaaaaatcgcccttataaattgcattggatattttcaagacaatttagtcctgtactggggagtatccctgcaaaaattggtggggttctgatcgcttttccaaaaattacttggaatagatttttactaaaattataagcctaaaaaataaggttattatttttatttttttcaaaaaatcgcccatataaa

SEQ ID NO: 12036 - DNA, 1517 bp, Heterodera glycines
agcgcttttcggtttaggggcctagattcgaatttattaaaaaaacatcaaaggacgcgcagaattgtaaaattacgtgccaaaatgatattggggggcataaatgccacaatttgagctaacaataagatttcttcaagtgaatatggccaactttttttggcatcttagcgccagaggaactcgcataaaatctgcgcgtcctttgttgttgttgttgtttttaaattcaaatctaggcccaaagccgaaaagtaccgatttttttttaattaatcgggggggggcaatccggaggggggaaatgaagtgcactctaaaacttaggcctgagccattgtacgagttgccgttgttttgtgtacgaattgtgatgacaaaacgtcaaacaacacgttatcatcaacagtaaagcaatttttttaggaagacagtcaatcagtggaagacagtgcgagcactaacaataagcagtcgaagaaagggcggaaggcgaaaacggccggggcatcggaagtcggagggttgggactgcccgtgaaaggggtcacgacggcgtcattctcttcattgtatgacaaaatatccacgggatggttcaaaagttgaccaaggaagactgtgctattgtaaaacaattattccaaaacataatcccaatgtgtatggatggtactgtgattctttgtaatgacaaaaatatttaattgctcttacatcaagaatgtttaattaattaattatttattcgtaataaaaagatttggtgcgagaattctattcagtttttgtgccacacatcgctttattttgcacctaaaaatttgtattttttggctatgtttaaaaaaagagaccaaggcctgtatggtgaattggtaccgctatttctcatttcggatttactgttagttaaaaagcattttttaagcaattattatccattgttaatttatgcaaaaatattaaaaagaacaacaaaaaaaacaaaaaaaaaaatgtgtcgtcaaaggacgccccacaactgctcaaaagcacttgtcaatttggcacaacagagagctaaaaacaaaataaagaaaacaatttattgggccaccgatttattatgctcacccgcgcttaaaggataatttgaaattttgatgtcctcctccgtgtaatcggtgctaatctgcacaaaattggtgttttattatgggagaggtattaaattgcgatccagaaaggatcacgcacctttccatgtgctattccaccgaccacaattaccaccggctcttccgcttcgggctgtaccttctcggccatgttggacaccaaattggggcagttcagtgtgctcagaaatttacggcagcccaccggcaaatggttggtcaccgggtttttgaccacgctaaaaacaaaaataaaagaacaaatccagaaattttatttttcaccatacttcaacaattttgtgaagaatcagccgcccgaatttgcaattttgtgcaaaaagttgaactaaaaat

SEQ ID NO: 12037 - DNA, 1699 bp, Heterodera glycines
  unsure (1)..(1699): unsure at all n locations
taagacacccagaaaaccattgggaagaagttttcacgacttattttgattaaaaaatagcaaaccaaggcccactctttggtgtttaataaaattcaattttttcggtgctctaagtgccgatatttctaataaaatataaacgtcaaacgacacacacccatcagtccacaaaatcggtcaaaagtgcgcggaagtcggcactgcgggctcacgctgaccagcacattctgtttggtgcggaaaaagacgcgcaaaagaccggcactgttcagcggactgtcctgcagcatcagcaaacactgtgccgaaatgggggaattaaatacataaaacaattagaggtcggaattgtaaaatgggtgggaccgggacttgaaaatcgaccgggcggggaccaggtgttttgtccaaaaaacaagaccgggagtcccggcaaaattgttgggaggccctggtcccgtccggtctccaaaacaatgccaaaatggggggggggcaacccttttttgcggaaagcacaacaacctggtgaagaatgtccggcctgaactgggccgggtccctgttctgtttgcgcagccaattcgcgtgtttgtcactgcacaacacgacgtgttcggcgccgacctacaaattaccaattgcttatttattgtatttatggcctaatttcacccattaacaaaaaaacaggctgtttttcagtgacagaaattaatttaatgacaaccccggcaatggtgaaagattattggtcccacaaaaaaaagaaaaaaataataaaaaaaaccatttttaggggttatttgatgcgctgagcacgaatatgatctttttttgacttttttcgaaccccaaaccctgattcgaacaattttttaattaattttttacttaaaaataaatttttataaaaagtcatctaaataaaagtctttcctgaggttttcaaagtcgctgatcacgaataagatatccatttcgaaccccggaccagaattcgaataaagtcgaaaatttaaatttttttaatttttactttatgtatgtttgaatctacataaaatgacttatttttgctgttaaaactacctgtgatttatttctgctagttttaatcaattttagaataagtgcgaaatcgaaaaattgaatattcgactttttgttcgtattcgggtcctggttcgaaattggtcgaaatggatgtcatattcgtgctcagcgcatcaaataacccctaaaaatggtttttttattattttttttcttttttttgtgggaccaataatcttcacaattgccgacaacccctacttttacaacatccaacgagaaaaaccatattttttgaggggagcacaaaaaagaacgccgccggacacacattttatcatatgcatggattttacccacaaattactagtaaaagaattattttttagacaaaaacagctataacacccccccccgggcaacaaaaattacacactttggccacttcgagactgcagtcctcaatcacaacgaacaaccgtttcccgccggcaccgtctgttgattgtttcaaccgttttgagcgcggggagtcgcgcgaaaagggagcagagggatgcttcatcggacgcttcttcggtttcatggcgcaacaattacgaattttgaacgcaacaaattctaatganaattttgtttt

SEQ ID NO: 12038 - DNA, 1558 bp, Heterodera glycines
aatccaagaaaaaagcaaatttctgcatttcgagaacaatttcaaggaaaaaaaacttgaattcgtcatttttcgtgtatattcaacagtaattttttgtctattgcttttatccaggcatttttctatacaaaaacttcagtgaactttaagctctcgattgataccaagaatgtaagttttgaccaagtaagaaaaaagttatggcttaagaaaccgaggttggtcattgattggacgcgcaaaagtcgattagatgcgtaaactgcattagagccgaaattttttatggacttctatcccacctttgacagccccttctcctcctctgcgtcgtagctcactttttaaaattttttgtaaaaataaagaaataaaagttgaccaatttacaataaatataaatatattttttaagatatttggtttgttattgaatttcaaaattcgaaaaaagcaattttattacgaaaaggcctcaaaaaacatcgccatctgagaggttttgagtcggctcaaaatctaattaaattggtaaaacttggagcaagagctcttccgccaatttcgccgccattatgtgggcaaggtcgggaaaaatttgcaatttttaatcaaatattttattaaaatcgaaaaattttcaaaaatttgctacaataatcgacaatcctaagaattcagatcagcgcatttttttaagcctagaaaaaatacctgccaaatttttgacatttttttcgtcgggacaccaattcttgaccattgccaaattaacgaaattttgattattagaaataaatttgggttggtagaaacctccaaagacgtgaagacgtttgaggccagttttggtctcaattttgcccagcaaattggtgaacgcattgttctcatgcaacttcttgtcaatgtccgacaaaacattgtgcgcttgggccgaaacataagtcattttaagtggaaagggtaaaaattgataagctaaaaagaatgaaatcagaaaaggtttaattttaagaatgaatgtaaaggaaaaacatttcacaacttcatgaaaattctattacttttccttcattttatattgggtaaaagaaactgcaatcaaaacaatcttatcgaatgacctcagaatgaatgaataaatgagcagataagaaagaacagaggaaggaaaactgcttgaggcatattgctgtttagacgccgttttaatgacaaaattataaaaaaaatattttttaaacaaatttggcataatgatttttatttcgaaaaaaagcgggttggtaccgtaccatacataatcctttagaatttgatgctgattttttttttgtatcggcaagattgctttgatgtggtggggtaaattaaataagaatgaaagactttttcagaaatataattcgaacattccacaaaaaaagcgggcttaaaaactaaaaatttgaattttcgagttttcgttcgaatttgggtccgagattctaaattagtcggaatggaggccggattcgtgatcagtgactccgaatacattaaatcggtgttt

SEQ ID NO: 12039 - DNA, 1959 bp, Heterodera glycines
agtatttctattggtaaaatcggaactttggtattattataattatttttatattgccttttctcgtcaactttcatctcccgttttttgagaattcggataacaattgatgaagcagcgtcagaaatggcaaaattaatttcactgcccttgttgagtgtttttgcctaaaagaaaacttgctattattttataatagattacatttctttaaattatgtttctggtcgtttttatgtgtcccatgccatattatgcgtcctatgacattttagggagcagcccccccccccccccccccgcatcgtttccgacgagaatttttttaaatttaacttattgttagaaattttcaagaaaaatcttggagttttccttaaaaacattcgaaaaacaaaaaatttctaagagttttatggtgaattaccctttcttcaaaaaaattttccaaaaagtcgctgcaaatttctcgaaatttttttcttatagtctcggcttgtaaaaaacatgaaaaaaattttttcgaattcgggttcgggctcaagaattggtcgaaatggatgtcatattggtgatgggctgcctcaaaactcccggatacttgtttctcaggattttttaagcaaaaattgaaaaaagcgaccacaaaataggacacaaactccaaccagcccactagtacccagggctcttatcggattttacaaaatcgaacataaagacaaaaaatcagatttttaacaattattttgctgcgagcttttccccaaaaacttttaaaagcagagggccggaggagccgatagacgcccctgtgaaatttttttttgaaatgttggctagttttttttttatgattttcgataaaatacatttccaatcccttcagtatttcttcacttttaccccaaattgcttacttcaatgatttgttgcgtcccattttggtcccaattccaacggacaatttgcgccaatggctccgaattcggcgacggattggaagaagaagcattgccaatgtccgcgatttgaaaagcataaccacaggtggtttgcatgatcgtaaattgactaaaatgtgtttataaatgaaaattaaaaaatgaaattacagagttgcaaatcggtttttttcattaaatgaaaaagttcctgcagttgggccaaacaattcgctgatcactttttcgtcaacaataataaattcgtcaaagatttccatgattatttctattgaaaattctaaaatattgttcttgtattttataaaatagcagttgatatttgtacaatttgacaaaaggtgacactaccactgtgggtgggtggtcggggttgtttcggcgccagcctaagtttttggactataatttttttcattgtcaacttaaacgtacaatcttgatatcattctaaagcttaacatattcagaagctatttcttattacttcgcgattagacaattaccaaaagagttataacatgaaaattgcaacaaaaaaaaaaaacaaaaattttggtttttttataacttttttacaggctagaatttttgctttttattgagaattttccgttttagtaccagtgagcccatccgataactaattgtaattgtctttttaatatcaaaaaatttaatccaaaggcaaagccctccctctaggacaagcagtctttgatgatagataagggaaaaaagatatgtcgtgctaagaaaaaaaaagacatgccaaattaaaattcttaacgaagtgccgcaaattagacgactatttgttgattaaggtaacaaatgtacaaaaaatgccttaatcttcatagaattatagagaagaagtttaagcgaaatcaaaaaaataaaacaattagaaaaaattttgagaatgccaatcaaagtccgtcggcgccacaatcaacattcacaaacactgaggaaaaaatgaaataccaaa

SEQ ID NO: 12040 - DNA, 2908 bp, Heterodera glycines
  unsure (1)..(2908): unsure at all n locations
aataatcactttcaaattgtcgagtccgtagcgatcaatcaaaaggaaacggtcgatcagcggaatctcaacgcaattgatcagatgcgtntcgcagcacgacttcaacttggccacctgaaagcggagaagttcgtgtcgtacctaatatgttagcctaattaattcaaattaatttttcaaggattaatgccgtgagaaaaatttaacgaatatctggcgactgtgatcggcacggtcaaggaaactccgtccgaaaggtatccccacctgaaggtaatcggccaatttgagcagcatcagcacatttttggctgaaaattcggaaaatagaaaaaaagataaaagattttattacggttgggcagaaaaggtccgttcagataattgattgcctccaaaaactgcttgaattggtccatgtccacgcccaattcgtccaaagtgatcattcgctgctgcttctccttcatctccacgctgagcatgcgactgatcaccggggaaacggacgacagccaattggcggacacggaaatctgatcaaaatcattttatcagtgatctgccaaatttatcataatttaaataaagtggggctgaagatgccattgctatctctctctccttctgtttttcacctgtttgtcaccaattttcaccgtcaaatcgtcgtccgatgagctgatggaaggcaccggaaacgcacttaaaaatggaaaaaaatttaaaaaatggaacgccaaataaattagcgaccgggaaggactcggacttaactcggctcccgaaaatgccttggttaaagtatttctattgataaaatcggaagataatattagagagcggtattttgagaaaatacggatcaggaccaggactacggactaaaaacccgtatagtccgtactccgtactaaggccgtatcggcccaaaaaaatacggactacgggtccgtaaaaacccgtatacgggtccgacccgtacccgctctctagtaataactaataatacacaccgtttcaattttggcctcccagttccaaaaagatttgcatgtgtggctcacaaagggaggtggccaagtgtccgtgggatttcaaaatgaaacttggttaggtggatagagcaccaatgggttcttaagaaaaatggttttattttctgccaaatgagcacgagtgccgagttatgacgtgccaaagtttttagttttttataattaaagaaaaggaacaactatttcctttcttcaaaggaattgttagtgtagaggtaattcgttagtcaaaattttttttgggtcaaaagttcgaatcccctatgtgtaaattcattttgtaatttttatttttgctttttgtgagcaattcaattatcaaattttatttctttatcaaaatatttattttaattttattccattaaaaatcaaaaattgcattaaacataaatgtaatacatattctgtcaaattaaaaaatatttttttggcgaatatttttattgaatattttgcgcattaaaaaattttaaaaaaattaaaaataaaaattttttcataaaataaatttttataattgacttggcgtaaaagacaaaaataaaaaaactaatttatacgtaggggatccgaaccctaggctaaaagatgctgactagcgcactaccgctacaccactggacaccgtgctcttgtgcaaataggtatttcttttatttaatcattaaaaactttggccttttttatcttggcacaggggtccatttggcagaaattgaaaacatttttcttaagaacccatgggtgctctatctacccaaaaaatctcattccgaaatcccacggacacttggccacctccctttgttagttccgacgccaaatgtcatactctgagctaattgtaagcactcgtagccctcctggggatggtcccaggaggagggtaggaattattgtgaaacttttctttttcccctcctaaaattcttaataaatttgaaaatgaacatgtggcacgcatggttatgatgtgtaccattgatgatattaccgtgtgtcaaatgtagtcgttgtcaccacggcggcatctctacacaatcagctgagtgtcgtagagcgcaaatgccgaattgatgggcaaaccggcccagagcatgaacgagcggacgaacggagtgtacgggccaaaagcctaaaaaatcgtgattctcgaaccgaattcaaaaagctaaaattttcgctcctcctagcaacttttactcaattttgcggaccaattccggaaaaagtatggttcatatattacgaagaaagtcgatttttttgtcgacctcccatcacctcatttttgtgtacgtaccaaaattttatttaactttttctttgtaattttctaaacgaaaggaaaaaattcaagacgatcagcatgcaaaaaaaacggcagatgaggagaccagtaaaaaagggaattttataagcccaaatttgttgtttacaggctcgtatttagtgggagaaaaaaatcggaaaggggtttgggcggaatggagtagccatcacggaattttttaaatcattctctttactatcggcatagtcggaccacattttttccgagctttttgaaaaagacgtgccacaaaaaagcacaaccacacacacgaatttgctagaattttctttgtcacagacctcccaagtgaaggtatttggtcgaatcggcgtacaatgcggacatggtaaaggagccaaagacgagctgaaacagcgagacgggaaagaatgagtttttaaggaatgaacgcattcggaaaatactatgcctgaccctttcaaatttttgaaaaacaatagctaaacaattttccgaatttagccaacgccttaccgccccctccccc

SEQ ID NO: 12041 - DNA, 1369 bp, Heterodera glycines
tttaaaaaaacaaagagataatcgaagagtgacaaacaaaaaaagcaaaaaatggggtgaagctcgagaaaacgttcggtctcgagcatcaccattaaaaaccataagtaaaaaacaaacaaaaaataaacaaagaacaacatagaagagtggtgggactcgaaagatgagcataaattcattttttcaatcttttgaccgaggctgtcggtttgaatctcaggcccaataaaactagaaggtttaaattgtaagtagaagccttcaagtttgtggcaaaataccttagagatatgaacctaaatatataatttattaagcaatttgacagccaaagccataaatgttggcacacaatcacccccgccccccaaatggtaacgaatgatcaaagagatgatcagtgttgattatttttcatttgttgttgttgttgtgcgtgatcagatgaagttttatcgttgttgcctttctggtgccgtcttcgtctgatcaccgccaaagtccaggcacatgaaatcgtcaaattgttgctgtcgttggtgctgatccgcggcacagccagcttcggcattagctgcagtggaacttccatcattattgttgtggctgttgttgttggcacattggcgccgacttttctcctccgactcggccattatttcgtcgagtagtgagccgcgccgttccatcaaagagccgatgattggatttgtgttcccactgttttgctcagtgacggcattagctaccgatgaagtgccagcgccgctgccgatggggggcgaatgggaggaacgcttcggcggaattgggggcggtggcgtttgcgtggcaggacaattcagtgatggtacggtagcgggtacggtagaacatgttgtcctgctacattaaatttgtttatatgccaacaaagaaaaatttgagactttaaattcaatttttttttgtttgccaaatgttgtgccattcctaccaagagaaaagaacccgcgattttttcgttaacccggcagtttttgtccgccgcgatccgttatttttttctcaagtgtgcgcttcacccctaatttctattataactgaaagttcacgaaaaacataatttgcgaaagggtccggccatgtgaatcgacaaaagtttttccaaaaaagggctgaaaatttttttcaaattttttcttgaaattttcttggaaaaaaaatttctaagattttctttaattttctctaagtttgacaattttttaaaaatttttcgggggaacgagctgctcctggtggaggggggagtcggggtccggacaatccgtcagtggacaatccgtcagtggtcaatccgtcagtggacaatccgtcagtaaag

SEQ ID NO: 12042 - DNA, 1749 bp, Heterodera glycines
  unsure (1)..(1749): unsure at all n locations
attttatttttggtgagttttacttgcatcattttctacatataaaataattattttttgancataaatctaaaaattataatttggcacaaaattcagaattattcagaaatgatcaagcggattgggaaattttgatagaattaaattgcgaatgaatcggtcactgatcagcagggctgcaaaaaatatgcaaatgcatatttttttcctggcttctccatgctctaaatagcaggaaaaacactttcttttttatgtttgcgtataaaaatcgggacttttatttgcatattttggatttttctgcatattttgccattttttgtacgtattttcagattttttgcatattttgccatttttcgtcaaatttttcagatttcactatctcttaggaaaaaatttcgaaaatgcctaaaattaaatccaaatctgaattgatgcgcgagtgggtcaacagtgagtttcactgccgaaaaccttgagaaatttttgatttacaattacaaaaacaaccgatataatttatgaggaataaaatttttatttattttgcacccctaatttaagattttttgtgcatattttgcgatttttgtgcatatttggcaattttatttgcatatttatgtgcatattctggtcatttttcgtgcttttttttgcagccctgctgatcgtgccggttgagtccgattaagcaatgtgacaactaaataacataaaccccacctgaactttgcccgactcgggaggaaattgcgacacgtaggacaagtccatgtttttgttccgaccatttgggtaaaggtaaaagccctccctgctgccgtccacctgaacgtcgagatggaaacgtacaacgagcggaggccatgaattttggataaacaaaaaattgggaaggatttccatcgaagatcaacccaatgaaaaagagatatccgcgacaattttaccaatgattggatgagtgatttgttctgcggaattgtctggtaaatctttccgtccggcgccacgtaaccaattgcccattggcccagccgagtgcagctcagtcggaacagataactaatggttttggaatttaagcacaattccaaaaaaataaaaaataataatttagaggtaaaaaatgactaaattaagcaaaaaattgatgccttttggttaaaaagatataatcagaacaagagaagaaaactcaaaagcaaaggagacaaaaacagagttaattcaaaaaagttttaacttgatttattttttcatttaaattttaaccaaaaattattaatatttaaatgcaaaaaattatgctttgctttgcattgttaaaacgcgggcaaatgcctttgctttgtgaccattcacaccttccgggctttccgctgaactgctgcaggcgctgcttgacctcctcgtaagtcataaatgccatgtaggcggggtgagtgactgccaaaagttgccaatttttgatgagcgaaggccacggatggaacagccttttgagaggaaaatgacagtcaaaagggggaaaatgcaccaaatttgaggtaatcgtgtttgaccaattcaaaatgccctaattattctgaaattggcaatttttcgtgaaaatctgttaacgtctggagaccccccccctccctcccccatggacttcaattttactgctaatgaatgatggtgtcgcccgtccatttttagcaacccaccaacaacaaacagcaacaacaacaa

SEQ ID NO: 12043 - DNA, 2498 bp, Heterodera glycines
  unsure (1)..(2498): unsure at all n locations
aaaaagacaaaaatatttatttaaaaaacaaaatgattaaaaattttgaaaaatgactgaattttctctattcaccaataaaaatttgtaaaaataaaaaaaaatgaaataaataaatataataatttcttatttaatgtaaaaatccattattcaccgaatgaatgaagcgatgaaatgaaagcctactctaattagttgtcatgattttttttcattttaatacgtattttttggcaatgccatttttctgcgcgtataaccacggcaaacccatttttaacgtggcattttctgcgatgggcggctgagtaagtcaggaaaattcaatcccgtgatttaaaataaattccgtcatttaaaaaaaattttctgccccttctagtggataaattttgaaaaaatcaactgaaataaagggagccaatttttgggcattaattaaatattaggtcggccacttaatgagctttgcataacgaaattgtattttattttatcatcgtcatttttttcccttttcttccgcgttgtgatttntaatttttgtgtagggtttttcagttttaactttgctttaatatgtatcaacaacattttttttgtgcttatgtgtccgggctttttctttttttgggcaagagctcaaggttaattatcggaattcgtactgagcagcccaaacctttcccttatttccatttccagttttgtattatctttagctttgtattatctttacccctcatcccactcaaaatctctttccattgggcaagtccatccaatatgcccattctgcgattgtctgggtgggtcatcagtgtgctcatttgtcagtgctattatttgccttgagacaaaattttcccaattaactaattgcactgacccatccctctgagatgttattgattcaatttattcctgggtttgaatgcaaatttattatgtcagtgtttctgctgattattataaattttttccacaaaacgttagtagagaaaaattttattgatatatatatttagggctgcaaattttatgtaaataaatatttttttcctggcttctccttgctctaaatagcaggctttcttttttgtgtttgccaacaaaaaccgggacttttatttacatatttttacatatttcggggtttttatacatatttcgggattttcttacatatttgtacatattttagatttttttcatatatattttcattttttttacatattttgagtattttttacggaaatttttggaaatcctcaaaaaaaaatccaaaatttcggcaaatatttttgtacatattttcgtttttttacatattttgaaaatttataaagaaaaaataagtttgaaaatgttgcctaaaaataccaaaaaaaagtaatttttagtcattttgtgttgtgggggaccctatcttttgtcaatttcatttttttaaattgataaattaatttattatttaaaacggagtaatttgttaagccagaaaaaaaaattcggagttcttctcggtttatttccttttttgttcgggttaaatttggacaaataatgatgatgttgtattttcttttgaagactgaaaattctttcggctttgtgattacatgccgagaagaaggactggtattatatatgtatatgttgctgcccctcttgtatttttacccttggacagttcagtgccaaagatatttggccatttcagtcacggttctgtaattcttcagggattcgttgccgcaaaaattctagggttcttttattacaaaatgagagacaccgattgttatgtattttatcgggtttttggacctgggctatgaatgatattttgcttattatgttagtgtttttccttgtaaaaaatcatttttaacgtccatttaaaattgcttaaagacattaacatgtgaacacaaaatccatattgcattttgcaatagctaaaatgcccgtctttttggtttccatcacccctccaccggccaatcttcggcagcaattagcgctgtcagcaatgaaattttaattccttttctaaacaaccaatttaatttcccaaaaaattcacattttattgccaaaaaatttacccaaaaattcatattttatgccaaaatctccttttttaattgagaagaaattatcggtgtctttttacgctgtcggattttttgaaggtgctcaggatgttcaacaatgaaattctgtggagtgaaaaccaagcagaggcgggcgcgatacgcgagcatggtcagatgttcgtcgggggctttgaagtgacgccgggaacaagaatcggcggctttgagatggtgccgggtccattggttcgcggtcaactaatggcttttattaatgatctgaatgatcgatttcggaatgctacggattatgtggagctggcggtgtgggcgcaccacgaagtggttggatttttgggagatgagatgagagggagaagaggggaggag

SEQ ID NO: 12044 - DNA, 2053 bp, Heterodera glycines
atcgcccggctgtttatgaacttgattttgcggccggggatgcgatgcgcgccggtcacgcttgatgaggggtgtcgaccgtagtattaccgctgcttgaggcaaagggacttcgaaagctttgaagccgaaatacatagattgatcaatctcagggaggaaataattaagaatttttagaaatttttaatgggaaaaattgttaaaattaaataccccagccctggatttatttaatttatgataaaccattcattcacatattttgtattgttatttgtttcaataaagaactttctctgatcattgtattttcatcacacattgagaattttgtgaaattaatgttggcagtatttcattaattcatatgttgatttattaatgaaaattttttcgtttcttggcattgttccattttcggacataattcaatataatattgcaatgttaaaaaaaataataattataataatgatggtgggagaatgtgcttggcgatagcctaaacaatgatggaaataccccattattcattctccaaacgctcagtttttcgtcctctcgccaaaatcgactttttcttgtccgtcgcacgggccggggtcacttcatcgcgctcaactctgttgcaacgcgtacagtcagtcggcatgcaacgcattagtcatcagtttcaaattgcaaaatttaatgaaagaagggagggggcatgaaacgagaatcagcaagtggaaatgttttaatcagcgattggctattagcagaaagcaatcacaaagcaaaactcatagggattggaactcttttattttaaagttcacccgctcaatttggcattttcacttcgggtgagccgaatccactgtcggtaggagaagaagcgccgaggcggaggagacggtgcaggaggaggcggaacatgaagaggaggatgagaacaaatagccagaggaggggggctcttttggtgccaaaatgttgcttcagcagagatctcataattccatctgactatgcgaaaattggcgtagcccactggaatcggatttccattggacatcacgttaggcatgacattatagtacaaggaaatggctaatttcttaaacaatcattttcaccgaagaaattgtgaggagaataaattcgccgtgtccaattaattaaccgttaattagcaataatgattcaatccgtcaatcgctagcttccttatacgtgctaacgatccgcgatttgacgttcctgctcccggccgatgtttgttgttggtccactgattggggaatttgaagatgttcagagcgttcactgtgctgagcagtgataaggaagtacagaacaccgatcaaagggaaaaagacggaggaaatgatcattggtcaattggatgcttccaactgaaatacgtgctttcctgccttcccccccccccctcccccctaatgtcacttatttaaagcccctcacggccggtcttcttcttttcattatttccatttgccattgttgacataattgtcagctgatcgtttccattaatccatcgccaattccattctttgcacattttcttccatattcactgcgtgttaagtcatttgcgatggtgggctggaaacgtgattgcggattacaagttgctggggctctgaatttttcttaaagaccaaattacggattcccaaactcctttattggatgaacccagtcatttccgaccctgactaattatgctaattatgacgcaatccctaaattgtgcgaccaacttatttaattaatcccttttttgtaaaaatgtattctcggcaacgataataataataatacgttaattgtcgagaaatgctaatgcgtcgtatatgatggaccttcttggtctgtttgttttgtcctctctctcctccatcgtcccccccattaacatcgttttgccaatttggccacgaaatgactattcctctcggctattttaacacaaacaagcaaaaaaataataaaaacaattaaagccgtgagtgccgagaatattcaccccgttctctcc

SEQ ID NO: 12045 - DNA, 2505 bp, Heterodera glycines
aattcattttttgtttggttttttattttaaaaacacaaaagttaacgcaaaattaaattacaatatatttaatcaatatttcaaacaaatttatatcaattttttaaaacaatatcatttttgaactaatgatcgaatattattacaaattcagatttgcttttcacatcactttttttcggcgcgctttttccaaaaaacttttcgggaagaagggggtcaggcagtgccggtaggcgccgccggaggaaattttgaaaatttgagtgtgatttgttgacagattttcaacaaaaagggctggtttttgagattactagagtcaatttgtgcggattttctttaaaaaatgataaaatgtgtgtcaattaaaaaaaataactgtgtagatttaatatttaatgagtcattaattaacacaccgagtcaattttgagcccctagttcaaaaagtaaatgcatatgtggcgaagtggtttttgtaagatagtaaagggacaaagggtggtggttcgagtccgttgtgcaacatgaatatttttatttatttttgtccaaaatattaaaaagtgacgaattttgggaattatttttgaaggtttttcccaatcaaattggataatcttggtatctttcaaaagctcttgataatgagaagctttttctaagcaaatgctaagcgatttggtgtaccagagaaaagttatgaggctttaaaattttgtttttcttataactttcctatttgacccattttaatattaacctgacctatcattagatgcagaatatttttctctgtctttatgcaaaatttgaagcggatttaacgttaggaaaaaaagttaaacgtcacgaagtaaattcagttttttctctattaacacagataaagaaatagtacgccaaaaagagagatgtttttttctctgcactctctctttattgacacatgtctcgttttttgactcggtgtgttaagaagatgaagttgaaaatttctgccactacgcaaaaaaggatttgaatttactaggtaatggacgttaaaaaaagaaaaaaaacggcaataactttttatggataattatcagtagggatgccaaaaatatgcacgaaaagtggccaaaatatgcgcataaatatgcaaataaagtcgtgaaatatgcaccaaatatgcacaaaatcgcaaaatatgcaccaaatatgcagaaaaaaaaattgaaaattagaggtgtaaaattaatttaaaatattattcctcataaattctatcggttgtttttgcaatttcagatcaaaattttctcaaggttttcggcagtgaagcttactgttgacccattcgcgcatccattcagatttggaaataattttaggcataattaaaaatttttcttaagggatattcaaatcggaaaattttgacgaaaatggcaaaatatgcaaaaaatcggaaaatatgcacaaaaaatggcaaaatatgcatgaaatatgcaaataaaagtcaaaatatgcaaataaaactcccaacttttatacgcaaataccaaaaagaagatgtttttcctactaattagtagtgctgttcgagactctcggtctcgactcgagaaaagtctcggtttttttcggtctcggtctcttgttttcagtctcggtctcggtctttgagactttcgagaccgagacttttttacacccctaatgattgactctttgttaacttaaaattaatataccttttgcttcatttttcgtagtcaaatatgtggtccagtggattgtccacttggttttgttctgcatttttgcgttggatcagttccccttcaagtagttattttttttctaattttcaaaattattccttttcctataggaattcaataacaagtttaacgattaaaatcataaaatattgtcatttttgtactaaatttgttcacaaagtgcactaaaaattcaaacctttctccataggcgcctatcgacaccgccggcacccatttttcaatggaaaattcaaaataaatttaatattctgttagtgcttttttaaatttaaatcaagtataaaaaatccatattatgataattagagattacatttttaggctctaaaaaccgccaaaataggtaggatttaggctctaaaaacacaaaaataggcactaaaaatacaaaataggctctaaaaaacccatttttaggggtgtaaaatcataaattttatccaaggtaacaaaattaagccaaatcagtattgagataaataaaaatgtaattcctaatgataattatggtttatttaaataaatagggctaaaatttgcactttttaccaggcgacgcctaaaatcattaattttcttcttaaaaaattagctgaagatgataaatttggtaattttttggtgaaaatctgttaacaaaattacagtcaaattttctaaattttccccgtcggagcctaacggcaccgccgtacccctattcccgaa

SEQ ID NO: 12046 - DNA, 1764 bp, Heterodera glycines
aagaaaaatttttggaaaaagtctcgagtctcgactcgagaaaagtctcgggttttttgggtctcggtatcgagtctcggggtcaagtctcggaatcggtctcgagcctcggggtcaagtctcggaataggtctcgagtagagatcggcctgtacctggatccaggcctgtatttttcctgtacctgtattttcctgtacttttgtacagaaaatacaggtacaggccatttttgaaatacaggtacaggtacaggccttaaaaacctgtatttcctgtattaatttttaatcactattttttggcgaaatgtatgaaaaaattaggaaaaattcaaaaaatatcattttattcagtgaaactcaaatttgaaaaattaataatgttttggcgaaatgtcataaatagttcaaggtggacttggtcgttttggcgacagcccattgtgctatacctttttttattttcaacaaaatctaatgatcttggtagcattcgaaggcccgtcacatgtcaatttggcgcatgctttaataaaattctaatgttcttatgagcacaaattttttgatcaaaattccgatttgtaaaagctacagtttcaagtagccccgaaaatccttataaaaaattggttaaaatctcaaaaatgtgtctcttttttttgaaaaaatctgttaacaaactgctttaaaaattgcaaattttatcccggcggcgcctatcggcaccgccggacccccgtcccctccccaagtttcccaaaaaaattttttgaaaaagcgcgccgttaaaaaagtaagaaaatcaaaaaaagggtcatttagggatattaaaaattttggaaaaaattcttggtagagggtaagataggcacaaaatgtaacctaattaagcttataatcatcttttagtattcgaaaaattaattttaatattttttataggttctaaaacatttattttttctattaaaaaaaaagtccaaaatttatttattccgtcgaaaaaatgaattattgggtatgaggataacttcctatacaaattttaccattatattataaaaaatcatggctccagtattttatttaaaatgcatcactgaaacgcatttttcagtagcttattcattaagaatgtctgattgtttaaaagaattaaatcattttttatggataaatgtttgaaatattgtcgtaaaaagaataatagtgacaatttaacattaaaattttaaaataaaaatatttgactaataaaggaagcattttttaatttaaatattttttaaaaaattttttattataatatatttatttttttataattgttacaacttccaaaaaagtccgtccgccgacagctgctgcacttcttctccctacacttcaccaataaaataattcatcgttcaattttccgtatttattcacttaacatcagcaccaaattcacccatccccaaaatgctcctcaactcgcaccccattcatgcaataaatttgtgcgcaatttattgattcagccggccgtccgatctcgcgagaattattttctcgaaaaaatgctcctatcatttcataagaaaatgtagaattttttcaaattttattcagtttttgttgaatttaaagctttttgcttttgtaaagactgatttcattatatgaatgcatttgtttggactttttttcgcaagaaaaccattccatttttcattaaaatggcatttaaaaacattttgaatattaatgactcagc

SEQ ID NO: 12047 - DNA, 1577 bp, Heterodera glycines
tttaaacgaactgattttatggccactttctataaaggcgatggcggtcgctgtatgaccgtaaacccagttttttgtatagaaaagggttgtccaaattgcaaatggatacagtatctgatttatttcacaacgccaacacgccgttgaaaataaaaacacaagtgcatgtgatggcaaaagttgtgaaattcaaacgcattttacggccatgaattgccgggaagtgaggcgatcaaaattcataatgatagagaatgtgtggctttacctgttttgaagctaagtcggggatctgacggctaatatgagaataaagtgcagttctctctttaaacgaactgattttatggccactttctataaaggcgatggcggtcgctgtatgaccgtaaacccagttttttgtatagaaaagggttgtccaaattgcaaatggatacagtatctgatttatttcacaacgccaacacgccgtttaaaataaaaacacaagttgcatgtgatggcaaaagttgtgaaattcaaacgcattttacggccatgaattgccgggaagtgaggcgatcaaaattcataatgatagagaatgtgtggctttacctgtttcgaagctaagtcgggtctgacggctaatatgagaataaagtgcagttctctctttaaacgaactgattttatggccactttctataaaggcgatggcggtcgctgtatgaccgtaaacccagttttttgtatagaaaagggttgtccaaattgcaaatggatacagtatctgatttatttcacaacgccaacacgccgtttaaaataaaaacacaagttgcatgtgatggcaaaagttgtgaaattcaaacgcattttacggccatgaattgccgggaagtgaggcgatcaaaattcataatgatagagaatgtgtggctttacctgttttgaagctaagtcggggatctgacggctaatatgagaataaagtgcagttctctctttaaacgaactgattttatggccactttctataaaggcgatggcggtcgctgtatgaccgtaaacccagttttttgtatagaaaagggttgtccaaattgcaaatggatacagtatctgatttatttcacaacgccaacacgccgttgaaaataaaaacacaagttgcatgtgatggcaaaagttgtgaaattcaaacgcattttacggccatgaattgccgggaagtgaggcgatcaaaattcataatgatagagaatgtgtggctttacctgttttgaagctaagtcggggatctgacggctaatataagaataaagtgcagttctctctttaaacgaactgattttatggccactttctataaaggcgatggtggtcgctgtatgaccgtaaacccagttttttgtatagaaaagggttgtccaaattgcaaatggatacagtatctgatttatttcacaacgccaacacgccgttgaaaataaaaacacaagttgcatgtgatggcaaaagttgtgaaattcaaacgcattttacgcccatgaaattgcggggagtgaggcgatcaaaatcataatgat

SEQ ID NO: 12048 - DNA, 500 bp, Heterodera glycines
  unsure (1)..(500): unsure at all n locations
gttctaaaatttnttgaacaaattttaaacataactgaagtagtgcaaaaacaatgcacagagaaacaaatcaaaaatgtaagtcaaaaaagttaaccctacttggtatttcatgaaagtggtgccgtgtccacgctcttcgtcggactgttttttgaaccatttcgcaatgttgtggagagcaacgtcctcacggtcgaagtaaaaggacttaacaaaagaaatttctgagcgatttagaagatttaatggaaccatgctcaagtagacgtagctggcgtacagctcaatattgatctgtttgttgatgccggcttcagtttcagctgcaaaattctgacggatcaacgattcctggtgttgtgccattgtcaaaaaataaattttcaggctgaggaattggaaaaaaatctaacatttaacgcaaaattaagcaatacttggaaattggcatgcctgtacttggaaagtgacttggtacgatccgagcactgatttaa

SEQ ID NO: 12049 - DNA, 3847 bp, Heterodera glycines
atcaggtccggggttcggaatttgtcgaaatggatgccgaattcgtgatcagcgaacccgaaaagccttagaagcatgttttcactacttttaaaaacaaaaattaattttttcgaaaaatggggggggggaccagctccactattaccaaagtcagtacctattaccaaaagggcgttatatataatagccatcctagaagccctatacaagcttaaacatttttagtacttaatgtattaagtgcgataaaacttttgaggaaaaggattgaagtcaccatcatataggtatcagtaccaggacccttgttttcaggactttttaaaccaacaaaaatttgtgaaaaatttcgacccaaaaggggggggggacccaaactgaattagtaccggtatatttcatattcctttctttaatcttcttttactttagagagtatttgattgagctttacttgaaaaaatgaccgaagaaagtgaagaatattgtttgggaggcagacctttatctgatctgaaggtggttgaattgagaaaggagctcgaaattcgcagcttgcctaaatctggcaacaaaaaagaacttgttgagcgtttgcaaaattttcttcgagatgaaaagtctgagcaaagaactggaggagagtctcatcaggcgcaaaaaacagcaccaacaatggaattgaaccaatctccgagtggggtttcagtgccgaatgttgtggcacaatatcttgcccagcagcaaattcagcttcaagcagccagacgaagtgccggtgatttctttgttaaataagttaattggtccgtaaatctctttggtctctattatattattattctgatattaaagttttgcttccctcagacagcaaaagtttattcagacaatgagaccgaaaatgttcaataagctctaatatactcttgcacatttcattttaacacccatgataaattattgtccttttttaattaaaaataaccaacgaaaaaatagtatttcccttcaaatacatattaaaacattttttgttcattgtcagataaaataagagccgacacttcactggacgattcagcagaaattatgccaatctcatcaccaactgaggaaatccaaccatcgcttgaacagcaaaaggaagaagaaagtcaagaccaaatcaagcaaagcagcgaatcggcacctgaactggtgaattctgatgtaaaggaaccttcggttgagaaaactgaagaatctgctgaggtattaaaacattattgggtccaaatagccataattaaaattcaacaaaattataacagttacaaaagggcgctgatcaacatttggaggtggaaactgataaatctcttgaggaagaaagaacaaatactgaagaaaaggaggggtcgggtgatggttcaacatcagaaaaggagcgcgaaataaagaaggaggaacggacggaagagaaaacgacggaaccgacgaaggacgaggaggagaggagcagccgaacagaggggacacaaggggaccagcaaatcgaagtcaaagccgagtcagacgaagacgaaactgagaaacccgtagagactgtgaaccgaaccgaaacggtggacacacacgccgaagaaatgtctcctgacaaaagtgccaaggcacgctcttcagttgtggaggaggaattggatttcgaggtttgcgaaagaaagatttggatagttattgttttttgcttcctttgttagaacgaggaagacgacgaagaggaacgcgaagaaccggcggatgacgggggaaagcgccgcgcgcatttgaaacagggctcaccagtgacgatgaaatcatttgagcacaaattgggaccggagcatatggagcagaaagtgaccgatgtcatttccaccagtaaaactgtcgcggtcagcgagtccgaagttgggcctttggtcggccaactgaccgcttcaatcaaagaggagtcgagcaaaccgccggagggacagcaggagaataccccggaggggttcatccggcgcagaccttcttcacccgcgaggcgggctaatcgcttaatgattggatttactcgctctgtttcagacaccctccgtcgcgttgggttcacatcagaaaccttaagcggccgttcacaaaggcggccctctttgatctgcttagtaagtttggcacggtggacactactcacttttggatggattccatcaagagcacctgcattgctacggtatgttgggttcagaatttaagaactgccttagattagaataattgtccttttagatttttttaactttggataaatttttaaaataggaacaagctcttccactttagtacgaaacggacgaacaagcccaattggcccgtgaacggcttcacaacgtcgtatggcccgtggcgagcgatttggcactttgtgtggaattttcaactgaggaaaaggtgatggattattggtgacaaatatacagaaacaaatctcattctgtcagctgaatcgacgaaaggcggaagaagagcaggaagcatcggcgaacaattcggcactcggcggaggattgggattgacaattgtggtggataacagggcatggattttaaaattgataattcacttaaactatggagatcttttccagggccgtgggcctgaaactgtgcccaactcgggccccacggtgctcattcagcacgacaaaaagcgacaaaaggacgcggaaaacagaaaaagaaaaggtgccttttgtgaaattaatggtgatttataaaacggattttagttgaggaattggaaaagtcacagaagactctcgacgaagtgttcaagaagacaaagactctgccggccatttactttttgcctttgtctgacgagggggtggtcattttgttttgttggtccatcggaatctgtgaaattaactccgaattcaggcggtgaaacgacgaaaaaagttgtcagtcgacaaacagcagtcacaacagaatagcacttccgaatcgcaccgaaattcgggcgggaatttgtcgcgaaaccgcccaagtgcgagtggaggaatgtcgcgaagaagcggtggtggcggggaaagcggaggacgaagtcgccagtcgcggcgataaacggaacggcgtgggaggggagggcatggaagttgtgaattcgacgtttgggtgggcagtgagtgagtgagtgcttatgacccaaactcagcgacctttagctgcttctcccctcccctcattcgaatatttctccccaattcgttcctttcgccaagatcaaatgtcactttttgtgtttgtttctatccgctttcagttccgctattttctcaattcgtcgctttattaaaggatttactcttccaagaaaagaacacccaccaattaaccaaattggctgattcaactgaacccgtctttgttgtcgccaaattcgaccaaagaatgctcttccattcattcgttggcattgtgtgaagaatggcatgcgcttgctgaccaacggaaatttatttaaacaatttatttgtttccgtgctgatgttcttttattttgtcttggaaagttaaataaagtataagtcccatcatgatcggaatccccaaatttttaataagaaacatcttaaaagcactatcattcgatttttgctatcgatcggtcccgattagtaggcgatgaagcggtactctcgaaagtgctgattcagttgggtacgccctcggtggggagcggggaagtgtgcggttccgcttttcgcctttcgaattcgcccctgggggacgccccttttgcttgtccaccaccagttaataatatgct

SEQ ID NO: 12050 - DNA, 3784 bp, Heterodera glycines
atatttaaaaaatataaaaggaaacaacggatttattaaaaaatcacctaatgaattcagaaaataggcattgttaaggctatatagatttcacttgttaataaaataaataatgaataatttgtttttaaatcgttaaaaaaatatttaaaaaagtagaatttattttaaaaaattcagtgatttacacattttttagttgtttttaatgtttcttaccaagagcacactaagaaataaagttattgggaaaaatatgaaataataagtaaaaaatttataaaattttaattgtaagaaataattttatatatatactataaaataaatcacatttttgtcaccatttataaatataataatgaagaatatcttacagttaaacgtacaaaaaaaagtaatgaaagcgaaaatattattttataggaaaatattattaaaagcgcttgaagaattataattttctaattatataacattttcacatattctactcaataatacgtttttaaaatacatatttcacaaaatatttgtattaagtttttttatataatttgttcttatttaattaattatttatttctcatttagacttattttaatttggttgttttcttttcaatttttatgtccctttgcttctaatttgtatttcccgtcaattcagtgtcactgtaacatcgattgtttttctgctgctgcccagcagccatggtcattccctattcattcattcgttttttttgttttatgatatttattcgttctgttttctgctgtgaatttaatttgctgcctcggctttaaattgtaaaagtaaattgtttggattttggattcgggatacaattctccatccccatttggctaattgtgtgtgcggtaattgcttcttctcgccaattcaccgccatcgcctttctgtgtgttacgacgtccagcaattgttgaatattggcttgtgccattgtcggtggttatcgatcgcttttcagttgagtgttgaaattggacgatgaaaaccgcgtattgcggaaccgcaacccgcctagggtctataggtttttcggcgattgaaaaccgcgcctagcggaacctcacccttttagggtctattggttttttgacgcgatgaaagtcggcggtcgaaatgtggacggtttgttttcgtccacttgaagaccggcggcagaatgttgaaatccacaaattactctcgcctggagatgtaataaatgaataacaaatgcgctttatgtcgtttgctttttagctgactgcgccaattgttcggtccgagggatttgtttaagtccaattaaatatttatttattggagaaggaaaagaaagtcacaataatttggggaacaaatataaaagcaaaatgaatgaagggaagaccatctaaaggggaatgggagcatatttatgggcgagggaaggaacatgaaatggaacagaaatcgattggcattatgtcatgtcattcaaactacggcggcagtgccccgaacaattttgtaagaagtgaacgctaatttgacaaaattcattagaaatagggtacaaaatataaaaaagtggcatttaaaacatataaatggtaaaaataacccagctgatttggcgtcaagaggaacatcaatggaagaactacaaaatagtgaaatatggtggaaaggcccaaattttctttcagaaagggaaaactcttggcccaaaacaatacgagaatatgacccaacgaatccaccagaaataaaggaaaaacaaaatgttatttttgagataaattcagctattaaggaaaaggatttttgtgaatttgaaaaacatttcgaaagattttcaaaatgggaccgtttaaaaaattcaattgcttacgcacttcgagcctttaaaaaggaaaaccaaaagaaggtttcccaaaaatatggaaaaaatttcggatatcaaaataaaaaaaatggaaaggagataacaaaagaaattattaaattaattaggcctttagaggctaaagaaatccttaaagctgaaaagctgattttcaaattaatccaaacaaatttgtctccaaccaaatctattataagaaatttggatttgttcaaagatgacgatgatttatggcgcacaaaaggaagaattttaaaaagtggtttaaattatgacactattaatccaattttcattcccaataattcatatattgcgactttattgatcagagatattcatatgaagacaatgcatggcggtcgcgaattggttaatagcaaattgagagaaaatttttggattcctaaaagcagaaggaaaatttacgaaatattaaaaagaaaaaacaaagaaaaatgcggaatttgtgcaaaatttgcaaataataaatatacatatcctaaaaaccctcccctaccagtgtttagagtaaaagggaaaggtgcatttgaacatgttggaattgattattttggacccctctccgtaaaaacattggatggcaataaaaaatgttggggagcaatatttacgtgtttaattgtaagagcaattcatttggagttagtttccgacataagtgccgaaaaatttcttttagcatttcggcgattcattaaaagaagaagagtgccaaaattaattatttccgataatggtacaaattttgtattagcaaataaagcactaaaacaaatagtactcgaagaaaatatacaaaataaattatggtcagaaatttatcgtgatccgacggtacaaaatttttcatcaaatttgggaattgattggcaatttaattcgccatatgcgagttggcgcgggggagcttacgagagaatgataggacttgtcaagacacatttaattcggagtttaggaaaacaattattgagctttgaagaattaatgacatatttaatcgaagtcgagaggattgtaaacgaacgccctttaagctatataacccaagatgaagtgattgaaccattaaggccaatcgatatattaaatccgacagatggagaacctttctcactaaaattggatccaacatttgatcggaaagacgtgaatgaatattttgaaaagaaaactaaaagagaataattatttgaaatttacaaaaaagcaatttttaaaagcgaaattttttggaaggaatggagtgaaaaatacctattatcgttaagagaaaagcacatcaataaaaataaagaaggaaataaatacccaaaaatcggacaagtagtaattgtgagagaccaggataattatccaagatcaatgtggaaattaggaaaaattttcgaaattctttctgacgtgagcagttggaacccgagggcttggcttatgggcatgcgtggcacccgtgagcagttggaatgggcatgcgtggcacccgtgctcagttggaatgggcatgcgtggcacccgtgagcagttggaatgggcatgcgtgcacccgtgaacagttggaacccgagggcttggcgaatgggcatgcgtggcacccgtgaacagttggaacccgaggcttggcgaatggcatgcgtggcacccgtgaacagttggaacccgagggcttggcgaatgggcatgcgtggcacccgtgagcagttggaatgggcatgcgtggcacccgtgagcagttggaatgggcatgcgtggcacccgtgctcagttggaacccgagggcttggcgaatgggcatgcgtggcacccgtgaacagttggaacccgaggcttggcgaatgggcatgcgtggcacccgt

SEQ ID NO: 12051 - DNA, 1869 bp, Heterodera glycines
  unsure (1)..(1869): unsure at all n locations
taaaaacactttttaatcttttttttatgggaccactctcatttaggaggacccnnaagggccangaaacncgacncaccattttaagcccgnccaagcgaaacaganaaggacaaaaaacgggagagccggagacngacaaagaaaaaancaacagcgaggcggacgggncaccnnncaagaaannacaacaaggaaagagcancgnnnngnaanccaagaanaacnaaaagaanaacacggggacaaaacgacaaaagngccccncnanncgnnccaancccngngngcngcnncnncaacngaacgaanangcgcccgcgnggcgacgnnccccaaaaaggnaaaaggnagacccaanccgacgancgcaanagacgnngacnaaagggaagnnaacggggacgcagaaaaagaagacggcacgggcaccaanncgagaaagacnccaaancccnaacgagaacnngaacaacaaaaagnngnaaannagnnaagaanccggaancggncnaaacacaaaannaagcaaaaaattggttcaaaaaaatcataggagaaggaagcgttgcgaggagaaacgtgtgggaggggaagaagcgaagcacaccttccaaagcaagcccgtagccagaaaaaaatnttcggggggggggggaatctgnaagacctttttttgttgcttttcgggcaaaaacaccagtgctattntaaaaaattcagcgcccgagagccaaaaacagggatttgtactaaagtaaaatgggggtccggcggtgccaataagcgccgccgggaaaatttttgaaagtgagtgcaatttgttaccctatgagatttcttttcctaacttttgcgtgctggactgggattagaaaaggacccgaatattcgctcattgccgctggtttgctatgcctcacattctcatccaaactgccagcgtccgcctgcagcgtctctttgagggagcgaatcgcatggcgaatcaatgcgtctctgtcagccgtctcaaattctggtaggttcttttcgagataagttcgcgcactttgtgaccgagcaccaatcgaagcagcaaacatttcggacacgtcccccgagggttcggctttcacaacgtgaggccctttgtcctgtcaaaaagcaaatatacatggaaaagctgtaagagacgaacatcatatccaatgatgagcagtcccacaccaaatgggcggcgtccgtaatattgggtattggactgaagttctggaaaagtcgaatatattcgccagcggcgtcggttacaagaagacaaaaaaataaaatataaggaattagtcttggctctctttgcaagcaatggaagggggggggttgacgaactctttatcaaaatttgttagattttcaaacttactcaagcctaatttacggttgagcagttcaaccgaaattggattatgatagttccagcgaaactcggcgcattcactttgcataaagcgtctgaaataaataaatttaatattcaggtgtaattttctaggccaaaaaatagataaaagttgggcccatcgactttagttagtttattttgagatttgtggtcccactgacatcacgcaattatgaatatttctcaaattttcgctttatttctgtattcgaactcacgccaaaatgcgtccatctgaaataagcccagacatagancaagccgagatgatcgtccaatttgaaaactttctgctgatatgaagaaagctcgttttgtgcacgctaaaactcggaaaaaagtcatctgtggtcactttttaacaactccccctccatacagaatatattgaccattaccataagtgcgaccacaacagcataatcttt

SEQ ID NO: 12052 - DNA, 3587 bp, Heterodera glycines
ttgaaattatttattttggcttttttattatttattttttttgaatgaccaaataaggatttactaaacattttagaaaattgtttttcgaatttcgtttttcctaatttgtaatataatgcttggttttagatgtttatggccgcggatgatagcaatagcgagaaggaatcaaactctttgagcattcgaactgacaaattgctttcggtccctttcaacggagaagagacttccgagaacacatcccaacagcaacaacagcaaacgcccgttgcccttccgacttcatcttctaaaattttatctaaacagcacccactcaagacgaaatggaatttctggtttttgaacaacaaaaagaaggacatggactggttggaaaggttgtcgaaagtttgcacagtttcgaccgtcgaggaattttgggcgtaggttttgtttctaaaaggacatttattatttggttttttagtttttttgacaacattcatcctccatctggcatgtacggctgcgattacaactttttcagagatggaattgaacctttgtgggaggtggcacagaacaaagatggtggtcgactggtcatccaagtaagtcatattccttttaagtcatttgatgaattctcctttaggttgacaagcagcgaaatgagctccttgatggttggtggatggagtttttgttggcatgcattggtgaacaatttggagacgattctgatcaagtttgtggcgccgtttgcaacatccgtaacaaagggtcgaaggtaaaaaacgaatgaattaatcctccactggactaattactttttatttttagatcagcatatggacgacaaatgcgtcggaagaagacaaaaacagacggatcgggtgagttttgttatattttttctgacctaagctgatcgtggaatatttctgtaggcacgtcttaaaagatcgtcttcaagcttccggtggattaaagcctattaagataaatttcgaaggtattatcttgctctattacattttaggcgtccaatcagtgactttcctcagtttcttaagccttaactcttttcggtactttccccttttggggcctatttgtattttaaaaagcaacaaatggagcgtagaattgcaatttttttctcattgcataaatccattgaggaaaacttcgcacaaattgtggcatttatgccctcaagtaactttggcgcgtaatttttggaattctgcgcttcctttgtttaaaaaataaataaaatttaggtcccaaaactgaaaagtaccctcttttcttacttggtcaatgccttctttctttgtatctaaacagctgaaagtatatgattttttaagataaaaatttcagtgctaaaggcaacagacaaaaaatcattcttcaatatattcgtaaaattgattggtcgcctaaaagtcgattgggtggtgcataaatagccttattttaaatgattttctttttccaatttcattttagaccatgaagtggtgcagcagaaggtttgttttttgcttaatttttcaggcatttattttggcttcagacttcgagtgccatcccctgccgcttcatgatttaatgctttgttgttgatttgaaattatattgttagaaacgaaggcaaaattttatggaccgcgccttatgttattggttcggatatgtaccgtgttttatttcattgttttctatttactcacgtatgttagactgataaacgctttatcgtttcacgaaaatttccttaaaccagcttaaaaacataacacacaagtattaataagatcatcaacattgtttgttgttttgacgtcagtttcttgattagcgcctaaaatggtcttagaaaagggtttcacgggatgatatttttatcgcggggggggggcataacggaaaatcaacgcccccctgaaataaagccctccttttcaagggggttgaaaaatagagccaccaggggctctattatatgaaacggtaatattagggttggattctcactttttggtactcattattagagctgtgaatttaagtcgcgaaaaatcttcaaaaaagtcctcgaaaattttcatgaaaaaagtcacaaaaacaatttatatctcggctcttactgaaccgagttggatgcggtttttggcatattatagagagtttagagcagaatcacatatatttttcccattttcccaaaaaaaaaaatttgatatgacttaaattcccagccccacccccccccccccctcatttcacagaaaaaccgaatttaaatgattattcaaataaatttaaaaaggatattttggaatttttaaaaattttgtcatttctaccgatttttcgaacctttgatcactttttcctgatcagtttgggggtcagggccaaaaaagccgaaaatttgcaatagtaaatcgactatgctctacacgataaaagtggtttaaaagtgatttgaacacatacagttcggaattttcccttgttaagaattcgtaaaactatgagtaaaattttactcatatttgctctggaattccataaagaaaaacagaattaagcaatgaatgcaacatggaattttgtgaaaacgcatcgtggcaaaatatttactgggacagcaatcgttgcaagtttatattccgcaaagaaatttcttgaaacggatacggccactgtatgtatcacaaatgtgaaagaaattctttttggctgtggcgaagagtcagctgatgaagaaattgaacaatgcattgctgaggtgaatttgattcaacgatatgaagtgcaaattaattatttttaaagacgcggcgccattttctcttcgatgtccatcagcagtcgtgtgacaaaactctgcgaaaaatcctccctgagctcactttgagaattgccgaaagatttaatactgaacaacttttggatgagttgcgatcatcgccagggccgagcaaagaaaggaaaatccaaatttgggagcatttgaaagtgatgcgacgcataaaacactcattaataaaacactttaagacccattcactgtgccgactcatctctttgataattgtttttccgctgacaattttagtattaaaatcgcaaaaagccatcatctgtcagcagttgtgtcaattgctatcaaacaaaaagacgaagaaggacgaaagaagctcccttttcagccaaggaatgtaaattgttgtgaatttgggtggtgtttttccgaatttacaaaaggatccccagtaatttagttcttttgtgaattcattgctccagtcggatcaaaatggaggagccgttcagcaaccgcgcgattcgactgggaaattaaccgaattattcaataatttgacggtgtactttcgggaagacggtaaaacagcagacaaaatttggacaaattcgaatttaaggcgtcgctttgctgatgggactcatcgagcgaatcgtttgccaatccgtagaaaaagtccctctgagcggacgattcaactccaatgactttctctttttgattgaaaaaattcgagcaaagatggaggaaatat

SEQ ID NO: 12053 - DNA, 3806 bp, Heterodera glycines
  unsure (1)..(3806): unsure at all n locations
cgcggtaaaaccgccccccccctccctttcgccccccctccccccccccaaacccgtgccccaggcacgggttcgcgcggtaaacccgcgcccggcggcacgcctcaaagggcagctgtcccaaaaagcaaataatcatgacgacgatatctggatactaactactaacagccacgggataattctccccgatataatcaagttttttgttattnagcaaaaatgtcaaatatctggaaatattctccaccgctgggttgattgtgacagatctgagaaaacgtttattgcctgagaatgtggacaaacttttatttttgcatcacaatcttaaaatttatgattttgattatgaataaaatttttgggaaaaaattattttaaaaaaatcggaacgtaatcggaatcggattttgtctggctcggcacatccctggtgtaaatacatttcgcctactaaccaaaatcattcatttcgcctacaaacccaaaaaaagatatttggacaacgaatttcattagaatattatattctaaattaatttttaaattgatttattttagtattttttataatgataatttaaatttaacctaaaggtccacggaaactaaaaatttataaaattccaaagaaacaatagaaaatattaaattatgtaaatttgcatcggcatcaccagtagggatcggattcttagttttttaactattttttctgcggctttaactcgacgagaaatgcacgaaaaacacattctttttcgaaatttttcgtttttagtgccactattcatcactaggaatcactatttggagcttcgccactaaaaaaaactatttcggaagttagccactaaaataattttttgccactagtttggcgtttcgtcattatttttgccactattttggcattttttggaaaatttcccaaaaaatagaatcgacctaaaaaattttcaaaaatacacccctaagaatcgacctaaaaattttcaaaaatatacccctaagaattggaaaaatttcacaaaaattcttcccccaaatttttttttcttgttcaatattttctaagaaaatattttgtaactgcaatcagtgaataaaatctttttccttaattttaaattgttttaaaattaaaaatagctatttaaaaaattacacccctaaatttggaactttttcgccactatttttgccactattttggatttttttctcactatttagttaattattttgggattttttgccactaaaaatccgatccctaatgataaggaaggaatgtggaggagggaggtcagttaaacaggtcaaaagtgcaaacacaaagcatgtaaatgacctaattggaagtaaaaaagttgtcaaaagaaaaagaaatagttaagagaaagaaaaagacaaaagaaatagttaagagaaagaaaaagacaaaagaaatagttaagagaaagaaaaagacaaaagaaatagttaagagaaagaaaaagacaaaagaaatagttaagagaaagaaaaagatacaaaatgaaatagttggagagagaaaagatttctcctccccggttgtagtgattaacaaataagcggaggaaaaggaagaaaaaggaaaagaaacgagtgtaaaaaaggaaaggaagatacaaagggaattgtttcgaatctccctaattttgcactataattatgttataaagcgataggaaagggcctattatttgctagtgctgttcgagaccaaaaatttcccgagactcgaccccgagacccgagaccgagaccgaaaaccccgagacccaaaaaacccgagacttttttcaaaaaattttccaattcgcttaaaaatcgttaaaaacattttttgactctattcataactaatttttggttttttttaaattttgattcaattggtacaatatttatcatttcaaaaacgcacaaaacaaaaattcattaaaatttaagtgcaatttgttaactgatttagtccaaaaaatgaaaatattttacgaatttaattgttaaaattatgattgaattcccaccgaaaaatgaataattttgaaaaattagaagaaaaacaactacttggaggggaattactttttttaaaaattttcttatttcttaaaaattatgaaaaattactattacgtttgaaataattgcatttattcaactgaaaaattatgaatcaaaattaaaatgcaaaaaaacagggctcccagattaaaagtttcaaaagcctcatttggtatgcaaaaaagcctcattttgagtcaaaaaagctcatttttacaactttattcaaaacacgcttattccaaaaaacttttggggaacaaggggggccggcggtgccgataggcgccgccggggaaaatttagaaaatttgagtgttatttgttaacagatttcaccaaaaaattaccaaatttggcatttgagctaataaaaattagtggttttaggcgacactgagtaaaagtgcaaattttagcctatttattaattaaaccataattatcataatatggattttttattcttgatttaaatttaaaaaagcactaaaaatttattttgaattttccgttcttaaatagtaataaaaaaatttcacaaaaaattaatgcgtaaataataattatttttatttgttctaccaattttccagggtctttaaaccttattttgcctatttatttaatatgataaatgctaattttaataagttcacgatagaaagttgctggtaagtaaaagaagatggttgacggttaaataacggtggttgcttgttgctccaccaggggcctatttcaaattccgtcaaatcattgattgacgtcgaatcaaagaactgtttcaatttaaaatcaaaggaaacgtttgattatcaaaggtttctgtttcaatttcctttgacgtcaaatcaaatccgaaatcaaatgtttctgtgataaattcttttgatttttaaaatcgtatttcaattttgtttgacgtcaaatcaaccgttaggcgccgccggaaggttttttcggaattttaatgaattttattaagaaattcattcaaaatttaaaaaattttccaatctttcaacccgtcatggttgaattaacttttaaatttttacaacgcacggggtccccgatcccccgacgaagtgtcggcagatcggggggcaaaatgtcgagggccgtggacggggccgaggggtcggggtcggcgcttaaccctacaattaataaaaactacgttaaatttgccaacaatattttttggcatatttcacattttggaaacttttacaggttccttaaaaaatttaaaaataacgaagaagaggtaacctgtgccaatagacgtcgctgggaaatttttaaatgtttcaaagtgatgctagggcgttcgccaaacttccaattttagtttttcataaaaaaacccttcttgaactgttcaaaaacgcaatcaaataaatatagctaataaataaataaacataaataattcaaaaagtaaataatattttattcattattattttttttgcaattggataaataagtaatttttttttgtgaaaagcactttttgtggtgcatttgttgatggatcggagacatcaatttaacaaatgacttggaactatttccatttaatccattcgtttgtctttgattattcattttgctcacataataaatttattttcagaaaattcgtacattttttgccatcctattttataataaaagaaatttccgaaaaattaaaa

SEQ ID NO: 12054 - DNA, 1415 bp, Heterodera glycines
cgcactgggcacttgccatcagcaaaatgtccatggcaaagattgtggcgaaaagcatcacagcgatggggacaatttgggatttggaacatataaaaagattgtaagattgccaattaatcaaaaaacagaaaatttatcaaaaaatggcatagaattcgcatcttttggaattttaaaataggctaacgaaaatgtgaattataaaaaaattttagattcagaaaattaccagtttttgtggtatcgtttgagaattttgtaccgcttattttttatacaattaattcgaaaatcaatttaattaaattttttgttattttttgtccattgaaaactgtattttagcatttacgtagacacaaaagctttttttgaaaacctagatgttactaaaaagcaaaatttgtaaatttccagaaaaaacaaatgaaaattttttttatttcttaataactttttcgagtaggctaggaattttagatatttttgaaatttttggaaaatttataattttttacggcgaagttatgtcccggtgatatttcggccggcgactttttccggtgacgttttgtcctgctcccccaaaaaacacacaaaatatgtcctaaaaaatcaaaaaagggaatattcaaaataaaaatgtaatcaaaaattatttatttctcaaaaaatctatttatccatttcacttgaacaatgctattcaaacaaaaactatcaaactccgaaaaaacaatttataagtagggagggatgtaaattttatgcaaataggtttcacgggatttaaaaatgctggtttttctgttcgttccgtagttgacagaatgacttgaaactttgcaggaaaatagcttagtataagggcttaagggctttcgacctgccaaatttcagaatttttcaatcatgtgcaaactttttacaaaaatcaaaatgtttttaaaacttgaaaatttcacggaaaaatttttccgcttttcccataaaaaatgaataattaatttataaatgcataaattacggaaaataaatattggtataaaattaacttgttattaataaatacataattttggagataattttgatattttttgtttttagagtatttttgttaataagttttggacagaacaggtcaaaatggggcttttttcatttttttagtttttaggcttgaacgagatggaaaagccaaaaacaatttaattataacggtttcaattagacatggctttatttatttattttcttgttaggttttttgattttaaaaatcatttatcaaaatatgattcggcttaattttattgtttttgagaaaattttacgatttgcagccccttaaatttgaaatttttaaattaaatgaaactaactttgcaaatcgtttcaaaaactacaaa

SEQ ID NO: 12055 - DNA, 1752 bp, Heterodera glycines
gctatctctttttttgataaattttatacacatacaaaatgctctcgagcatgatagggagggcggtgcgcaatagaccttttatttttgagggaatttgtaaatttatactctatcccagaaaaatggctatctctttttttgagaaattttatacctcacacaatcgctcgcgtatgagacggaggcctgttcactatgtacattgtatttcacagacgcttattgtatgtagtagttgagcgtgaggaggttttttatctctatactagatattctaggctcatacgattttggtgcattatttaagaaaagttttgttatctataggtacttgaagtgtccattttcattgggactcagttgtacaagtgctcagatggcatcggttggacttcatttcctgatttttagattaagctcgtcaagagctttcaaatggtaccaaatttgtccgaatttgaccgttttaaaggttcataggccccccttttcactcaatttttcgagttttgaaccggttcaaaaaccggttttttggcatttccgcaactcgagacatatttttccatgcttagctccttgagacgaatcgactggacccattttttcacggggcgttcactatagtttatccaaactctctttattttaatttaattactctttttttgattttattaattttttttcgaatttttgtttacaataattgggacataaaattggcctacaaattattaattaaattgttctttttccctcttgacatgatgcccacattttccaagaattttctcacgcacttcggcaatttgtactgaatgccgtctatacacatacatttttgtatctgtaattgctctaattgatgtagaaaaattgaggttctcatattaaacaaaatttatctttctcattcaattttcttttttaatttgtcaatttttacgtttattaaattttggtggtcatataaatatttaattaaactaccattttaaattaattatccttcaatttaattaatgtacttttaaaatatatattttttttgtgtgtgtgtgtgtgttaattgcattttacgttcgtcaaatttgatcattttgatttatttattttgatcaaattattcgtttcgagacggcgccgacactcgcaaagcaaatgaatgtgacttaacttaatcaggcaaattgtttttatttggttttcttaatcaaattttccccaatttgtgaagatatatttatcttttctttctgctattttcatttttttaatctaaaagtgtgtcaattttttaggagaatttaatggcaactcttttcaagtctcaattaataaaactattttcgtaatgtccttactcttaatgatttggcatattttgctgttcatagtttagcttcttactatagggaaattgtcggattttcgaaattctgtttaatgttaagccaaattcttacaaaatctgttcgtttgaaattagccaaaatttttcagcgatttttttaaattggtggtagaattcaaaactaatacattaattattttcttctttgaaattcataataatattctgaacatcataacatcaaagctttgcacatttatttagagttaattcaattgaccttcgatttttgtatttttttttgcaatttttttctgttttttgctcattttttttattttacatttgtacaactttggaaattttcatttttttgtcccaaaaataaaatt

SEQ ID NO: 12056 - DNA, 1282 bp, Heterodera glycines
  unsure (1)..(1282): unsure at all n locations
attcatttaacactacataattgtttttctttaaaataatttccaattaaatgctcattttcattgcgaaatttctcattaattaattaattaattttattttccattatttttttggcaaaataaaacagttgcccattcataaatggtttttgtaaataaacaaatatcaattccatgacttaactctcgaaatgtagcatttattagtcataaatgcacacataaattaatgtaaatttaattttgatatgactaatttacatgtacaaaacttgaagttttttacaattttttttccccaaatttgacatttatttgtttaattttaaaatgaatgtaaataagcgtaattgctaatggctttttgccatttatttctttatctgattcattactaaactccgtgtctcccccccctgcccctctccctctctgttcccttttttttatcttctctctcttctttcacatttttccatcgtatctccaatctctttcatttttatctacgctttctctctctctctctccctctctctttttttctctctctctctcttttttctctcggtaattaattatttattacattttttttcattattttccccctcttctttttctatgcttttcctttttgtccatccatggttcattatcctttttcctcaataaatttacgatttcccttctccaacagaagcaggcttttcctttttgctcctcttcacccttttctcgcctaattattttgatggatcgccccttttactccgcgggtgcttttaattggctccctccctctcgcctttgtcgggttgccacgccgccaccctcattaacacaacttaatcaacccatccaattttgctttgctattaattattataagcctctagctaaaaaaaaaaaaattgttttttaggaggatggaaaatggaaaatgcgaatagataaaaagtggtggggaaacggcggtggcgctacacagcacaattaacacttaattattcattgtgccacacccaattcaattcttttttgggtaattatatagcttcagttatgtcaaacttgtacttttaaccatcattccatgaatgaattgtgtaattaatttgtgcatttttaatgtttttatatgaaaaaaatttttaacattttttaaaagtaataaattcggaatatcttcatctaataaaaatttatttttccattatctctaatttctcataaaactattttaattagtaaattataattttttaacaantttatg

SEQ ID NO: 12057 - DNA, 2336 bp, Heterodera glycines
  unsure (1)..(2336): unsure at all n locations
gcagaaaaaattgtctggtttttactatgacaatttaattattaaaatttcattttaaaaagtntaattcgtgtaatatgttttattttcaatttactttttttctcaaaaaaatcttttatttttaatgtttaaatttattttacccaattatttcccattttgtttttattattttccatttagaccagcccaccaccattcatttgcgcacctggaaaatgaaaattttattgacaaatttcatttatattccccacttgctccgtttggaccggtttatacttttaatttacacatacacacagtttaattgacgtgcgttcgtcgcccctcctgccgtccgccgcccgcccttcacgttaattacttactaattgagcaattaatgtattaaagtgtccctctccctcccattaccgtccgcccccgtctgtcactttttttcttactgtcattttgtggtgtaaaatttaatgcgatcggtgattgaaaacgttcccttgatcaattagcaaccagcagtcaggtgggccgggagcacaatttacgacgatatttagagaatttattatttccccttggcaaaaaaaaacaccgaatataaaaaataagaaataaattaatttataattggcttctctttaatttgaagggaataatattttgagcaatttcgtttaattataagcagaatatagtttcaagaatttatcacatcatatgtggttttggagaagtttaaagaggattttttgaaagtaaggagttgagttttttttattgttttaaaggattttttgacaaaattcctcaaattagcaaaaagctgctagaaaaatctgattagaattaaaatttgcccagcctaagttccactagccctttctttataagacaagatttcattgttttccattgattgccaatttaaaatttacaattttcgtccccaattaaattacttctcccgtaaacaaccggttctcgtgcgctctcgaatgtgctgctttgatgttctcgacaattttgtctcctatttttttgacactaaccgccgcgccacacatttctttcacaataaaaacatgtgttgtgttgtcctccctttttcattgacttctgccgctttcaaattgttccaccatttaaatgtaccgccattgttcctaaattttgaaatttgttcaaattttattccttttttaaaggtggagggggcggggactttggcaagattcgttttaattatgtaataaacattttaaatgaatttcaataacggcgcttgaggtttaagctttagtctatcttagatattggaaaaaccaaaaaatctttaaaatcttttcgctattaagttattttattattttttgaattgctcagccgatcgagaatctcccaattaggtgtataggcacaacgcttccgtttttgcccacgcctttcaacagtaattaaattttttttctcaatccgacattactaatgaaaatattttgtttttcattattcagacctatttttattaaattctcatgttagggaaactctcttttcctttttggtcgttaattgtttttgtttgtcctctcattgactgcgctaattactacatttgttttaaaattacaaaaagtaaaaataaataataaaataaacccatttgttataattttattgcattttttaattacttactattttttttattacaatttttgttttattttcttatcatttttattttattaatagaattttctttttattccttcctttaaattttatcataaatgattaatttatattctcccggaattctctctgaataaatttgatcaacatttttgttatcatttttctttttgaaaaaattctcatcagttcatcatctcgaacaatctgtggttaatttattatcttttatataaataattttatttttttgttaacacaaaaaatattaacattttttgaaatcttttttttgctattttaaaataaatgtttattcaagttttcttctgctcatgacgtcatttttaaagaaaattaattaaaaatttcatgacattaaaaaattcgcttgcccaaaaatttcgaaactttttttttcttgtgaaatttcgttgtttccattgttttttagctctcatgcgcatattataatcattcctcgctttctcgctttatctgtctgcttaattataggcctattagcgtagctttgtccgatttgtagcaccacatgtgccatttttgttaatgactgctctcttttttctcggcctctacaaaaaataggattattttgcgtttcaattcccatc

SEQ ID NO: 12058 - DNA, 4186 bp, Heterodera glycines
attcttaaaacgaaaagattacaaaatttgtttgtccattatctgcaaacggtgctctaatttcagtgaggctctaaatatatttttaaacaggaaacattgctgtgacaacttgccctcggattcgacattgagtgcgttgtgaaaaaaaaaatacaaaagctaaaatggattctttttttaatgtgcaaataaagtgacttatgcaataggcattactgccttttattacgcaaaaatagttggcctttttcaataaaaaaaaatcgctaatcattgtaacataataaacttagccaacagcgatagaaattaaataaaatccaatcatcatcattatcatataaatttaatgcattacagaatttaagaaaatgtttggggtcaaagattgacgaacggaggatggatcggaagggacaaaggggtaggtaacttttttttgttgaaaactgtaataactatcaattttaaaagcaataagagaccaatggaaagcataaaataaaataatttactttatttaatgtgtaacgggtttaattcaattattttggtttatttgttaacagtgttgaaaattattatcaacatcgcaattcccacccgataatccactggcaaattgagaaacagcccatcagaagggcaacatttcgacaatgttgaacagaaagtcgggcccgaaatttgccttgacggagtcgttcatgtccacgagagtacagcacgcatacatgttaaacgattcggcttgcaaaaattggcttgcttaagaatgaaacaattcgaatttgttttgttttttgaatccattcatttactcacaaattttgtggccattcaatgtgaaaaaaataccccggttgtttgcgtccattccgcatccgacaacatcaccgggaccaaactgtgcgaatccgtcaagcacatccggcacgcatggcaatttgctgtggatagacccgtcactccacaacgcaatgcttgcctcaaaatgcccgaccaattcatgcatcctcatgtgcgctggggcaagtccaactccaacgtcccttaatattatcaaacttattttaaaacattttttttaattcacgatttcatctgaagaacggtaatttcaaagttaaacaatccaaaagcactggtggccggcataaccgagcgcaccgacacaaaatcttttaaaaaaaataaatatttatttattttattaatattattacagttattttgcgacaaatgctcgaccaacaaaaaatcataaacgtaaattccctcgttgcaatgattaatgtcccagctgtttaattgctgggccgcgagaatggactgaaggcaaattttgatggcttcaacagttcgcgtcagattattctgaaaaaatgaagagggcgaataattaacaatataagaaaaaatatataatttttttattcaattaaatttaatgtctcaaaatcgtggccaaattttcttgcattgattaatttggaaaaatagttaagataattaaaataaaataaataaaaaataaattaataaaaataaattaataaatttaaaaaaataaataaataaattttaaaaaaagtttaaaatagaatttattttttaaaaaattcgttttcaaaattttttttgtcaaaaaaaaatataaactttaagtaaaaattaaattaaattaaacccaccaagcggcgaaacatggacaaccacattgcatcgtcaattggaaaacgcccaccaccgccaccacgaacagggtttgctccggcacttgtatttggttcatcaaagtcaataacatgtgcgcgagtgccagtttgagaaacacgacgggagcgctcatacacagaggcagagcgcgaacgagcttaaaaaaggaatcattatcatttgtgacagcataaccaaaaaatacccctaaacccaatgaaactcaacagaagacaaaaagtcacgaaggcaataataattaagccaattaaaatcattctaaattattaaaatatttaaacattttattgataaaaaataaaatggaaatgagcaattgtcgtaacggataatcggaaaattttccgccggaacattaaaagccttttttttttttttttgcctttggactttacaacttaatctcacggacatttctcgcgaaataaagatttaatctttttttattagcaatcattaaagatgagatatggtaagaccgtacagcattcacctcataagttaaggcccgcgtgcctttagaaatgccatttccaattgactactccgattgtgcatgcgatccgatccaaagtcaacatccaccagtaaagtgcgtcatccgcatgcaattcgcgcctcgcccttgaggaatggctttttcggaacaatggcgtgaagcattgccaacatttcaacacccgaggccggctcgttgaagcttttttggggtcaacggttgttgggcgatttcgcaaaggatcagtcgcattcggactttggggaaattcaccagtctgaaagaaaggaaagcagtgaaaagcagccaaaacggagaacggaccaaaaagacttctcgccaattcgccctcggacaattcagtcgcgagacgactcgtcgcaaaggaaagtttgtcgttgggtctgtcgttccaacagaacaaaatggccatctgatgagaggtcacttccaagtcgaaccttcccgctctgctggtgaacgaaaccttcgacagaacatttggcatttgtgaactttatttcaatgttaatttgctaattaccgtcccccgtggaccaatggtgggcccaattcagctttcctccgcagtgctgctttttttgtagaagtcctcaacttccggggtcaaatcctccaattcccgtggcaaagtcaggtgcgaacggtctcgactcctcgaccatgctccggcattcagaattttgacgcttacacaatctgaaaaaccaaaatgaatgtctgtcgttcagtgttccgtcaaccggccatttggctgcagctgccattttccagcgatttccttagggccaagttgagcatttcctccttttcttagtcggccaccaactcgagaatcagtcttcggctcaagtgcgtcttatgataacgcatgaaaacatctttagctgtgacatatttcagcaccaaaagctaaaaaaacgaagtggcgaaatatgcggaatacgtaacaacaccaaaaagaaagtcaaatttcttttccgttttgtacttcaaatgtaaaataaccattggaccgccctgccctaactcaccacgttgttcagtctctcttgtcgatctcttcagaagaaaactttttcgtcagggccgactttctgagcaacaaatcgcaataatttgctagcaattctggcactttgactcgatgttcgctgtgcgtccactgtttagtatttattttaaaaattgcttttgcgcattttcaacctttttcgttcggtttgggtccaactccaatctgaacacttccgtgttgttcaccatttcttgaaatgctttgtctctgacggtcaaaaagcgcgagtcgttgtaaaaagcatctcggacgagttcggagaacactgagtacatgttgagcaactgttccacgtacctttcgctgtcctaaattcaaatttcgatgattttttctaatattttttccaaatcgaactccaaaaatgtaccgtcacaattcccgccgcgtgttcatgcatggcggcgagtccttctgccgtgatgtgtttgtgcaagacgttgagcaaattgggaattccgtcgggtgtccgattgatcagtcggtagagcgtcttcagcctgttcacctcgttgtttttgatcagagtcggaccaacggccaaaagttggtcttgatattcgatcaccagcacttgaacgcattggtccaccaacttaagcgtttaaatgagtcgacaaaatgaccatctagtgcactttatgagtccaatcaattgataatacctggtttttatacaataactttgttcatgctcgaacaaaccctatctttttggtatcattcgaaagtacaaagtctaacgaagcaaaaatatataaaatcgcagcgtttaggcaattaccaaaaaagatttgattaattaagtaaatacttattattttcgtttgtaactttcttgaaat

SEQ ID NO: 12059 - DNA, 1354 bp, Heterodera glycines
ttcgtttcgtcctacattttcggcactttttgagtttcgttttcgtgtttcgttttcgtccgccaaaattttttcgtttcgttttcggttttcgaaattttatttttcgtttcatgtttcgttttcgtatcgaatgagctttttcgtttcgttttcgtatacgaaaaattttttttgtgattttcgcacagccctgtcccccaccacgaaatggtcatacctaacagtgtaaaaatttctcggtttccgagactaaaaatccgagaccgggaaccaagaagtgaaaaccccaagaaatttcccgagtcgagaaccgagactctcgcacatccctaataatttggcatgcctaaaaaataaatacatactgctgaaattttgaagaaaatttcagcaaatttatgaaattctcaataatattggcatacgagtattctcggctctcagcaattctgtttatccaaagtaaaatcattttacatcatcatattaaaatcaacaaatatgattaaaactcagaaaaaccctaaggcttctcttctcccatttcggtcggatcactcactattcatccaacaattgtcccacgcgtcttcactttgatctttgcctcctcacatgggtccggcacacgcttcaactcgttgaaattcggcattttttgcgcattgatcagcattatgtgatcccaatacattttgccaaattcctcttcccaaacatggtagtttccttgcccaattgttttggctagtgtaaaatcaaacgcactctttgcttccgttttcataaaccataaacccttcaaaattggtaatccgtcaacatattttttcttatattcccgtgcaaaagcacaaattcttgacaaatctatgaaataacaaatttttatttgtgaaacactagagcccggtattttgaaagtaccgggaccgggcttagataattgactgggaccgtgccgccctgtcaaaaaatcccgttttaccgtgcccggtattttttttaattttccgggcccggcaaagcacggcgggcacccgggcccgtccgggctctaaaaacacaaagaatttaattgaaatttcgattgcttaccaaagtaaagttctttgacaaattcccacagctttaaataactgtcggaaaactctttgagtaaaaaaatattgtttttgtttttctcaacagactttttataattaaaataattgattatttccttattcaaagcaagattcaatgcatttagcttttcattagctggtactttgcgcatattaatatttgttgcgacaaatgcggcttcaatcaaaagaaaattatgtaaattagtctaaatgtaattatt

SEQ ID NO: 12060 - DNA, 3217 bp, Heterodera glycines
gagctcatttggagttcgccttgtccaaccagcaggaattttggcttcatgcaatggcattccaatggattttctattaaatttaaatttagaaatattttaaaattacttaccattttcttccgtcttaagtgtttcttgtgccctcgttgaacttgtgccaacttcaacttccttctcctgtttttgtccttttctgcatctctcccaacttttcacatatgcttcagctgctattgataacattttccaatattcgcaaatttcaaccaattctttataagatttttggaatccaatttcttctggctttttaatggtattatttttgcaattcattgccattataactcgccaaaagaatcttttgaggattttaattgctttttccatgtcttcctcctccgtcgtgccatcttcgatcacttcaaattgcggctgatcagagtcgtcttctttttctagcaatggctcatttaacttttcatatttatagttcattccattcgcaacattgacaatttcgatcaagatgatcagaagaagggacagtttgatgaaaggaattttgcacattttataaaataaaaatatataatattttatgccttttaaatttattatataatttttcgtttaaatgccagtttatatatttattaatgggtcaataagaatgaaattgccaacattttacaagcatttcacgtccgccacaaatacatatacaacttcatttttatcaataatatttacatttatctacaaaaaatattgtcatactttattttttaaataaaatgagacgttattttgacaaaatttcagccaaacaatcgcacggagtcgagaattgccagcaagatgaagtgtcctcatcagagtcaattttaaattttatggcaatttttttatagttttttaaatttttttaaagttatttggttctggacgaggactaagtaacggcaaagagttgaacaatttgcacgtgatcaacacgtacaacgacaaggaaatggactcaagcttcaaaaaatcaggacattttccgactgccaaactccattttattataaatcttaaaaataacaggaaaagccagtactaaattcaggacagcagatcttaaaaacagagcattttccgttttcatttaccaatctcaaattcaggcatctgtgaaatcaaatcgaatatccttaaaagatttaaatcttttagacattcatgaaattaatttgaaataattgagtaaaaatacaatgtaaatttaaatatattaagttttgatattattaattttttgcataggaataattgttattcaatatataattattgcttttaattatttttttaatacatttgttttcacttattaattgataattagaaaataaaagaattgaccctaaaattccctagtacggaattggaggcacaaagcttacccgttccgctcatttgtacttttccaataaaaaaaaagaaaatcattttgaaaatgaaagtttataaaagttaccaacagagagattaaatcaatctaaagtctacgcccaaagaaaatataaagagtttgatcactgatcaatgaaaatcctctcctcccatgtcctttcttgcgatcctatgatccaaccatccttgctgattttgatcatttctttttcatgagaattttcgtcaaaccggctgatcagccttgttcatcatctccttcttcttcagtttcagtttggcctcatcacacgggtccggcaccaacaactgcttcaactcgtcggaatttttgtccattttcttcatcattgcatgaactttatcatttgccaccactatcaaaatgccaacactttcttcaagcacaatttggagcggtttattgggcattaattccaagctgttcatttcttggaactgttcaattgcgtcaattggtgagcaatttgattccttgccaaaaatttccataaatttggtgctcgactcacacattgttgaataatctattttatatcattttcattattattttaatattatttaatttttggccacaatgggcttgcttattttgtaagcgctttgattcttgcccgaacggggattgtacttcgacgagtcatgtcaactcttagtgatggtcgagagtctcagtttcgactcgagaaaagtctcgggttttttagtcttcgaactcggaaaatttcggtctagagcatcactacaactcgtaacaatggacaatcttttaatatttttatggaagaaaataattttaaaagttttcaataaaaaatttcataattcccaagtaactatagtttatcaagcaaaatgaaaaaggaaagcgtattttttggggttccgaaattccctgaaaattttccaaaatttttgtctattgaaaatgctcaaaagtattaaattatgtcactaacattttttcaattacctaatccaagttgctgcgcatttttccacagcttatcaccttcacgtttgacttttttcaaaattttcaatttttcttcgtccttcaaattttcatttttcaattttttctgttgtttttggtattttttgaacgcacagctcaaattgctgcaacaagtcagttcctcatcaataaagcatgtaaagcaacctaatgttaaacttaattgcttaaattggtcactcaaatcggaaaatacaccaagttcgtcaggtaaatcggataatgcgttaagtccgttttgtgccggcggattagaaaattgtttttttaaaattgaattttcgaatccatcaaaataggggtcgcctttaaacgccagtcttgtcaagttcagaagatggatattcttctgttttgtctccatttgtccgatcgtcagtttattattttgcttccaaatcaaaaatgttgaaagcaattggtcaaacgtcgcccaagcagattcattttcgaaattaatctttaaattatttgttaaaaataagcaaaaacaacataaattcaaggtaattaattccgttaattgggaagaaaatttcaaaaaatatttaatatttttcagcaaaaaaaaaagtttggaaaatttccttttaatcattagggatgtcaaaaatatgtacaaaaagtggtcaaaatatgtacataaatatgtaaaaaaaaatcccgaaatatgtaccaaatatgtaaataaaatttttaaaatggttattt

SEQ ID NO: 12061 - DNA, 3211 bp, Heterodera glycines
  unsure (1)..(3211): unsure at all n locations
aaaccattttggggtaaaggcgtggcattgtggtgaccatccgcttgaacagtgccncggtttccccacaaaaatcccgcatcatttttttgaagaccagcgctcacgttgatcaaatgatcttggtatggtattttgatgctcttctctcggtctttcattaggcatctgtgaaaaatttgaaaaaaaaaatttttttttttataaaaatagatttttttaaaatttttctttattggaaaataatattcaatgagtgaaattgatgttttccaaaaaataatctaaaattctagttacggatcataattagtaaaaatagtacgtaattagtaatgcgtaattacaggggatccaaaaacgccagaattacgacatccgttagtcgagattttttgagattcgagaaggtccccggggtgtggttgcacgcgggataccgtctctgaacccacttggtcacaatttcgtcaaatgtcctccggatcaaccgttctttcctgcgaaactctcgcagttcagctttctcattgtacccatggcgtttcaaattttcctcgtccattatcaaatgggctttttctttggccacttccgatttctccaactcttcaatgatgcgatcagtggtgccggtcagttgcttgccgtttagctccacaaatggcacacgctgctggccaaacagatcggcaaacaggaacccactggttacacgcttagaaaaaattaatgaaaattaaaaatcaaacaacaacttgtacagtacacacaggggagttatataccgtattttaataacagatcaataatgctaattgcattgtggcctgaccagtcagggctgacatgaccaatgcccattgacccccgcctggtgggcgtgaccatgcccaatctccttcttgatgggtgtgaccaatgcatattggccactgcatggtgggtgtgactgcccattggcccccgcctggtgggcgtgaccaatgcctattggccactgcatggtgggcgtggccaatgtctattgccaaatggcttacgtatatatgggcgtggccaatgcctattggcaaatggcttacgtatataagtttttatttctagcattgtgcttacgtaaacagtaaacttgcgcaacttcagccacgcctccagcttcaatgcagcgggtgaaatcactggcacatcactgtaacaaagaaaagtgtcactgtaactcggacaaccaaaatgaattacaaaagagaggaccaaccatacagggaccacgactctaacatccatttatgtaaccacaattcgagtttccaaaatcccgcgcgggattctgcaaattttaaatacgggatttgcgggattaataccgttggaaccgtcccgtaaaaaaaaaaatttgaattccaatcccgcagcggaatccgcaaatttgaaatttctggtatataagtgctagtgttacccaggatggctgggttcaaatcccatcgggtgccattgttttttaccctttttttattgcgctaaggcgtggataggtgatcaaataaatcacatcttctttccaattctccacaatattttcttaaaattatatatttgttatttgtttttacaatttttaataaattaagaaaaattttaaaaatacactatcaatcaaagaaattgcatttaattgcactaattagtttcgcttcaaattcataaattaatagagcgcggaaagaaaattcttaatgtggaaagaaacatggtggaagaaaaaatggcaaaataagggaaaaatcgctgaaatattgacataaaaagccaaatattgtggaacaaatttataatttcagggtaaaatgtattaattttttttttttaatttttgacaaaaagtgtgtaaaaaaacaatttaattatgagaatcaaaattgaaaattgattaagcaaatttgtttttgataatgaaaattaattttggattttaaaaatcgtgtaatttgacaaaaatgatctttaatcatttgatgattctgataattgattcggaaaaagcgactaagaattttatttgaatttgaaaattaacacagaaaacccttatttttgtgttatatagtgcaaaaattgttaaggttcgaccatattttactggaaatttaattttaaaaaattttaaattttttatgaaaaaacactgaccaaaacaagcctcagagtagcagtgattttgtccttttttaaaagaattttcctttttgaggggggacgaatcattaataggtatttttaaatgtcttttttaaagatttgtcttttttgaaaaaaagttttcgggaaaaattggtatatatttttttaatttcgtatcaattctctttccaaatgtgcaaaattcccccggtggcccgctcatcggcactttttgaaaattatatttgagaaaaattattttgaaggggttgggaaggaaaagcaaattttttttttcttctgaatatgctcgagcctagcattttttgatcatttgttgccaaaaacaaaagcaaaattttcacaaaaatgaagattttggttcaaaaaataatataaaaaaaagtttcatcaaaatttcaaaaaagtttcataaatttaaaaaaaaaaaacaaccaaaatttcccctgcggttttaggataaaaatttttttattttttgttttttttctcactttttgccaacagtgggagaaatttgttctgcaaatcctccctgatcttccgtattgcgccaaccaaattgcggaccaatggcatttcgaccaactttgacacgccccatgcaattttaccaccacaatatttgaaaaatttgccagctactgtcattgtattaacaatgactttgccaaatttgttcataaaacgtgcacccttgtttgagtagtacacatggtacacctaacattaattaattatttttgtatttaataaaagtaaaaaaaacaaaaacaaaaattcaatgcctaaaatgggttttttttcctcatacatatcaaagtcaataaagtaaaattttgtagctctaactgattgaaatcctctctgtttggatgcaaaatttttaaaaaaagttttatttttttatttttccttactataatatttcgggtttttcaagttgacaaaattttttgaaaaagcgagttttacaaaaagtcaaatttttttttaattttaaaga

SEQ ID NO: 12062 - DNA, 1458 bp, Heterodera glycines
ctgatcataaaacagagtaaaaaaaaaatttttggaagatacaaaattaaatatttcagtgaaatttttttcaagagaaaaccctaattttttccgattttacttgagtttttcatttaaatttaaaaaaaattttttagttaggatgttaacaaattatttgaaaaaaaagttttttataaaaaaaagtaatttcttgaaaaaatttcaaaaaaaaaaacataataattaagcacagatttctaaaagaaaaattgctgaattttgctttaaaaaaatttcttaaaatttttttataaaaagttgtttagttttttctttaatttctaactgtgaaaaaaatatttttattcccttgcgataagattttatctcggcaaatttcggccagaaatttgtcccgtcccctccatccgcacctcctcttccgacatttgctgtttgtgttgtttatccaattttggcatgggaaagaagccttttttgatcagtctgagcacatgctctttggtctcgtcctccgctgcatggatctcagccggcaccatggcggccgatgttgcggttgccaactgattttggcaaattttcataagaaaaatggaaaaaagcgaaaaatacaacccctaatttgtaagggtcgactttttaggaattttttaaaaaatagaccaaaaacaccaaaaattttgagcttttcggcaaattttcacaagaaaaatgaaaaaaaagcaaaaaatacaacccctaatttgtaagggtcgactttttagtaattttttaaaaaatagaccaaaaacaccaaaattttgagccttttgtaagtactagtgtttcgttgtttttaggcagaaaaaatcgcaaaaaaaaaagaatttttatgaacgcttttaattttttcaattgtaaatgaaattaataaataattttaaaaaatttttcgaataaggacaataaaccagaaaactttatcaggaaaaattatattttagggaatcaatattgagaaaatttttaaattctaaggggtgttattttctgaaattttcggaccgatttcttaaaggtttatttttcgttcttatccatttttttcatgtttatctgcgcagaaatcgtaggcatttgcttcaaaagcgatcccgattaattaataatttttatattttttttcttgggattttattttgaaaattccaattgtaagattttatctttaaaaattttaaagttttttgaaattatcaggttttcttgaaaatcttctaaattttaatttttttttttttttaattttgccgtaatttcggctagcgaagtttcggggcgaaatttttgtattattgcgaaaaaaatcatgcaaaaaatagttcggaaaataatcctaagttcaagttatggattcaaattactgaaaatcgcaaaaactgtaaccgtaattaggggagttaaaaaaac

SEQ ID NO: 12063 - DNA, 3898 bp, Heterodera glycines
ttagtgcactctttctttgcacaatagggcaattcgccctttttaagatagctataaatcaatcattccaattagaaaatgttaaatgtaataaaattatttgaatatttaatattaaatatgacttaataaaagaattacctcagaaaaatatttaggcccttctacgagggcataattttctgcgcaacaatggctcttttgcaccccttctctccaaacacatttaaaaccactgaaccaatcgttccaatattttttgtgtgcctcaactttttcttgtccaagcacggttccccacatagtaccagtagtatgaattatcttgccaaggtcacttttgcgatcagggtgtggtttcaaaatttgtgaggagcatgccgtcaaccggttgttgtctttgcatgattcacttggtggggctataaattttttattattgaatatgcatctttttagctatattatagatcaggtcttctagagaccgagatcagagtgagaaaaactccaaaatttttcgagtcaagacctgagaccgagacttattaatagactaattctattattaattttttgcgaatttcgtgcctaatgctgggcacaaaatttttgtgcaatttttgacctctggtgcctttttcatgacttttcagtatttttcaaaaaaaaaaattaaaaaatgttccttattatatttcataaaatttccaaaaaaatttcccggctatcttatcggcatcgcagaatcccattgtagctttattttttttgatatgacccaaaaatggcaaaaattggtcattttttgcgcaaaagcgctacaaattcctgtttttcgccccgcctccctgataatttgagaccggatttatatgctctcctattgtttcaatacagtgactgtactatttctctagtaagagaaatcaaaatcctgcgtagcacagaatcctttgcgtgtctcgagtacaaacaagagaaacgaaaaagcctcatttctcttttgtatgagattttttcgcttctctcttttgcactcagattctgattctcttactggagaaatagtacagtcactgtactgaaggcataggagagcagcagaaaatcgctgcgaaccctgtgtatgtgcctgcgggctcttttcacacacgtgcgcaccaacatacccagggtcgtttgtttctgtgaacatcttcaatgatcgaaatgaaattataaaaactgagggtgcagaaatttgcgcgtcggacatttgcgcgaatgtcaaaaatcgggtttaaaatttttgcaatccttgtggtcatttacagcataaaatggtttctagcttaattatttaattcttaagtgatagaaactgattgaatgtatgataattttattataagtaattttttttaaatcacaaatttttaacaacagaattaaggcccttaataaacttgaagactatatttttcttaattattttaatgccgtttatattatgtaagattgaaaaacaagtttgaacccgattttggacataggcgcaaatgtccgaggcgtaaatgtcatttaacaaaagcaaaccatacttttggaagaggtggctgctctgatttacgatgctaaaaattatttttattttattatttattctattaatttaaatttttggtaaaaataaggaaagccgaaataaaactttttcgctttgttataaattgtattaaaaatttacaatttgattagttattttatattatatttgtgataaaatgtaatttttaatgacaaagtatcttttttaatgattgttttatattgcaaattcaattattatttgtttgattaattttcgattaattactttcctgcagtgacccagctcatcgtcaaactcggcatcgtcaattattatggtctttatgtccctttcgtcgcaataaaacccatgaaaaattgctggaaaatatcctaaaattaaaatagtttaagctgttaaatgttaccctttatatttcttttactatttttaataaatttatttttataatctttcttttaaataattttgaaatttatatcaattttttaaataaatttatgactgcaaaatctgttactaaattgcacaaaaattcaaaattttcccggcggcacctatcggcaccgccggattccctattccgaaaaagttttttgaaaaaaacacgccgcaaaaagcgcgcatgcgccgaaatggggaaaaatgctcaccagtagaaacaaaaaatatatttgaaaaaattcattccggcaaaaatagaataaaaattaatcattttttattcatctgataaaatttttaactgtccttgaattgaatgaattttcccgttaggcccttggaaattggtatacccgtcccttgtatcaaaattttccaatagaaaccatgagttaatctacaaccttttggcttttcaatggctgctatatcacaagcgtacagaatacctcttttattgcatagaaaatccattttctttttatgatcactgaaaaaatatttgttttaacattaaaaataaggcttttatatttaccattcaacgacagcagcagtaattttttttttattattaatttttattatttgttgaaagtttttttttatttattttttggcaaaaattaattttttgtgcattaaaacccaatcttataaaaattgaaaaaaaactcagaaatacgaaattgcatacatcgatgtatgctcaaaaacgaccttctgcttcttcatcttaatataaaattttttttagtaatttttctatttatccatttctgctgatacaactagagctagcttgattagggttcctaattcatatcagtgttgccgcgggtcgagaaaaatatcgggtcaggttttggatcgggtcgggagaaaattatcgggtcgggtttcgggttgagaaaaatgtcgggtttcgggtatcgggtttcgtgtgacccgcggtaaccctgggacatatccaacataatgaatgagattttgtgaggatgtgttttatgcaaaaatggacctgattttccttttatagcaaatattttatacattttttatgttttttagcaaatattttacccctttttagcatatatttttattacatatttaaagaatttttagcacacaaaaaccccaactctaattatgtttaatattatataaataccaaccaatgtacagcatttgaaagagtagaaaggtgggcagcaaccaacgaaatcgcttaatctcccacagtaaaaagactcaaaaacagttttatgtttttctatgcgccgaaaatataagatcaaaaattgtgtcttagcatttaaaccgagttttgggccggaaaaaaaactcgaaaattttgcgcctacccggacctatgcgactttagttttcaacacctaacaaatctataaatctgtttttgagtttttttagctaaaggccatatgatcatattttctttttcatggtcgtcaaggtcaggtacctaaaagtcaatataaacatttttatccgagatgggcgcaaagcacccattttttggcactatgacatttcgcttactaacgcaaaatcggacgtttcgcctagggacatttcacctacagggtggggaatacaacaagtgaaatgtttttacacaaaaagaaaggtgcaaggatcatccaagaaaaattcagttaaattataaaaataattaaatttaattgtctattcattaaattcatataaatattataatcaatcaattatatagaaatatttttaattaaaaatgaataaaaatttatatttagttcgtcttgaaccagaaaaattatagaattgaataaatcatggtttatacgacttgcttaaggc

SEQ ID NO: 12064 - DNA, 2166 bp, Heterodera glycines
aattaacatatgaaaaaagaaaaacccaaatctatcgacttttctgacctgtaaccgaggagagaatgaacggaaattgtttttgagaagatttagagaaaaaaactaaaatttcttatgatcataaacataaattgtgttttctcaaactgaaaaacaattttagaaaaaatgtaaaaggtccgttctctccacatttccggttatgggtaagttggtcttttaacatcggcattatgcaccaacacccggtgggggtggctcatcatgatgatcgtgccatcgtcgtaaatttggcggctccggcggtggtggaagacgaacaactaaattataatttattgtaaaaaaatgaattattttttggaccaaattcttcgggcacaatttccaacagctcacgtcgacggttttgacgattggggccacgtaattccacttaaatattattgtttttattatcgttttttgattttttatttatggacatggttttcttaattcttcaaaaatggggtctacgattgaataaagaggtcgaaaaattttaagtggtaggaaagtgcaaacaattaaactatgtcggttagataatgatcattagctacaaaaaggaggccccgttaattaccccctggtgttggtggtctgaaacggtcacgccaacgcggctggcggccaatttgttgacgaaaatgacctctttggtcaggcttaatttaacaatgtaatcgtttataatttaggttcgtaaaaataaaactcaccggagcaaacggcatgttgatcaatggaggcggcctctgaggtgcgctgaatgccccatacaggggacgagccggaggaatggcaatcggcttaaaatcgagagatgtacctccccccccccccaaaaaaaagcccttttctagaaatttctgaaattcaagaattttattgattttcaagtaacctatattcccccgccctgaaaagacccttgttctggaaatttctgaaattcaagaattttattgattttcaagtaacctatattcccccgccctgaaaagacccttgttctggaaatttctaaaattcaagaattttattgattttcaaagtcccccatctggaaaagaccctttttctggaaatttctgaaatttaagaattttgttgattttcaaagtcccccgtctggaaaagacccactttctggaaatttctgaaattcaagaatattgttgattttcaatgtcccccgcctggaaaagacccattttctggaaatttctgaaattcaagaattttcaatgggtacccccgcccctgaaaaagatttctctgtaactctgagatttttgtactttacgaatggcaaagattatggaattttatgttcccaaaacacacctgtgggatcggcgccggagggtatacgattggcggtggcggattggcgaaaatgggggcgaacggaaccggcggtggcaatcccatcggcggcggcatttccatgtgcggtggcattcttatgtgcagcggcattcccaagggcggcggcattcccatgggtggcaggaacggctgcacaaaggccatcgccattggttgttgcgcctgtggctgcaaggcctcccaattctgtgcctccaaaggggccaaattcgcgtggccgtgatggggaccaatgccattttccgccgcttcatctgaaaattgctcattccattagaaccggaaaagtagtttctgcttcgtaaaagcaaaatctgtgttcctcaaacccctaaaaatttttggatcccacttattttacccggcaaatcgtcctgaggcggtaatccgaactcgctttcctcctcctcctcttccggttcctccttgatcactggcaggtcgggcaaatcgggcactactggacgcggcaccacgttctgggccagaaattgtcgtcgccacgcgctgaaaagtgaaagtagaaattaaagagtgaaagaaatacagaatttttacgtaaattcagccaaaattgcagggtcgtagggcgtatttggattaaaattcgtctggtcagggaaataaaatttcccaaatttttcgccgaagtcgaacataatggaaaaatactcctaaaatgcctaaaattttccaagctttcggaagagggaacggggggggggg

SEQ ID NO: 12065 - DNA, 2987 bp, Heterodera glycines
atttacactgcactggtcatgtgaccagttattacgaaatctcgagtttttataatggtaccctatgacacacctccctattttgggtggtcatctgaccaaagattacgaaatcgcggtcacgtgcttattttttaggctggcaccgaaagaaacgcccacttaaattttgggtggtcattacgaaatcgcggtcacgtgcttattttttaggctggcaccgaatgcgtccccgggtcatgtgaccagatatttcgaaatagcagtcacgtgcctatttttaggttggcaccgaatgaatggccatttctgttaaccaaaaaaaagcggtcacgtgcttattttttataccggcaccgagtgagccgccgtttagttttgtcggtcatgtgaccaaagccatcgtttcgcatcctttcattcaattcaccaatcttgcagctattatacattaattttctttttttcgaccgaccttatttaattttctgagtccttaataccaattagataaattattttaattctataattacttttttgtactttcaatttcaatttggtcatagtcaaatccataaattgaggcgagataacatatgttccgccataattctctttacattcatttagcaaatttttcgctttttaattgctcctcttcctccccccgcacacacctcccgagcgacatgcgtttccctctcacataccaaaattatatattttaatttatttcttctcattttttgtacatttttcgatatccataattttcttcatttttctgtccttatttttccataattttctcacttttctgtcctagtttttacccctttgatctcccaaaaacccacaaatttattctgattattacttcattttccagccaaatattttccatattttattcgtccattttctcagtcctccggcgtacgcacccccttgatattcttcgtttttttgccgcactgtaaaatcgcagagaaacgatggtaaaaatagtgtgtactgcagagcgagagaccgatagaccccaaccggtggatttgcgctgggggcaatgatttccttggtagtcaaaacggggggtagacaagaatacccccccccacaatactactgtgactgttcttcataaaatgcaatttatcactgatgatgaattatgatcgatcattttccaattcgttcatttatttcttctgctgatcacttttgttgttctgtccgtcactcattgtcagaagacacccctttttcgatgctttgtcccgcttcttcttctgctgctggtggtgacaatggccttaattaagcgcaattaaacaaaatcaatcgttttttaaatttctcacccaaagcattgtttgttcgttggtccgttcgttcaccaattcgaatggcaccattgacgttggcgacggcgcatgaacagaaaaatgaatttcgtagctgacggaagtgatggcacagacaaatttctaaatattttgaaacggaaaataaatggttttgcagaaaatgtgacgcccacctccttgaaattggtgacccaattgaagtttccttgtccgtcaaatgattggcaactcaatcgcttcagttggtcattttttctcggtgtgtgcaaccatttggacaacaattgaccagctgaagttgcatttggtccatcaaaatcagcaattgtatcgggcaacagaaaacaggaatttatcgaattaatgttgagatcagtgagaattgtggggtgaagtgctgcgacgcaaattgtccagatgatcagcatcggtaaaggccagccaatttaatgtttgtcgcaaaaaagggcaacatttctcgggccaacaaatcccatatcggctgaacatcggcggtgggtgaagaaacccacagacccaaattggtgcctctgtcccaaatttgttgattggagcgaagaaatgcgataacggagtgatcgatgtacctgaatttgacaaacaaattgctcggtgtttatatattgaactgtttgaattacttgatatgaaggcttttaaagcgcaatttgtttggcagcggacggtcgggcaatggaaattccaccgaattggcattgtcggtaaacacagaaaagtttggcaccgcagcaacagcgtgtttgcaaattatgattgttctccaaagcgtcaattcgcttttgccatcaaaatgtttgtccaccaacgcattgaaacggggcgaaagcaatgccaaattgaggccgagttgagcatggtcaaaagatgggagaatgtccatccacacgtcgttgcaaacccagctgaaatgtgaaaaaagtttagtgaaataaatgaagaatttgttactttaacttccttaccgtcgattcattttgtggcaattagcacaatttgccttattcagaatgatgtcaccggagccggtcaattcagtgccgacgattcagtgccgacgattcagtgacgacgattcagtgacgacgattcagtgtacgttgaaaaattgacaattcagtgccagaaaatttggcaaaaaaaatttcaaaaaaccactaaaaatacaatataaattgagtggttagaaattctgcctgatctgtattgttatacctatgctaaataaatccaaaactaaaatttttacaaaatttaatgcaaaatgtgtgatattttatctgaaaaaggaaaactaaaattgcagcacgaaggccatttgttcgttcgtctacgaaaagatgaatgctgacggagaattgaagttttggcgatgcgagaagttcggcaccaaagatgtgaaatgcttggcgcggctacacacagacctgaacaatgtcgttgtgaaaacgtcgaatcaccacatctgttcccaaagcgcaacccatctcgaggcggagcgaattcggacggccatcaaacgacgcgcggctgtgacaatggaagcgccagcggtgattcgagcgaacgccctgcaaa

SEQ ID NO: 12066 - DNA, 900 bp, Heterodera glycines
ctaatcttcaacccctaccaccagcaaacagcagaggcctctacaagctcggtccggttcttttaatgagagtgtatatccctttatttaattgcaaataagcggatcaaacattccttgatacttcgagagcagttaatgtatttttgtaagcctctaaaatttcaaaacaaaaaaaattgcccagttaaaagaaagttgtgctcagaaaggtgcaaagatacccaaaagattggttaaaaccgagttttatattcttttggtcttgtattatctggggcttataaaacacattaagagatacatatcgaaagggtgctatgtcattataaaaaagccatcaaaaagggcgttataaaaaaaaccatcaaatgaaaatttcgaacaaaaaagtatctgtaacttttgtcaaagtctaccaaattagacattcttgatataattcgatagccctaacatttctctattaggtcacctaaaattcaaaaaatttggccaagattgagcaaagttatggccataaatacacatgtggccaggttttcgaatatttttggccataacttttttgaaacccaatgaaattttttgaaattttgcaggctaatagaggacacctagggctatcgaataatagcaagaaaataaaaaacaaaaataatttctaacagattcgtaaaacccgtatcgggcgaaaaataacgcagttacgcgctattcggtctctactgaatacatattatataaaaataatgcatgtcttatttctagcaaatatgtcaaaattgtgtcctgtctcgcaccggattggggttgttgttgggcaccggaaagggagcggatgtgcactttttggttgggcgggaagatgaaaaagaggcgagttgtcagggaaaaatt

SEQ ID NO: 12067 - DNA, 1230 bp, Heterodera glycines
tccgctgctgctggactgagcatgaccctgtggtgtccctgacgtaactgcggatgcatttaaggcgatgttggaatttatttattcggatgatttgaatgggctgatcggacacaatttgtttgacgtgctttacgcgggttggaattttaaaaaattaaaattttaacccccccccccctcggtttggctaaaaaaattttttttaaatataaaagcaattttctgagacttttcaggtttatagaaatcgagaatgcaatttttcgaatttttgtgatagttgaatttaagaattttccaattctaaacaattttttattcaattttgggcacccatttacatttatgtatacgtttaaattcaaaaaattttttttagccaagaaataccaaatcagtttactgatcgccgcgtgcaccgatttcccagtttgggatgttccaaacatttttgaagcatttgcccaggcacaatttatcggggaagaggtggagttttttttatgttcaatccaaaattaataggtggacaattgggcgacagacagaccgccggttttttgggtacaacttcattcatagttggccaaatttaaccaatttgatatcattccatagtcctatctgttctctattggcctgcaaaacttctaaaaatttcgttgcgtttcaagaaagtttgcacagaaatttttttacataaattcgttaaaaatcaacaaaattttcaaattttgcaagctcatagagaaacacttaaaccgggctgtccatcgcccatttgtccctttttcatataccgaggatccaaatttttcgaattttcaaaacttaaaaaaaaaaaattaaaaatgttttttttttctttaggccctcgcttgccgctgtttggagcatgtggattttgacaaagaagacattatgaaggattttctgaaaattgaccaacaattgttgtgcgaaattttggagaattttggctttaaaacgggcggggaaattgcgatttggaatgcggtaaaacataaaaaagaaaaaaactaattaaaaattgaattcaattacctaattaggcactttggtgggcggaagagcaatgtgcccaaaatcgcaaaaccttttcgggggagaacatacgcgaagtgctcggcccggcactttacaaaattcgtttgccgctccttccacgggacgaatttacggaaagcattggtactcaaaagggtc

SEQ ID NO: 12068 - DNA, 1212 bp, Heterodera glycines
aataattttcagcccaacagaaggggcggctgacgctgaaaattgaaaaatttttctgtttttctcgcggcggagaatccggcactgaacgatacagcgatgccgtgaacatccgaggcttttcattcaaaattttggccaacacttacacaatgtctgctgacaagagcaagaaatgtttgggcttttttatcgaatgcaataaaaatggtaaaaaacaattggattaaattcatttaaattgcattcatccgccggcttaatcggcatcccgtcacgcttttcttgggttcccgagccagactttttgaaaaaaaaatgccggatcagaattctggcagtgtatcctatcgcgcgactttcccaactttttttttcaaaatgccgtgatttttccaatgaaaaaaatgccggaccgacgtgttccgccagacaaaattcagaatgtccttcatttatttatttgaataacatgtacacattttaaaaataaaattttggataaaaaaaatttttccaaaatccgaaaccaccaaatgcctatcactaacaattaattaattaatgttttttttaattgaatttgcccattttgttgtacccccgacgcccattattcacagaacccaattggtgctgtacatgttcagcaacgctgcaaattgttgtgcaaaagaaatacagaaactctaccggcggcaacaagcagttcaaggatgccaatttcagcgccgaaaagaaccaattgggtttccgagacttcgtgcctattgaggtgtgtgtctgtctggtcagggatcttacaaaatcacagttaggtgctcgggatgatgtcgatttcggccttccagaatgcttggaatttttttttaatttttgctatgccaaaccgtggattggcattggcaattttagtctccactcactgtggtcgggttgttgtacttcagtctattgacggattgatcgtttaaaaaaaattttatttttggcgcagagaggggaagcgataaggcggtaactgaccccgggggaggggagaacgcagtacgcccaggaacacttcaccaaaaccggactgtcataaatccattccatggggtgggcgggtagagatagtgcccggttttccgtacggaatcggcatctgtttgattttaggaattggtgaacccagccccaatgggtggtacaatgaaaaggatgactcag

SEQ ID NO: 12069 - DNA, 2187 bp, Heterodera glycines
atttgatggtcttgaaaatgccgtttttggagaccatctttatactcggccctccaataattcattttttaagtaataaaatttttttcttataattttttatagtcctaactttgctctatttactcacgttttctcttttcgactttttggtcaaaaccaggttcggggttcgacctaggtcgaaatttgtttcttaattagtactgagaaaaaataaaaagcattattgtatcacacatatatttttagttgataaaaatttcaatttatttaaaataaaattgagccaaagttattaatctaaattccaacatttttttaaatttcgaaatttcattaaattttaaaaggttatagccgaaatcattttggctcgagatttttgagcttttatttagtctcgcaacatccttgttattcatttaatattcacttcccaacactgatcaattcctaaaaattttatttttaaaaattccgtaagcaaataagttttcaaaatttcttcacccataaaaaatgactgttttaattacactcgctcacagccccatcatttggtgcacgccataaaatgcgtcaatcaataacgtttaattggttaactaactaaccatatttaccacgcattatgctcatgcaacattttttgccctttcctcttccattctccgattgtatttttactaataaaattattaagcctgtttttttaataaaatattcagtaaaaaggaatttattcataaatatttgtatggcgagcaatttggtggatcggttgaagctgatgttgagcacggccaatggggcggacattcaatttttagttggccaaggagaagaaaaggaggcgagttggcccacaaaagaatttgataaaattactaaaatttaaaataataataataattcggtatttttttaaacatttattccccaattttatttgcattttcttagcttttgaaagcgcacaaatgcattatgatgactgcttcgaatgtgttcgaatcgatgttccgttttgatgacaaaaaaccaaagactgaaagtaaaaatttagaaaagtttaaatgtttttcaaatattttaaattaatttttagctccttccgctaaaacggatagttcggtagaaattcctgacattagtgcgaatgctttcaaagtgatgctcagtttcatttatgctgaagatttgagtgaattgaacggagaaaatgccatggcagtgctttacgcgggtaaaaataatttttaaattattattttttactttaaaatattttagcaaataaatacaatgtctcttcgctggtcaaagcttgtttggaattcccaattaatgaactgtcaaatgtattcttcgcacatgaccaggctcgccttctcaacgaaaatgtataaaatttggttaaaattaattttaaaattgaagagggttggatttcacaaaaaatttgcgacgatttttatttaacttttgttttaaggatttctctcgtcgctgcttggattacattgaccaaaacgctgaaactttgttacaatctgagcaatttttacaaattgatcagaatatgttgtgcgaaatttttggacgtgaccaattgaaaatcgacgacgaactcaccatttggaatgctgtaataattaattttaatccttcttagttggttagcccgtcgacaattttgccgagaatttcgttaaagcactattttaatgccatcaaattaatcttggtctctttctcattacgcccgttccccgatttttgggttcctttacaaaattaaaatataatccctccaccggcgcttgtcgatacccaataccgcttgatcctttcccgaaatccttctcacagtttggctggttctgaatctgcttacaataagattttaagatttaatcctgaatttcatagcattcattttctaacttcatttcccatttttcaaattagataattaattaattgattgcctattaggccattcgttgggctgacgaacgctgtgctcaaattctcattgattgctccgctaaaaatcgtcgcgatgtactcggcccggcacttttcaaaatacgtttcgcactgatcacaaaaagagatttctcgaaaattattggtaaatataatttctcgcataattagaaaatttattttccactgttt

SEQ ID NO: 12070 - DNA, 1623 bp, Heterodera glycines
aaacgcaaagacaaaaagtgaaaaatcgaatattttttaaaatgtttttttcatcatttttttgcctctgccgactgtcctcacgtaattgaagtgaccgatgttgaagcagaagcgttcaaagtgatgttgagcttcatttacgcggaagatttaagcgaattgaacggacaaaatgccatggcagtgctttacgcgggtgaaaaatttaaaaaataaataaataattatattttaaacatttttagccaataaatataacgtttctctgctggtcaaagccttgttggatgttccgattaatgaattgccaaatgttttccttgcttttgtcgaagctcgtcttctcaacgaacatgtcagaatctggctaataatgaagcttttccctatttttaacaataaattttaggtaccataggttttcagaccccctccaatttttttttcttatttcactttttattgattcattttaaggatttctctcgtcgctgcttggattacattgatcaaaatgccgaaactttattcgaatcagaagaatttttgcaaattgatcaaaatttgttgtgcgaaattttcgaacgtgaccaattgaaaatcgacgacgaactcaccatttggaaagctgtactaattaattaattattcgattaaaaataactaatttcatttgttttttcaggccattcgttgggcagacgaaaagtgccgtcaaaatgccgtcgaatgttccgctgaaaatcgtcgttctgcgcttggtccggcactgttcagaattcgtttcccactgatcacaaaaagagacttttcgctaaatattggtagttttttgtgttaatccggttgattgttggttggtctcaagacttatttaaagtttaacgacaagagaatcgtgtaaacaaaaattatttcatttccccgcagtgacctcctgcgtcctgacaatggaagaactgctcgccgtcttccaattccattgccacccgaatctccgcggttggcacggacagtacccaatggaatttccgtgccatggacgcttttctgatcaaaaaaaagtgacatttgcgatggaaattgagaaattgtcggaatttgcgcgagaaggagtgaacagcagccgttacagcgaaggcatttacataaaaggattgccgtggaaaatatgggcacgaataaatacgaagaaagacagcaccgaaaaatggctgggctttcacctttggtgcaccgctccaaaaggtgggaataaaagtccaatttaaatataaaataaataattattttcatttttacaactaaaagatgaaaattggagttgcaaatgcacggcaacacttcgaatagtttcacaaagaagcggcgtgaaagatgtgacgaaaaaaattgaccaatcttttaacaacaaatctgtcagctggggattctctgatttcattacttttgaggtgaatggcccaattaaaaaggcttctaaaaaaagttcaaaattaagcatttaatggacacggagaagggattatatgacaaagacgaggacatagtgactttggtcatcgatgttaatacggaagagcaaaaggggacgaagcgaaaagtttcgatcgaataaac

SEQ ID NO: 12071 - DNA, 3917 bp, Heterodera glycines
cgattgaaatttccaaccgatgaaaaaggaataatcaaaaggaacttttgggacgattttcacaacaacagattaataaaaaagtcaccagaaaaatttacaatactggtgcaaaataatgttgaaaagcgaattttaaaaacgttttaaaattatgcgaaaatgaataaaaaaatggaaaaaaatggcggaaaactcttcaagcgcaatcaaatttaattcagcgaactggcggtcaatttcccaataaatttcattatatgtcaaattttcatagccaataattatttaattgcttggcgaatttaaaaaaaatataaataaatgtttttttttttaatttaggtggcatgtcctgatctgcctgattctacggatggaaaggtcaaaaaattaggacaaaaactttactgagataaattttaagttaaagaagcatttttagaattttaatgtaatgcagctgaaattctttgtgtttattcagtctatgtattagtcacaacaaaatgagaattaataaaatacttactaagaagtaaacaatttctctttttttgttttaacaaatttttcattttattcaattgttaaagaaaaaaaggtttttgaaaattcttcgtttagtgtgaaaggtcgatcctttggggtgatgtgagggtcccctacttgaggagagaaaaaatcgagccctaatttgtaagacattaatatttttcgatataaaaaaagaaagaattggatagacattaaaaggatcttagtctagatattatgcaaattaaaaaattaaattctttgtcatacatttttgaaactaacctaagttttcagaaaatagggattgagtaaagccttttcaaaaagccaaaattattgacttatctctgaattatataataaattcccaaaaaaattgaaaaaaaaaaattcacagattgcggaaaatcaacatttaatcactatttaatgcatgtatttaacaggaaacactaactgataaaccaacagaaatgatggactacgaaatggacaatcaaaatgaagaaatttctaaactgaacagccaaaaggatgaagttaaaaaataccaaaaggatgaagttaaaaaatatttaataaaaagtaaggacgattttttcggaaagcaataaaatttatttagggaccagttatttttaggggtagattttcaaaaaaatttattttttcacatgaatctataattttcaaaaattctcaaaatatgtaacatgatgaaaatatttacgaaaaatttgcagaaattttgggtttttttgaggatttccaaaaatttctgtaaaaaatgctcaaaatatattaaaaaaatgaaaatatttaagaaaagagttcaaaatatgtgtataaaattatgaaatatgtaaaaagtccaaacttttgtaagcaagaaaaagaatgtttttcctactatttagagtatggagaagccaggaaaaatatgtattgtattacataaaactggcagccctactgctaacaaatggtgctaggtcgtttcgtaaaaagtgccactatgggcgtttcgtaaaagtgccaggtcgtttcgtaaaagtgccaggtcgtttcgtaaaagtgccaagtcgtttcgtaaaagtgccaggtcgtttcgtaaaagtgccaagtcgtttcgtaaaagtgccaccttgggacttttcgtaaaagtgccactgtggtcgtttcgtaaaagtgccaggtcgtttcgtaaaagtgccattataaaaatatgtttagtatagagttatgaattcaaaaatttatgtttgtgttatacatattatataattagtaaactatgaatattgaaaactgtaatcaaataaaatccgttatttttcactgttctttaaaacgttctccaaaaatatggactgaccagcataacaaattctaaacataagaatctcattaaaaataaacaaaacaaacttttgttagcaaacaatcaacgttttcatataagcaattgcaaattttttatcacaatcatagcgtttttgtcccttatttatgtagcacatgtcatgggcatagcaacaacggtaaactgtaacattttaaatgttcgataaaataacaacacaacagcaggtgttgtgattttgatcaacagcaatctttgaaatccaaaaaaagacgctttttattttgtatgcagagaaatatggagtttttcacttaatctgtgcattttttacatttatccaatgtatatgaattctatatgcgtttttttgttgtaaattaatgtaaaatatttctgcttttggatgaaatttatatttttgatcgtcctaattaattatatcggatcataaaagaaaaagctgcaaaaacctcttttaagaaaatatttggtaaaaatggaatattttttaaatttttatttgaagacaccaaaatgaatatcaaaatatgcctattattcatttataactgtctgagctgcagtatgcacaaattaacaaaaatttaaatttaaaaattcgagcctttaggcaattgaaaaaaataggtgacagattttttcagctatttaacatattgcctttttgcattaaagatcatcattttacagttattaaattaattttttttattctatttaaattatccataatgaaaatgcttttttctttaaaaaataaaaataaatttttcctttttattcttttatgagaaaatttaatcttattagtaaaagaataacatttaaagattttaaaatgaaacgagaaaaacccgaaaaggcattaaattttatggcttaatcgaactttttaaacttcattacatttttgtattgccataaaaatatgacacatttaattccttaatttaaagattctttattattcagttaaattttaaaaattttaagtttaaaaaaagtttgggacaaaaatattgagtctcgaatttcgaactttttagttatattttttgcaaatttttgttagaatcaattaaaaacatttcatatttttcaatatgtcctgatttttcacgtttttttcctgtgtatgaattctatatgcattttttgttgtaaattaatgtaaaatgattctcttttggatgaaaatcattgataattgtactgatttttttcatttgtacttttataatcaatccaaacaaataaattctcattttcttcatttattaaaaaatagcaaaaaatttcataatttccgttatcaaattgtaataataaacaaaaatttattgccaattgaaaatgaaatcatttattttattagttttaatattatttttaatcattatatttgatcaagatgaatcaatgaagaaaaagttgcaagaaaagtcttttgatgaaatatttggagaaaaatggcaagaaaaagaagaacaacaacgaaatgaggagaaaataagagaaataatcagaaaattttataaaataaaagagaaaataaagcaaaaaggaagaaaatattcaacaaaagaatggagtaaaattatttcaaaaatagcgaagaaattggggacaaatcgaagtaaaatttaccagtggatatcctccctttcctatgctggggatgctggaagaaattggggacaaatcgaagtaaaatttaccagtggatatcctccctttcctatgctggggatgctgggatagcacataggagaaggcgcgcgtcggcgccttacagtaggagaccggtgctgttgatgtgcgttatcctatggtgttgtactgtaaagtgacgcgatgtcctcttctgatacaacagaactttttgtaacccgatacctaaatactataatttttttttttgccgatatttccattagtattttataattaataaaaatgttttattaagcaattttataaaaaggaaaga

SEQ ID NO: 12072 - DNA, 1495 bp, Heterodera glycines
  unsure (1)..(1495): unsure at all n locations
tcataaaatttatttccccgtctgatcattttcggacacagttcccctgttgaaaaattgtcgggccagaatcacattgtcgaaccgaccaccaaaatgtgcgaatacattaataggatatttaatgtgtggtttattttactgttgctttcattgttgttattgatggtgttgttgtttctgttgttatgcgatcntaagagcaaccagttagtgaacgccgacataggatcatcgcatacatgtgataatccacttctgttcctgtgaagggtcgatgagagaaagttagggtgcgatatgggccacatatttcacacgagggaactacattcagcagggagttgcgccatgcaccaatttgaatgcattttgtacaagtaacgaatgcggacacaaagttcactatgtgtacccgccgttgctgagcctctggcgcaccgattacatgacaattctgcgttgtctcacaatcgtatactaccaatcgataagttttcgggcgccgcggtttgagttgccgaataaagcatccacgttcacggttatgaaaggcaccacatgttctgcaaaagcgctcgtcgcacacatgcccagctcgtcccttccctttgttatttctcacgttccatatcaccccacattttttacatttatgcgatttgtggcaaaagttgctcgacaagtgatgatggtaacagtcaacgttcatgaatgttttgtcacatcccacgcactcacacttaaatccatcgccctgcatggccgccccgcaccaattcgaccacattccttacaattcagaatgcatgaacttttgtgagtgtccgcatttttaaagggcaattcgcatgcaaagcagtagtagtcgcgaccaaaaattgctgttccaactccacaacggatgccatcaaaatgatcgttgttgtaatagagcgatattggtgtcaggaattcttctggtccataactcgcaaaagcgactcaggatttgatggtagagtctggatcatgaatttacttttagcattcattagtctgaattttttgttgaacgctacgtcggtgttcagcgcgcgtacatagtgccaaaaattgcgtcttttgccattgttgttgttgttgttgcttccacttttgaggatgtttggcattcttcggcgcttcggtgggctaagttcattgtttgatcgattgctcatgatgatttttgggattggccaataaatgaggttgtattgaatttttcacttaatttataccccgtactagcagtaatttccataaaattatgaatgaatcgtttcgatactcaatacctctctttttacgatactcaatgcctctttttctctaataaattaaggactaaaatgctagacagctgacgcatcaaaatgagatagacacaggagaaatgtgtcagctgacgccttttgaccccaatgcccagagactggcactagctggtatatttttaaatcatgattcggaa

SEQ ID NO: 12073 - DNA, 2443 bp, Heterodera glycines
ttaattaaaatttatatattgtgctccataattttgtgtaattatatttaaatggcttttcatttttcggattttctaatttttatcgcattagcaaataaagaaatattctctcatcaattaggtagaaaaaaagaaataatatttatcaattaaagtaattattcaaaaaaaaaatttgtgaattaattttttaactaaagatttaaatgaaaaatttaaatattgagatttatttataatttgaaatttaattaatattttagatcccttttcaatggttaagcaattgcaaaatttgactttcacttcggcgcttcggtgggctaggttcattgtttgatcgattcctcatgatgatttttgggattggccaataaatgaggttgtattgaatttttcacttaatttataccccgtactagcagtaatttccataaaattatgaatgaatcgtttcgatactcaatacctctctttttacgatactcaatgcctctttttctctaataaattaaggactaaaatgctagacagctgacgcatcaaaatgagatagacacaggagaaatgtgtcagctgacgccttttgaccccaatgcccagagactggcactagctggtatatttttaaatcatgattcggaatcatccacctttactaattgaaggctcccttagaagataaaacaaaattttattcacgtagtttttaattgcaatgtcacaattataatccacacaatacaatttcagttgtttcaaaatttcatcatataacattccggttgaagccaaataaataaaaaatatgcaatagtgcccacaaacgtctgaggtgggagattgaaatgccattttgtttttactgacatgagggaagtgggacagaaatttctgtacgttaaaagcaacaggaagggccaaactatcaaaataccatatggtgttcaaacgcggaatatacagtgcgacccaatgcgcaccctcttggcgagcctcatccgtgttgatgatcagagatgcgggaaagggtcggtgacgctgttgtaattctatcattttggggatccgatccacgggaaaacatcctctgaagcactctctcgttgtctgacaagtggaaagcatcctctctatttggatgttgttcatttccgttattattgttgttgttgtttttgttgttcctagcttcgttagagttggtgacttggtcttttgtctggtgatttatttttgttttaagtataaaaattgagcggatggcgtacagtataccgcacagcaatgtaagtagaataacaatacagcaaaatacacgtgtccatacccacacgtgcgatccgccacatcctccctcctcagagccggcaacactgctgcacaatgatataataaattctccgatccatgtactgctactgccacctccatatgtagagtcaagcgagtcactgtataacaactgaatggttggtttcacggtagttgtagactgtcctaatattgcagacaacgatgaccttgatatagatgtagtcgttggagaagaagaggaggcggaggctaaccgtctcatatactctttaaactcgagtagggtggtaggagtgattgtaacggtagtgaaatcggtttcataatcatcatcatcagtgtcaagagaatgaatgtcaataaacattttattaagcaaaaagtttttcaataaagcgaatgtaaaatgaacaatctaagcaaagaagtgtctttttatacttgaacatctgtagcgaccgaacgattcttgtccagcataagaagtgaatcgatttctgccattgctattagcactattcctcgtgcaggcactggtgtgttgaaagaaattcgtatcgcggttgtgccttttcggataaggtcgaacgtatcagcggaactctccgtcgatggtgttagattgaatacgaaaaagcattggccccctcagcgtaacgcttcaccgaaattccattgctttccaccgtaccagcatatccgatagcctcatgcatgtcgtgataggcgcgagcaaatcgtccattgggaaagtccaatgaatagggcgcttgggggtagttccgtccgtttgcgcaaatgctgatgtcgcgcacatcgaagggttggaagttgaacggagaggtgccaatggtgcccacgtagctttcattggatacaagtccgagcaccacacgcttgggaacctgatctgaccaaaggttggcagtgaactctgtacggttttcactgatgaacagcgccttcaaagacgtctttcgcagaggatagcgtgctggacggagctccaaacgcttgctaatgtcaagcgccaggctgtccatcacctcggccttcttcacatacagcttacagctgattcctccagatgataacgacgaacctggtccggtggcgcttgtgg

SEQ ID NO: 12074 - DNA, 4033 bp, Heterodera glycines
ttttccctttaactttttagatttttgaatttaatacggtattttcgatcacctggttttacaaaaatttgaagaaacgtatacgcgatcaacgaaagattggtcagaaaatggcaacatccgatgtcaacaaactcaaaaatgtctttgaaacgtccaatgttacggaatgacgaattggcggccaattggtccaattccgaatcaatttccgattcccaattctccaatagaattttttctaattcactttctggctcgcccaaattttttaaaagtgtgacggcctaaacaatttaagtattttgacaatgagttgcaaaaagcacctcaatggtttcttcggaggaaataaggcgtcctttaaggaattcgtataactaaaaaagaaaataattgttttttaattggacgatatacccacttttagcttaagatcctgcattgtctggtcagcatccttttcaattcctttcagagagttgatatatccaaatttgttaatttttggcttaaaagtgacgtatgtttcgacagccttcacatgttcaccgtctctaagacaattctcaaaggaaattaaaatttattattgttagaaatttcactcaaaaacacctgcaatatttggggcactttgatcaaaaactcaagcctttgaactgagccttttgctccattgagtcgttttaccgtttcacaattttttgcgaaagtttcagtcagtgaatcagaaatggctgttacacgtttcatacgtgcagaaaggtcccgcattccctaaacgaatattgtacggattggaaatgacatttataaaagtcaacacacattctgagtgtcgttgagtcggttttgcatgtccctaactgtgcttgttgcattcaaaaatttgctgtaattttcataaacgagcgattgcatttcggaatccaatcgccgaacattgttaaccttaaaaggaaaattactctaattacgaattttttattcgcatttctactagagaccggacgggatcgggatcccgcgggattaaattcgggatcccgacctcgggatccgtcccgaacgattttttaaattcatcgggattgatcgggatcgggatttcatcgggatcccgaaccgggatccctcccgaccattttaccaatcctgcgggatcccgcgggatcgaagtcacgataatttttcaaaaaatctccattttttaaatcaagatcttgaattttaaattaaaaaatattgtcatttgctaatttttcttaaaaaaaatcccttaaaaatcccaaaaaattttacaggtctacaaaattccactaaaattttcaaaatttgacgcaaaagttggccattttgtgacttttatttcttcataaaaagaattttatttttttaatttctaaaacattattctaaatcttattaggtagttttatggcacaacgatttctaagaattctgtccaataatcagaataaaattgttgtctacgcatttttccttcggtgccaatcggacatcacaagacccaagaacccattattttcttataaattagttcaaaatcacaaaatatggagtttttgtataaattctgttaacaaattacatttcaaattttcaaaattttcccggcggcgcctatcggcaccgccgacctccccccctcggttcccctaaagtttttgaaaaaatttgcagcaaaaaaaatcttaaaaatctgattttttgattccgtttctcaaaattattaaaaatgatcatctgaggcgaaaatacaaaaattgatattaattaattaaattgtaaaaaaattatttaaggcatgttgttaaatgctctcattttttaaaatctgattttttgggcatgatattccaattttgaaaaatttctataaaaatcagatataattcacatctcttttttttctcttcaatcgaattgatcaattataaatattagataaacatttgaacaaaacttggcacaaaatgtaaaaaaaataggtttgagcaaatcccgataatcccgcgggatcccgaaaaaaaatcttcgggattgatcgggattcggtcgggatcccgacccgggatccctcccgatcgtttttccaaaatgttcgggattgatcgggattcggtcgggatcccgactcgggatccctccgaccccagttgtccggtctctagtgaaaagtgatttggttgtcaattcaaaataaaaattcttataaattaatttagtaaattatgaatttattcaaatatttgattgactccttaatatttttgttaaaatataaattttttaatataatttttatttcttacaatgcgttgaattattttttataaatccaaaaatgttgtctgtttttgctttttgaaagaacactaaaattagccatatttttatcattctttttgttctatttatttttcttgggtattatatgtgaactagttgaaacttcctattattattgataataggtcgatccttgcatcgcgtttgcagggatcttcaaatcattatttgattgctcttattataacaaattagttattattcttattattctggggttgtatacgttaatttttcaaattattttcgaatatattcaaatttatactttatttatctatgaactactaataatcattattcggctgtacaggattaattttttatgttaattttcatctggttattctcctgtagttctgtagcattcgttatcacttatatgagagagatactaggcggcattaaacgggttatccgcaagagaccgtcctccccgtttccaccctttgcaatctctctgttctcgagctgctagaggagcatctcgctatcgcgcccgccccttgtcatgagcagcatcggttggcgcttgctcggcgtactcgctcgtcgctccgcttcgctccgctcctcgctcacacgcctcgaggggcagggcgcttcgcgcccgccccttgtcgataatgagcagggaaatgaaatggaaaaggaaaagggaaaagaaaagtaaaaagaaaatggaatggaaaagtaaaagaaaaaggaaatgaagaaaaagaaaggaaagggaaaggaaaaggaaaagggaaaaggaaaagggaaaaggaaagggaaaaggaaaggaaacaggaaaggaatagggaaaacgaagagggaaaagggaaaagggaagagaaaagggaaaacgaaaagggaaaaggaaaggaaacaggaaaggaatagggaaaacgaagagggaaaagggaaaagggaagagaaaagggaaaacgaaaagggaaaagggaaaagggaaggaaaagggaaaacgaaaagggaacacttcctaatggtgcatgcgacgtaccggtaaaaggcccggttcgtatttgctcggtacactcgctcgtcgctccgcttcgctccgctcctcgctcgcgcacctcgaggggcagcttacaccattttttgctaggcttagatcacatgcgattttcggcactctgataattttagcgctcataatgggatgtataaaggcgattgtagaaggaattggatgcgctaaaattgtttgagaagctttttgagcgtaattacgatttttacttacaccattttttgctaggcttagatcacatgcgattttcggcactctgataattttagcgttcataatgggatgtataaaggcgattgtagaaggaattggaagcgctaaaattgtttgaggagctttttgagcgtaattacgatttttacttacaccattttttgctaggcttagatcacatgcgattttcggcactctgatttttgctaggcttagatcacatgcgattttcggcactctgataattttagcgctcataatgggatgtataaaggcgattgtagaaggaattggaagcgttaaaattgtttgagaagctttttgagcgtaattacgatttttacttacaccattttttgctaggcttagatcacatgcgattttcggcactctgataattttagc

SEQ ID NO: 12075 - DNA, 1311 bp, Heterodera glycines
aaaagtttttatgcaaatttttataacctttagataaacttttataaccgtaaaaaataattttggtgtttaataagataatgaaaaaatttaatgatttttgattatttagtttgcaatttatttgcgtgcaaatatcttttaaattagaaaaatcatttttaatattttcttaaatgaaaaattaattaaaattaatataatttttcggttttgtggaaatgttaaaacaattactttctacgctataatttattcatgtttttctttttacatcattaaccccaattcgataatctttcctctagaaattttatttttaattttatttcgtgttttataccatttgtatgtctatttgacatgtaagcaataaaatgcataactatcggtttaatttctattatttttttataaattgcgattaatgactttaattaattaatttcgttttgtttgaattttttgtttaatattatctactttaaatatacacttttattattttattcaatgaacagaagtcacaaacacaatattttatgttcgcaagttttttttttgtgaaaagtgccgccgacaggcgtttgggtcagttccatctgagccaaattaaaagcatctaacttttttctcagttggcaaaaatttataagtttgtcatgattcgaaagctcgacatctttagaagccttttataagctatagataggcgattaaaaactagagatcggaccggtcggttttttttcgtttttttcggtatttttcggtttcggtttttaaccgaaaaaaccgaccgagaaatttttgagtttttcggtttcggtttttttcggtttttataccgaaaccgaccgaccgaaataatcaaaaaaccgaaaaaaccgaccgacttttttcaaaaaccgaaaaaaaaaccgaatcaaattggagcgatataacctgttaataataataaattattgcttttttgtgctctttttcattttgaagaattttttgtaaaatattttctgctattttgaaaaaaattattaacaaaaatgcaataaaaacgaaaaatacacccctgagaaatggaaaattttatcaaaaattcatattcaaaatttatttatttatttacttgactacatttttgatttttaaaatatttatctcatttccattttgattaaagtgaaaaaaggaagatttcgagcatttaaagagaaaatttggtcttttttttttgttaaaaaagtttgttgatcactaccaaatcgggggtccccgacccccgacatttgcgctccccccccccgcccc

SEQ ID NO: 12076 - DNA, 2054 bp, Heterodera glycines
aaatataataatacaaaattaaaaataaagtaaaaattgcaatttattagtattctcagaaagacgaaaagtgctaatgtatatttatttagccaaaattaaacaattaaagaacattttaacaagaaatggttattccaaatattattggaaaatttaaaacatggaaaaaataaaagcaataatttaaaactctgagaacttaaatcattaaaataaatattctataattaattttaaaaatgaaattgtgattacgatatggctttcatattggtctctttcgaaccccgggcccgaattcgaagcgaaagtcgaaaattcatttttaacaaaattcaatttttatataaaagattttaacattgtttgagaataatttaagccgtatttaaatttttctttaaaatcttttttaaaattttaattatgccacttagtggaaaaattttcgccgctgctacagaggtttttttcttttctttttttaatttttgtttatttcctcacacccgagtgccgtaaattccgccgatcattgattggcgatcggaatgaaattccgacattaaattattcattcattttatttaaatgactatttatttttaacgaatttaaattaattttttgattaattcatattatttatttgtatttttgcgaaaaatttttaaaaatatttttcttctttttttttgattattaatttaaatttttcagaagtaattttctaacttctattgtttcaattttgtttaattattggttttgcattatttgtcataattttaaggatttggtattcttgctgatgaagagcgagttttttttgcaaaactccgaaaaataaaatattgtctcaaatgttttttcctttttgtttttttcgtatttttattacaaatttcatatttactttttttccttcatttgttttatcgacacttttctgagtcttttatgaatgcatttttataaaaaaataaaacatttattaaaaatgaataatttttaattagaatttcttgattttaggcgatgtttgttttaagattgctaatcaaatgatttgaattttttactgttagaagaaatataaattttacctacacaaatatgtggttaatatttaattctatttttttgttttaaattgctgtttgtagtatcgttaaatttgtttaaactttttctcatgcgtttacacagaattttggtttgacaagataatgtactctattttgaattatattacagatcgtataaataaatgatttttttattatgctaaaaataattgcgctttttaattattttttaattcgtagtataacatgataatttttcagttttcaaagagataatgtgcaccaacgcaatttttatatttaattaattacttaaattgttatgttttattattttattagaaatacaaaataattttgttgaattattataattaataattaattttgtatattttttatgaatacatgttccgcagatgagtcgtgcaaatccatgtgggtttgataatttccttattataaatccaaaatatgaattattaatttttaaaattcatttttaatgaacctctaagtgttattctcatttgctcgtttgtgctttaaattcatcaatcatgtttgaaatctgtacataccgaaatgctcatcgaagagaaaaggtttaaaagaggttttatgtacttaattattttattttattttgttttatttaatttatatgattttttggagcgaattacaaagaggaccattttgaaatttatcaaaaataaaacaaaatgggggccctttagtttgcaaaattttttgtgtatggtcatgaaaatgtggctcgggggtttttggggtccctgatcacgcatctgtcaattatttaaacttcaaatcataaatcgaaaattcaaattttcgatttttttttcaagttcggattcagcattagaaatttgggcaagaagatgtcagattcgtgatcaagagccataaaaccccgtagaataaattacggttttctat

SEQ ID NO: 12077 - DNA, 4696 bp, Heterodera glycines
tccaaaaaattgactggtaaatggcaaatgtgtctccgttggtcttacaggaaaacaaaatggaaaattacgggaaaacctaagaaaattgagggttttgccaaaaaaaaacattgaattttacgacttttcaccaaaaaaaactaacgaagttatcggcaaatggtcatcatcatattttaccttttgccaccgctgatggcatgtcgaatgaacacggacacagaagaagggcatttgtggtgaagcatttcttaccactttttggaaaagaaaaaaaataaacgctaaaatttttgtcggtttaaaaaatcgacaataaaaataaaaagtggaaaaatcaaaaaaaaaaaaaaacatattttttattttaaaataaatcaaataacactacatacctatatgtagaacatggatggtaaaaaagcaagaaaaaatcgctaaataattcgggagagtgccctttcggcgcgatctctaatttttggactataactttttttctttgtcatcaaaatttaacaatcttggtatcattcgaaagctcttcacatgctctattagcttaataaaaagcgaaaagattttttagcctgtaaaaaaatttatgttgaaaaaacttcaaaaatttcgactttttttacaattacatgcagaacttttttaggaaatgtctaatcacgaagaaatacatagaaacagcttctaaacatgtttaactttcgaaagataccaaggatgttggatttagttaacaagaaaaaaaagttatagtacgaaaacttgggctcgtaccgaaacgtccgtgctgaaattcacagcccaaaaattcttggcgtttaattaaaaaatgccaattgcattcaaaaagaaaacaaagatttttttgatcaaattcctaacaatccacacaaagcaagttaccattagaaaccttttgaaaaataaaatcttattctaagaaaattctaagcatttaggcaattttttcttacatacattttattagggttggtcacggtcgtttaaccgaaccgaaatccggcttttttggtccaaaaaccgaaaaccggggatcaaaaatcggccaaaccgaaaactggtacccccggttttcggtttttccagttttaaaaacaaacccctaaagataacactcgccgggaatttttcatttttttgtgaaaaaattagagtgccacgggaccgggaattttgggcaaaccctggaccgggaccttttcgagttgaaaaaccgggaatttttggctgggaaaaccgggaaaaaacagggactagtcccggtcccggtcaaaaccgggaccttggtactcagttgtactcagttgtccgctaccaggtcccggtcccgtggcactctaaaaaaaattaaatatgccgtaccctgtttatattttttgaaaaactcaatacttgtaatttgtcaaaatattattactttacccaacacatttacatgtctaataaaaaaaaattatctaaagtgaaatttgtgaatttgctaaagtggctatatcttttctactttattcgcgggtttacgaaacgcgcaaagtgccatgccgtaccctgttttattatttagaattttttttgaaaaactgaaggcttgtaatttgtaaaaactttcttactcaaaatttatctaaataaaatttttttatataaagtgaaatgtataacgtcaatcttcataacgaggctgccaaaaatattaacaaaaagtggttaaaaaatgtacataaacatgtaaaaaaaatctcgaaatatgtaagaaatatgtataaaaacccaaaaaatgtacgaaaaatgtgagtaaattttaaaaatggctattttttggaaaaaattcttcgtaaaggatgaaataggcataaagtgccataaaaatgacctaactaggcttagaatcacatttagtattttaaaaattaatttttggtattttcatgggtaaattttcaaaaaaaaaatttttttttaactataattttcaaaaatgcttatatataaaaaaatgaaaatatgtacgaaaaatttgcataaattttggacttttttttttgaggatttccaaaaatgtctgtataaaatcctcaaaatatgtaaaaaaaaaaaagtaataaaaatacatatgccaaaatatataacaaatattataaattacgaaaattatgaaaaccccgaaataacagaaaaaatatgtccttgattggcagccctattcatagccatttttcttttactttttcactcattttttccatttgtttttgctcaaattctcttcgaaaagcttcaatttcaatttcacttgtcgatttttgccctttttggctgttcaaaatttgtttttccatttctacattttcgttgatccaaattttctcctcattaattgcataatttaattcctcctcattttccaaataaatttccaatttctttccgcttttttcccaaaaatattttgaattttcattcaacatttggagagcataaattaaactcttattaaaatgaccctctttaaatattggtttcaccgctggtaatttctttgcaaattcagcttttttacctaaacaaaagtgataagaaaatacgaaaatggctttaaatcggaaaattttcgaacaaaattcctattgtgccatttttggtgtgccaccaaattcaattttaataactttccgtcgcagttttggcaccaaatctcgctgtttaactgattgactatggtattgtatatgtctaataatgaagtagatggaagaattaatcctttgcttaaaaagtgagggtccaatttttgtgcactccaaatcttccttaattacacagtttattttacttttttaaaataaaaatataaaaaaacaaaagcgaatgaatgagagaatcgtggtttttcggtttaattacttttctaattgtttttgataaatattaaaatatttaatttatagacaagtggtaaaataattatcaattaaaataattaaatttattccgagttccgacatttttggtgcctcggaattccatccctgccgcacacccatacttttgtcacttcgcccacacccatacttttgtcactttcggctaaccacgcggaaagcggggattgataagatccataaaagaaagggcggatgtgcctcggtagcttaatggtaaagctggccacggaaagggtgcacgagtgggttcaattcccacccgaggcttaacattttgcccatttcgtattgtagtaataaatagggatgtcaaaaatatgtacaaaaattggtcaaaatatgtacataaaaatgtaaaaaaaaatcccgaaatatgtataaaaacccaaaatatgtacgaaaatatgtaaataaaatttttttaaatggttattttttgaaaaaaaaatcttcgaaatcctcaaaatatgtaaaaaatacaacatatgtaccaaatatatataaaatcccgaaatatgtaaaaatatataaataaaagtcccaacaactggggaagagtgattcgcccgtccgaattggctgtgtttatttgtacaggtttagttactgtgtgattttttagatattcgttaggtgctgacaaaggaaggtccccagcaggtgtccgtgggatttccgagggttgaatttatgtgcaccacaaaaaagccagccctcccttctcaaattgagagtaattttttttttggcgggcgcgagtgactttgacgcgtgtgctatgggcccttattgtcccatttttttcacatctccgttttcgaaaaaaacgctattttctcgccacatgcagcccttttgtccaaaacttttcactataatttaaaagaaaaaccataccttcaacatatagtcggaaaaaatattcgtgcaaaatttgcaaatattttcgatgcttttggcattcttcacgtagcatttctctggattccccaacaattttgtcacattgcaaattgtttttcgtgaaatacgaaaagccaagatgcgcctcatattgttgcatcaaatcctctttcactttttcaaaattatttaatcctttagttaatttaataaatttctcaagatttgttgtttgtccttttacaaattcagaaaacaaagcatcttcaacctaaatttgaatttatttaataaaataaaatttatttaattcaaaatcaatagagcccggattttttgcggatagtacttgatgagagaagcacgaaaaacacattttatccgaataatttttgatttagagcgacttattagcacctaaaaaacctaaaacggggtgggggttagcacatatttgtgcattttcgatttttagcacctattttggtctttttccagaaatttcagggcaaaaatgcaataaaaaccaaaaacacaccccctaaaattcgatcccaaaaaatttaaaaaatatacccctaaaaatttatcaaaatttcagaaaatcaccccctaagaaatgaaaaattttcccaaaaattcgttcttcaaaatttatttatttgttttcttgacaagttgcaattgtgcaggcgaaattgatcaaaaatgagtcattttttgtaatttttgtgcataaagacactggatttttcaaatttttagcacctattttgcgtattttggcgttttagcacctattttgc

SEQ ID NO: 12078 - DNA, 3738 bp, Heterodera glycines
  unsure (1)..(3738): unsure at all n locations
tttttctctctttttttttttttttttttttacatcaaactttgtttgagttggccggccggctcttaattaattgctttgttatcgtcgactttatccattggtagcagcttaatcgcttttcgcgtgatttctttgcctttttcctaggatttttgtttcttaattactttctttaattaatgttcgttcattaattccgatcatcccccttttttacacccaatcggcccctttgatcagctgacggcgcctgtcagccgatcatgagccaacttttggcaaattttcacaaggaaacaaatgttagtactttgaacccttctaccaaaaataattacggtaattctcgaaaaaaatttaaaatttaaaaattaatttattaattaatatttgatattatcaaaattatttattaatccattttcctgttcgttatttcttttttacttaaatattcatttcatttcattaatctactcataaaaatattattttaatcgacaattttctcttctttcgccgtctccttttgttgccaattttcggccaaatccaacttgtgcttttgttggtccgccctattgagcaacatttgctcgccgaatattaaatcagtggagaaagtgtgcaagaaaaagcaaaataacatgggaattgaagagaattatgggaaagggaaaaaagttaatgaaaagggaagggacaacccaacaagtatgctcattttgctcattggatccgtcaatttggccatttttttcaatcaatttcgaatcctttatttaatatatttctctttcctttatatttaattcaaaacattccaaaatgtcacaaatagtttgggaattcaaatccaacaatttgtgtgccatgccgtgttctctcccaaaaatatgctatacccccgtccatttcactgctcccgatttgtgcttgaacccgggcacaaacccaaattcattccagcatttcgttgcgcttagtgagcactcgctcattatctgccttctgatcattttctttggaggatttgccttagggcttatcgcctccattttcttccgttgtatgctcgggaaggtgtgttatccccgttgtattaccaccaaatattatatttattagcatggccatagtccggttggcaccagcaaatctgctcgcaagggagcccgtgatcgggcggctttgcattctttgagctccatctccgttgtaagttcaaccaaattttgcagcacttccttttttttttacccaatgtttttttaagccccatttgatggcaactcctgtctgaggcagcggttcgtgccagatttattcgccacctcaagccttcatttgttaattctttattcacattccgttcacattttcctcttttttttttttttaattcaattttttcacttggctttaaaatatccccttaaataatattcatttaatcataaacgcattgcttattttctaattctttaataaaggcattaaataattagttctatttaaattcttccccatttttgccccgtggcgggacctccatgaatatgtcggatgccctttggcattcgttgtttagcccctccccataattacacgagtgggatggaataatatcctttattcggaaggttgatcaatacaaatatataatgtgtaatatatgtgattagttggggaagggtgaaccgattcgtccggggcaaatagggggagagggggaattggaagagttcgggattagccaattccccctcccgaaagagtgaaagagtacaatgtgctggagggcagctaaagacttaaagtgggcggggcctacatgatcagcttaggcatactgtacttagtaaatggtctacggtaaacacaaaataatgagctaagtcataattataattattatctcatatttattttatattttttgttatttaataatattggcaacaacagtaaaagaagaaaaacggacggacggacaaaatggcaatggaaaataaaaagtcaaaaaacccttccgaaagtgattttatttattttttattatttccaatttaatttaattctaaacaatattaaatattatagacaaagtttttgctaaaatcaaatctattcttttaatgtttggcaatataaagcgaaaaaagcagtaattcaagaaataaaattccaaatttaaggcctcaaatttgtaaactttttgagcaaaaaaaaagattgtttaattaaaaaatatatatttaattaattaatttctttatttatttataaggaaattttaacgaaaatgctgaaagctacaaaaaaaaacctgcaaaaatacattttttaaattttgtttgcaaaatccaacaaaaataattttctacaaattaaaataactgtttaaaatcagatgatataattttacattatcacaaatttggagggtttttagcagcaaaaaaattcgggccaagctcatgatttaggctggtaattataatggccataaatatgtacataaaattgcaaaattatgtgatacatgttccaattagagggttaaattttccaaaatttctttaaattcattaaatttaagcaaaaagttagccctactcatgataattaattttttcatcagccagtgagtgcgctctgctcagcccaagcagagaaccctcgccgcaattggcaatttgccatcgccgggcttctgatcgcctccaatttgttcgtcggcattacttttgcgtgcattgtgccctttttcccgatcgaagtttggcaacgggcagcaaaaaataaataaatattgtaaaataaaaaatgaacagtgaattaattaacatggactgctcgaacaggctttctcggtgtcagggctgggctcgaaaataacccaaagttccagttacggatcaaaattacggaaaatcagcaaaaattcaataaccggcatacgtaattactgggtccaaaaggccgtaatctccgcaattacccccagtcctgctcggtatagaaataatcgagtcgagaaagatctactttcgggtatcgtatcgaaagcaaaaaaaacaaaaattcaggctgaagcgaagggtctgagcacctcacaggtcggcttggtgatcggcatcttccaactgtgcagcttcttcgtttcgccagtcttcggcaaatacgtaaaatgggcgaataataattgggaactttgagaatacggaatagtgatgagagtgtttttgagagtgccaaaatacgaattatgacgggaggatttagggattaataatttttaatgcccctcgataaatctccggaattaacggcttacatcactgtttttccatttttaattcccatctctgcttcagttggttgtcctccgtgttcatcgtgcctttatcggtggtcttttgttcacttctctgtgcacaattgcacttgggtaagtgccagaactgtttgttgctgagctaattacgtattccggattattaaagggtaccgtaataaggattgcagttctaccccagctcttgtctggtgtattttttcatcagtttgtcaccatgctttccgtaatgaatttaggattacgggatcgggaatccagacattaaaaggctaaggaattcaggaacccaatcnncggattgaaccccngatttcggagtccaatcccagcccgaccccatggatttttaattttctccccatttttccccc

SEQ ID NO: 12079 - DNA, 466 bp, Heterodera glycines
aatccaattacagtttaatggtcaccactatagcctttgcaatgctcggcattgtatctggtgctgcttatgtgcccgtgtttaaatggtgcgtcgacgctgcaaagtctgtgccgtggtggatggagtgtgccatttacaatgcaattagtgtaaatgccctaattaagcaacgtgggattggacggcacttcgcctgccatttgcgggtgtatctccggattcatacagtcggcacttgctctcaggtgtgacgacgggaaatttttgctttcattattttttaatgacaagtcaaagatgctgaccccagtctttatctccaactgtttagtgctttcttggccacaagtgtcgggggactgagtgcccagcatttgggcctcccgtggacggcgacactcgtggcagccattcaattggcattcgtaagtcgtgacaatttccggttggactcagtttacac

SEQ ID NO: 12080 - DNA, 3650 bp, Heterodera glycines
  unsure (1)..(3650): unsure at all n locations
tggtgttttatttttataaaaaatgttttcttcacatccttttgtgagcgcaggcattattggaggggggaatgggnccttcttttcaattttgtgttctaaaatgtcaagatttaaaaaatatgaaaaattagttagggatgagatttgtcctaatttgtcacatttgtcctgagttggaggtagcgaccaaaaattgttctggtttcttaataaattcataattttaaaattttatggcagaatgttaatgttttctcaagaaatataagatttgaggcaaaatttggtcatttaaaaatctggttttttgatcccaaatgcattaaaatttatgatttgctaatttctccccaaaattgttataatcgataaagtgtggtgaaaaaattatatataaatatatttttgatccagtaaaattgtaaaaataacttcaagcacgccaaagctttttgcacacaaaactgaacgtggatttgatgctgcggccgccgcaacagttgcgcgatatcatcagcctggacgagcaaggacagagaagagagacaaaacagagcaaaaagtatgccaaaatttgatttttttgggcctgatgtcctgatattgaaaatgttcagatcaaatcgctgctttagttaaaaaattaataaatatttaaattgaaacttgttactgttttccagccgtcaaacatcagctcgaacacctacttggcgctgctaaaatcgctgcgttacatttgctcacagtaaattttttttgaaattgactccaaaattttgtatgtgctcagagactgcgttggcattggtacgcatggactttgacaacaccattcgttttctattggtgggttcggaaaataattgggacaaagcgagcggcgctgttgcagaaagtgcagaaactccacgccaaagctttttgcacacaaaactgaacgtggatttgatgctgcggccgccgcaacagttgcgcgagatcatcagcctggacgagtaaggacagcgaagagagacaaaacagagcaaaaatggacaaaagacacgaaatcaaaacctataagacattttccggctatgaattgggctcgagtattccttccccccaatgaaaaattttttaaacctaaaatgggaaacgttctgaaaaatatgcctttttaaagaatatgaaaaatcggcgaaaatttgaaattttcgatgcggtgccgattagggggtatattttcgtggtctcaacgtgtaattgggttgaggatgacaaatttcaaaataaaccgatgaacaaaaattaaatgaaaatcattttaaatatttattattcttctctttttcaagccaaagttgccatgcgacagtgtcagggcggttacgcgtgctccatcactttcaacgccttacattccaaaatataacaaaaaggcgtagagcatgccgaccatccaaaagaagcaaaaaaacacctatttagaataaattgttttttgatgtgttttaattttataaaacttttttactacacaaaccatcgatgggcatggccatcattgaagggcggaaagggctcctttaactcaattttttctttgttgcacactggcaatggtcctttgcaaataacacatgacgcaaatccatcatattttttacagattttctccaatttggatgaacaactttttgtttcggcgcatccattcaagacaaatatatcattattttgttctgaagttggcatgaattgaaaaaatatatcaaattaataaatatttaaattgaaaaatgaaacaaccatccaaacaagagaatgtctggcaccccatgaagacattgccaggacaatcaacaacatcgattatgtcgtcttcttctgtggctttgatcttataagtagcgataagccagttgatgtctttgcatgccgcgcccttgttccgtaaagaaagcgcacagttatagactaaaaaagtttttatgtgaaagtcgtttaaaaaaatgtaaaacagctatttagaataattgttttttggtgttttatttttataaaaaatgttttcttcacaaaccttcggtgagcgcaggcattattggaggggggaatggctccttcaattcaattttgtgttctaaaatgtcaagatttaaaaaatatgaaaaattagttagggattagatttgtcctaatttgtcacatttgtcctgagttggaggtagcaaccaaaaatttggtcattactgattacttgagaggatttgaattaatcggccgggagtgccttaaaaaattttatgaaaaaattttatcaatgtatttttagtttatattatttttcaaaaattagctgcaaaaattcttaaaagtttcttgaaaaagtttaggtatataaaagtaaaaattttctttcgggttgtttaccattgccattaattttgataaaaagacggaaatttttttgaatttttttgcatttgttgccaaaatttatgaatgattcttattggtttttaaggaagtcttcatagtccgaaatgccaaaatcaaaaagcaaaccatataagaaaattcaattttaaacttcggttcaccacgtatatgattaataaaaatatatttcaattatgtagcgaaatttaaaattgttaaaataaaaaattattaattaatccatcacttattcaatttccaattgtctatttttctgttcgttgtcccttcagaaattaaatattaaatcaaaacttccgtgcttctctcgtaaaatgttaacctcaaaaatgtaaaaatatataaattcatttaacaactcgtaaattatttttcgatttttcttatttatttatttttaaataaaaatgatcttttttaaaatggttaataatacataaatggcatttaaacatgtgttcatcattcattctttcattcattctcaggtgggacattccaagcccgtgattccctccaaccattccttgtcaattgggacgtaaaaatttattaagcctgtgaaaagcaaagaacaattaattttagcagctttcattatttaaataggtaaatattttaaaaatgaaatgtttttattttgaatttttgccaagttttacttttgttctttttatcgcataagccgaccgaaaggatgccaacttggacaaagtgagtgccattgttggccaaaagtgcgccgccgctgtccccctcaaacagaaaagtgacaagagaaaaatgttgggatgggcaaacatttttaattaaaatgtaaatattaatttgatttctgtttaaaaagaatttttttttaatttaaaattcattttcattttttaaatatttaagggtttttcattaattccccaatatttcggattatccccccaattgcctgcatgacagagttcgactcaacacaaatgttccctttgcggccgcgaaatgatctgcagccaaccattttcactgggcgaccatttaacattttggcaggcctcgttaagcccacacaatcatctaaactcattgacacaataaactttaattacagcagacgaaaattatccatatatttttaatttgattcaatccaaaattgggccatattttggataaatctgataataataaatttttagattttgcgccag

SEQ ID NO: 12081 - DNA, 1154 bp, Heterodera glycines
aatccttcaataagagatcatttatgccgtttttgaaccaaaaatgctgaatttgaaaatttgggctttcgactttttttcaaattcgggtccggggttcggagttggccaccagatttgtggtcagtgccctcgaattcgcaaggaacttgtttttatgccaataaaattttcactgacgcattttctaccgacgctttttccgctgacgcatttttccggggggcccagtcgattggtccttacaattttcacactaaattaaattttaatatttactttcaaattttatatttttcacctccaattggcaattcttcggcttttccattgaaatatttgttgttttcggcccaaattttgggagaatgtccaacccgagcagccaaagtccggcgtaatcatccaaaaatgggccaaaaggaaattgatcggaaaattctttgtcaaaatcgagcaacggtttttcggctaaattttcagttttcagttttcaattttattattttttatttttttccatttacttccatttgacttaatttgtgccgaacatttgttggaatggaattgaatttcgatttccgagtggggcgttatgctaaaaaagtaacgaaattgatattggaatgcaattaaaacagataataattaaagagcagttttttaaagccaaaatttgttcaaaatatttaattaagcaaaaatattcatttataaaaattttatttttcatttgagacttgattatgattattttgctaaatttttaaatttagagtcccattattaattatttatattttgataattccgtttcaaaattcaaattatttactttttctattttaacaaagccattaagttttaagcatttggtcacccacttgaagcattctcttcccactgaaaattgcgtgccattcattgaaatacgaacttttttggcatttttgccacactttgcgctcttatccaacaaataggaaaagaagcgaaagcgacgcgacactttccaaagaaaattccctccgccggacaacacacttttgtagcacatgacaaggcttaattaacgtcccaataattatttattggcttttaagcctcaaaacccattgcaattgcagccgtttttcagccgaatggtccga

SEQ ID NO: 12082 - DNA, 4647 bp, Heterodera glycines
aaaggagagaaacaacagaaaatagagcgggcaattacaatagaatttgatgtttaggtcagtcgagaaagcattgagcaaatggcgactaaactgagggagagccttttgcaaatggacccgcaatcggaagttgaccaactgaatgccaatctgacggtaacggggcaatgattaccgtactgtctaatccaaatgggtctttcgcttatgcttttctctcctcgtccgttcgcttccctttcaaattcgattcccttttagcgcattgtgaaatggttcgaattgcttaacgaacaaagggaacgcgaaaatggggaaaacggaggcgaataaaagggacggacgaccgaccgaattcctgggcatcatcataattcgtgcgcactgtttcacttttggccattaaattattaattcgttcatttgtcaacctttgccgccttcccctgccagcatattacgacaacactttgtcattttacaacagaattttcaaatgctattattgtgttttttagatatcgttattacattttaagtcgtttatttatttatcaatttaattttgtttgttattaatttaaatttctaatttggacatcatttcttattttatgcgtaaattaaaagtgataaatgttaaatttaaagcgattatcttggaaatgttgattgaaaaagatacaataaaataaataacaaatgaacgaatgaattccttgtgcctttggatacggtaggaaatggaaagtcgaaaaatatttacagacccaaaataaaaaagaaataattaaaatacgtcacaaattctgtcaaattttgttccgtccgtccgttctctctctgtttattccattgcctttccccgtaatacgataggcttttttgtggattggccttctgtcggtgtttattttgcgtcggccgattgaacggccctttggggtgaaaagggtcgttcattcatttattaattcaaattccctccccaatgctttttcgccacaccttttttttgcctttgtttttgctttttccgctgcttttcctccgtgccaatgccattgttcggtcgcaattggccaatgcgcaggagacgaggtgtcctttgtcccttttctctttttttatgcttttggtccgctgatcagtgctaattgtaattgtttgtctctgtctgatcagatcgcgcgttctcttcgccgatggaaatgtccatttctttgctggccgtggccgtaacatcactttccgtgtctccgacggttcttccattcttttcggcctcaccgatgtccaatctttgccaaattcggtccgtccctccctttgccatttccctccctttgaaaaccccgacagagtgaagtgagtgccgtccgcacattggtggcaaatgtggacagtcagctgaacggattggtggagaatatgggacggatggagtcgcagtggggggacaaaatcacacaaataatggccaaagtgagcgaattgcggcactttgaaatgccattccagcaaaaatgccattccaatgaaatgccattttaaacgctattcttgacccacccccccgttcacctcattagcaccgacaattgtctctgcaactttctaaccaactgaacacttctctctcacgtgcccgtgccaaccggcgcattcggctgctcatcctgaagctgagtggtcaaatcgatcggcttttcaagctaatgagtgtggacgactgtttggcacatccctgcttgaatggtgccacttgtgtggacgggtttggcaaattccaatgcctttgtcctgcacattttgaggtgaatcagctgaatcgtcgatggtgtaaaaccccggcaaattattaagggaaaacactgcgaaaaacgggtggacgaatgtgccctttttgcgaacacagaagtgggatgccaaaacggcgccatttgcaggaataacccagtgagagaagcaaaagcgcaaaaatgggctaaagaaagtgatcaaagcgatcgaaagggcaattaggcatatgcttaaatcagctcaagactcagtgatcaaaatgccaaagtcattccttccgtctgtctcttagtcatttgccggcttcacctgcaattgcactgccgggtggcgaggacgattgtgcaataggaaggacaataaatgtgatcattcggccgatttgtgtggggagcacggacactgtgttaacaatgagcaatcagaggtcagagaaaaagaaaagagggtcggaaaataacggagagagagaggaagtcagacaaaaggggaataaccacgagactctcgggattctccggatttggctgaatctttctcattgtttggtcccgatgcgctctgatcccaattactcatttcagctcggctatcgttgcttctgcgagtcgggcttcgttttgggcggtgacccttcaaatccgacttgcgtcgataacgacgagtgcagcaccaacagcccatgccatccggcaagcattctgccaaaccaaccaattccgctcattttctttgcagggcgtcaattgcatcaatttgccgggctcctttaaatgcgattcgtgtccctccgggctaatcggtcggtctaagagcaaatcaagggcaattaaagggagagattcatttgataggtaacggaattaattgctacgacttcgacgagtgtgccagtgacctgaccaacgactgttccaaggagccacgggttgactgtgtgaacacccacggggcgtacaaatgcggcccgtgtcccccgggtaagaacatttcggctgtctaaatttttttatatcacatttatctagattttgtgggcgatggctttacctgccaaaaggtttcactgtgtgccgatggccctaacaaagtgtgccatccggaggccaaatgtgtagaagaaccggaattccgttgcgaatgtccgccgggcactgtcggagatggcctcgggccggacggatgcgaagcgaacaatcggacactttgccacggggacagctgcttgaacgggggcacttgtcaagtactgatcaaaataaccaatcaaatgatcggcaaaagctgaagctcaacccatcaacccattcatttcactgaatgcccttcaaatccccaggccatttccgtctctgtgttccgttgcaattgccccgaggggtaccaagtgagtcgggcggtgttgtgatttttcaaatggctatcacttaacgggttcaccacttcaaagggtgcccgatgcgaacatgccagtccctgtctgtctcggcaattctgctcagggcacggccgatgccgaaccagtcctttgggctgcgactgtttcaggggcttctacggcccgcggtgccaatttgaggaggacggtgggggacggcatttgcctttttgcgccaattagaataacttcttgattttaagactgcgattttcacacgaacaacgaaacgggcgaaattttgtacgaacaaatggccggacgagggccattgttgagcagaaaagtgtgcacgtggcacattcaattgctggacacgcgcaaagtctcaccagaaagaaaggacaagaaatggaaaacattgctaatctcttttgtggagtgctaattgcttccaaatgagcctattagcgcattgatcctcctccttaatgtccttccttaattgtcctccttaatgaccctctctttcgcttcttttcttgtcctccctttccttctccatttgacactttccctcttcttttgtcaggtgcttcagcttctatttatcaactactcggctccccgtctttttgaagtcacttcaaaggcattgcttatgatttgtttggcctaatgaatatccctttttaagggctgtttgtccgccttcgccaatttgagcattttcgacggggacgagccgggccaaagcccccaattgggacgctcccaaattgcgcacttttgccacggctcttcgccttctccgctgctcccttttcacacctcagggtgaccactctcaacaacattttattactcgtttattgctttgactcctcaggcacaaggcgaccgttcgactttctttccgtcttttaagtgccaacatttttttgcatttcaaatggacggcggagagaccgcgtaagtcaaaaatggaggagggaggggggtaaagcaaatctcaggaaatccgaagggagtgccaaatgaattactcactctcggactaaaactcccggagaatgattagccagtctttaatttcagatctcgtcattcttgctaatccatgttttccttttgctcaggttgtggtggacgactgtctaatgccaacggcggacgcattgaccatttcgatgtccggggtgacgacctttgcgtttggtctgtgccatgtttttccgctcgcgttggtgccaatctctgatttctctcctcaggttcattagtatgccgcctcaatttcacgtccgcctcagcgtcgatgtgctgcgtttgccttccgcccaattccacaattgttctgtcaattcccttgaggtcattcgaacatttctcctcaagcgttccttttttcctttctttcttatacgctcttttcctgttctcttttttcccccatttccttt

SEQ ID NO: 12083 - DNA, 1569 bp, Heterodera glycines
attttccgtaagaagattttgggaggaatttcacaaccttgttataggaaaaactcatatctgactcgtataaaacataactcgaacctcgaacagtaggtatatttgttgtgcaattttatagtccagccttcgctagggctctcaccgcggtgtattttaggttgtctttgatgtatcaaaatttctctcggccgtgttgttgactgaaaaataaaacgaacttaaattattgcaatattgtttatacgaagtcttttgatattattctgacgacttccatgataataaatacttatacaaagtttatctttttatatatttcctcatcccaaacatggatggaaaataggcaataaatcgacaaatattttcaagttttgccatgctatttatctttcgggactcaatttatgacgaaaatatgggctccaattattttttattttctactaacacttttctagtggatcaatttatagattcaggaaattcattgcatgaattgaaaagtatttatttttattaaaatttgctgcttattttccgtaagaaagtttttgggaggaatttcacaaccttgccataggaaaaactcatatctgactcgtataaaacataactcgaacagtaggtatatttgttgtgcaattttatagtccagccttcgctagggctctcaccgcggtgtattttaggtgtgtctttgatgtatcaaaatttctctcggccgtgttgttgactgaaaaataaaacgaacttaaattattgcaatattgtttatacgaagtcttttgatattattctgacgacttccatgataataaatacttatacaaagtttatctttttatatatttcctcatcccaaacatggatggaaaataggcaataaatcgacaaatattttcaagttttgccatgctatttatctttcgggactcaatttatgacgaaaatatgggctccaattattttttattttctactaacacttttctagtggatcaatttatagattcaggaaattcattgcatgaattgaaaagtatttatttttattaaaatttgctgcttattttccgtaagaaactttttgggaggaatttcacaaccttgccataggaaaaactcatatctgactcgtataaaacataactcgaacagtaggtatatttgttgtgcaattttatagtccagccttcgctagggctctcaccgcggtgtattttaggtgtgtctttgatgtatcaaaatttctctcggccgtgttgttgactgaaaaataaaacgaacttaaattattgcaatattgtttatacgaagtcttttgatattattctgacgacttccatgataataaatacttatacaaagtttatctttttatatatttcctcatcccaaacatggatggaaaataggcaataaatcgacaaatattttcaagttttgccatgctatttatctttcgggactcaatttatgacgaaaatatgggctccaattattttttattttctactaacacttttctagtggatcaatttatagattcaggaaattcat

SEQ ID NO: 12084 - DNA, 1156 bp, Heterodera glycines
atcccgacttttctcctgaatggtgaaagtctcgactgattcctacagatttggctgtccctcctctttctgtttcatgtgccattcgtaacaatgattaacgaaaatgccatcatctctgctgctgctgttggtgctgctgatcagcagcaccatgcctcgtcctcctcgtcggccgcttgtctgccaccggcgctgccaaacgacggagagttaaagcagcgccatgtgcagccggctgctgcttcatgttcagcgcccgtctgtggccatgcaatgttcggcaatcggtgtgccgtcggtattgtcgttggactgcttggactcggtgtgctgttggtggccgctttatctccccctacggcaccgccaacagcgcccattggtttgtcccaaatcccgacccaaaatcttggccactccgacccgaatcccgacttttttctcgtcctaaatcccgcccgataaccttggccactccgacccgaatcccgacttttttctcgtcctaaatcccgcccaataaccttggccactctgacccgaatcccgacttttttctcgtcctaaatcacgcacaataaccttggccactccgacccgaatcccgacttttttctcgtcctaaatcccgcccaataaccttggccactccgacccgaaccccgacttttttctcgtcctaaatcccgcccgataaccttggccactccgacccgaatcccgacttttttctcgtcctaaatcccgcccgataaccttggccactccgacccgaatcccgacttttttctcgtcctaaatcccgcccaataaccttggccactccgacccgaaccccgacttttttctcgtcctaaatcccgcccaataaccttggccactctgacccgaatcccgacttttttctcgtcctaaatcccgaccccaaaatcttggccactccgacccgaatcccgacttttttctcgtcctaaatcccgcccgataaccttggccactctgacccgaatcccgacttttttttcgtcctaaatcccgaccccaaaatcttggccactccgacccgaatcccgacttttttctcgtcctaaatcccgcccaataaccttggccactccgacccgaatcccgacttttttctcgtcctaaatcc

SEQ ID NO: 12085 - DNA, 3620 bp, Heterodera glycines
  unsure (1)..(3620): unsure at all n locations
cgacccgaatcctgacttttttctcgtcctaaatccccctactaagccttggccactctgacccgaatcccgacttttctctcgtcctaaatcccgcccgataaccttggccactctgacccgaatcccgacttttttctcgtcctaaatcgcgcacaataaccttggccactctgacccgaatcccgacttttttctcgtcctaaatcccgcccgataaccttggccactctgacccgaatcccgacttttttctcgtcctaaatcccgcccgataaccttggccactctgacccgaatcccgacttttttctcgtcctaaatcccgcccaataaccttggccactccgacccgaatcccgacttttttctcgtcctaaatcccgcccaataaccttggccactctgacccgaatcccgacttttttctcgtcctaaatcccgaccccaaaatcttggccactccgacccgaatcccgacttttttctcgtcctaaatcccgcccgataaccttggccactccgacccgaatcccgacttttttctcgtcctaaatcccgaccccaaaatcttggccactccgacccgaatcccgacttttttctcgtcctaaatcccgaccccaaaatcttggccactccgacccgaatcccgacttttttctcgtcctaaatcccgaccccaaaatcttggccactccgacccgaatcccgacttttttctcgtcctaaatcccgcccaataaccttggccactccgacccgaatcccgacttttttctcgtcctaaatcccgcacaataaccttggccactccgacttttttctcgtcataaatccctattgtttggtgccctgtctcgtccctggtttataccatatatttttatgcctccgtatcaagcaagtttcaggcccaacggcggccactgtcggcacagttcgttacgccgcgcggggcggcggcggcacaccgtttcggcaaccatcgccatttgctgcacccgcaggggcagccggcggcgaattatcaccagcaacagcggggcgatttgttggcattgatcagcagcagcaacagcagcaaattgatgccctccgggcacggctggaccagctacagtacgaactgctgggccaagtacagtacgccaccagcgcggcggcgggtgccgaaccatggccacctgccttcttcaccgttgactacaacaaccacccgaaatcactgctcgcccgccggcatatggcatggcaaccgatgcgccgtggcatcattgaaaatgacgtatgtaccatatgcaagtacagtacccttaacccaaatttttgtcagagagatttgaattttttatttttaaacgaaatttcatctaacttttcatttttaaagctacagtatctatatatgtttaaatcattccacatatggccatttggtcagcataggtacacagtaaagacaattttattactgtaatgcattaccgtaacccatttttaaagaaattaaattttgttaaaacggttaaggaacaacagcacggcagcgtgtccccaaggcatatcagttggcagccaatgaagcgtcaacaacagacggaatacggtatcaccggcatgtacggtaggggagggggagacggtggaggagcacaaaaggagcagggtaagtgaaggaaacagggacaacaaacacaggcagggttgccctcatgaatcccggaattcggcattttacgttctgaatcccgacccgaacgttttttggggagcagcagctcgttcgcgccccgtccacccccctcaaaaaattaaaaaaaaattttcaaatagaaattttccaaaaaaaaattaaaatcttctaacttttttaaatctctttaaaatttaaagtttccaggggcctagttcaattcagatcatatcccagatatgacgtgtcatatatcatatgcatgtttcaattatgaacggacttgccataagatcatatcgtatgcggaacttacaaaaaaataataaaatgaagaactttaacttttaattccgtaaaaaaattttacttttaaatgttttttaggtaaagaaattaagggcaaataccaattatgtttttatgatataaaaataaaagtctaaataggcattaaaaagtcgaaaaatagcttaacatctgcacttaaatattttttacttatttatcattcaataatagaggtttcattctataaaatgctttttaatgaaaattttcgatcaagtttaaagtttttatgaacttttatcctacatacgattgggcatgtctccgcctcggagcggatacacccgcatatgatttgcacaagggaaggggtgtcatatgtgacggcatatacgtagaaaagggagttaattgaaacgcgcatatgattaatcataggaaaagtcgtatgccgcgtatgacggcgtcgcagatataatatcatatcggcgatatgatatcatatcggcgatatgatatcatatcggtgatatgataccatggcacaattgaaacgcgcctatgacactatgacacgtcatatcatacgccgcatatgacttttggggtggtttaattgaaatagaaattttgtgtatgatatgacaccgtgtcatagagtcatatcgcagatatgactcgaatgaaataggcccagagggcgcgtaaatctctgaatttcagcttctttatgtttcgaagaattaaaaaatatataaattttaaatttggcacccaaaatgtttattttggcgttttgtacacagtgctgcgtacggtggagcagcagttggtcgaagtgcttaaggctggcgatcggttgggcgtttcggctgacgaaattttggcacatttacgggcacagagcgaaaatggcggcggcggtggtgggggaaatggacgacgatgaaaaagctgaagaacaaacgattttgagactgatcatttgatcaacaaacatcagaagtgatcaattctgacgcatttaattttattaatttatattttgaaagcccgagttatggtcaaaaaattttaaagaaattacaatttcaaactccgatttgatatgccgcagaaacaatatgtagtaatcaatgacttagccaagtctgatcagtaggattaggatggcaaaaaatgcaaataaaatctcgaatatgtatttggaaacacgtcctagaagcttcaaaacaagctaaagttcggaaattcttcgttttaacgcccctatccgaccctagaaattccaattttggacttttttgcccctaaaaattctcgccctagtgattaagtcgagattagggcgcggatttatatatatttttttaaatttttagaatttttgataaatatttttgagtttttcgcgaaataaaaaacagaaaattcttaaaaacaatagaatcgttgctgactttcaagtttatacaagtacagtatacacacaaacaaatacatatatatgatggtatatacgatagaatatacaatgacaggcagagcagtttagaaaattatacacatatgatttcacacattggtgatattataagcgtcatttcatcgtatctcctctcaangttcgcat

SEQ ID NO: 12086 - DNA, 2724 bp, Heterodera glycines
tcaacttcaattccaccaacgccactatttggatcaaaatttataattgatcgttcaaacgcaaaagctgtaatagttgataatgagaatttacttaagaatagcatacggtgcgaaactaaagaaaaggcaacgaaattcagttgtacatttccaccagaagcttgtcaatgtcacggaggtgactccgttgttcactgcgaatgtgagaaaaacccactcactgaaatgttcacgagaaaagaaaatattttgcctctcgagacacatggaagccaagtatcgttcgacactttattaagagcaaaaataaagtcaacaacttcactacaaatgcaagtcacgcttaaaggtcacaaagtcaaagcaatttatgacaaaaataattgtaccgtaaacataaaatcgttagaaggatgttactcatgcaccgatggagcagaatttaaattctcatgtacaaccaactttggtaccgcattggcaaatgtaaaatgccatagtcagaattttcaaataccctgtgacacaaaagggaaccaacagcaaattcagctttcatttaatcaaccgagtgtaaaagaaaaatgtgaagttatatgtccagatggaaaaagtgaaataacaattgaggccactctgaattatgtgagccaacaagacaaaataattatcccttcgaataaccaaaaggaaacacccgtacttggcacttcactagaacaaattacagatatatttaatttcatatataccttgatcaaaaccaatcttttaaattttttaactattgcttttaccttgattctgataatagcttttattttttgtatctgtcctatgatttaccctatgtttattaagcacttccctttccgtcgcgggaatgtcgcgactacgcgaattcggaaaattaatttaaaaaataaaaaacattaaatccaaaaaatatttaaattaattttaaattagacagataaatattaattaattaaatgtgaacgaaatgaagaaatgaatgagggaaaaacattagtcatattagtcataattttttctatccgaaaaattatcaaatgttaaaatttaattatgaataattggaacggaacgttaaaagaaataacagattttaaacaaatgttaaaatgagacaaaatgtgaatgatattaaagaaattgtaaaatgttagaaaattggaaaaggctaaagtggcacaaactggaaaatgagaaaaggttagtaaaattggcaaatgttagggacagaaatttggacatgccaagttggcaaacaattgttcaagcagaaactgccggtataaaaggaggccacaaaccccccaccaatcagtacaccaacggtttctgagaggcattgcctcgtcctccttttcctccctccccttccccctgtgccgacaacagccgccgacaactgcgccgcccgcccgttcgtgccgtcgactcttggccctgtccgttcgtgcgccgacttctgtgccatgccgatccgtgccctgccgtgcccgactaccgccttgacacaccgcccgctcaatgccgcccgtcccgtgccgttgacgtgtgccgagccgaccactcccgtttcggtccccaaattgtgccgtcctccgatctgtgccgtcccccattttgtgccgtcccccatttttcctcattgtgccgtccccatttctgtgccgtcccccattttgtgccgtcccccatttttcccccattgtgccgtccccatttctgtgccgtcccccatttgtgccgttcccccattttgtgccgttcccccatttcccccttcggtttaattacccaagtttgaggactccaataaagtgtattttgaatcgctttcccgcctcacttgacccccagcaattccaccatccccgatcgaccgtcaagcgtccacccccaatcgccccagctctcgccaaatccgggccgttgccagccaacaaactcccattcagtaccggccgctcaatctccgaccgactccccgactcgccctcttcatcccgtcccccccatttgtccatcaccgattgcggaaaggacattttcagaaaagccctttaattgaattaaaatctatattttctggacgacaaaaatgcgttggctgaattaaaattattcttaatgcaataacggggagattaactcacgcactaattctactcacttttaattttttctgcagcacaattaactcgagaaaagtatttttcaaccgagagtggatctgttcactttttttgtcaaaggaaatttgatagactcttttattctcagaatttgtctatacaatttagttcaatattttgaattcacaaatagagatcagatttggaataacggaattaaacaatattgttcgaattctgaaattatttcccaatccaaatcgattaactccaaacgcgatggagaaatactcttttcagaaaagccctttaattgaattaaaatctatattttctggacgacaaaaatgcgttggctgaattaaaattattcttaatgcaataacggggagattaactcacgcactaattctactcacttttaattttttctgcagcacaattaactcgagaaaagtatttttcaaccgagagtggatctgttcactttttttgtcaaaggaaatttgatagactcttttattctcagaatttgtctatacaatttagttcaata

SEQ ID NO: 12087 - DNA, 1125 bp, Heterodera glycines
  unsure (1)..(1125): unsure at all n locations
aaaaatgcgttggctgaattaaaattattcttaatgcaatacgggggagattaactcacgcactaattctaatcacttttaattttttctgcagcacaattaactcgaganaagtatttttcaaccgagagtggatctgttcactttttttgtcaaaggaaatttgatagactctttattctcagaatttgtctatacaatntagttcaataattctgaaattatttcccaatccaaatcgattaactccaaacgcgatggagaaatactcttttcagaaaagccctttaattgaattaaaatctatattttctggacgacaaaaatgcgttggctgaattaaaattattcttaatgcaataacggggagattaactcacgcactaattctactcacttttaattttttctgcagcacaattaactcgagaaaagtatttttcaaccgagagtggatctgttaactttttttgtcaaaggaaatttgatagactcttatattctcagaatttgtctatacaatttagttcaatattttgaattcacaaatagagatcagatttggaataacggaattaaacaatattgttcgaattctgaaattatttcccaatccaaatcgattaactccaaacgcgatggagaaatactcttttcagaaaagccctttaattgaattaaaatctatattttctggacgacaaaaatgcgttggctgaattaagattattcttaatgcaataaccgggagattaactcacgcactaattctactcacttttaattttttctgcagcacaattgattcgagaaaagtatttttcaaccgagagtggatctgttcatttttttgtcaaaggaaatttgatagactcttttattctcagaatttgtctatacaatttagttcaatattttgaattcacaaatagagatcagattttgaataacggaattaaacaatattgttcgattccaattctgaaattatttcccaatccaaatcaattaactccaaacgcgatggagaaatactctattcagaaaagccctttaattgaattaaatctatattttctggacaacgaaaatgcgttggctgaattaaaattattcttaatgcaa

SEQ ID NO: 12088 - DNA, 3163 bp, Heterodera glycines
cttcctccatttccagcaccagcttacagacggcaatctttgacggtgccatagccaggatgcgtgccgacgggtcctctcgcaggatggcagccatgattgccgccgccgtaaaggtcttgcctgtaccagggcccgcctgttgaaagacgaccctcggcactccgtcgagcatccgttccgccgaatcgcactgtcctgccttcaaaagcccaacggcaccctttttcatcttttcctcaacactttgcaatgccacgtcccggggcaccctccgtcccagcagaatggccatgatcacattggcaggcgatgcgtggtccttggcaatgatggagcagccatttttggtcagaagttcagctcgttccctcagcgcacgcgtggaaaccatgggacgaagctcaacggcttccaacgccccttcacgaaggaattcgaactgctcccacgccttctgtcctttggcatcctgaaatgccaaaaacacctcgactctgacctcaaatccgttgtcaagtgcgcgcttttcaatgcgtcggacaaatccaagagcacacggcttggtctcatcattttggtcgacgcggcagctgattgccgtgtcttcttcccaaatttgcaacatgtccatcatctcggccacggagttcaactggtgcctgaacgtgatgttcacctgtgtctcttgcagctcttcgactcggatcagctccgtgatgagagtgaatcgctgtagctcttggtgaattgtggctcgttctgcagcgactgcgcatgccatgactcgctctccaaatccaatttgttcccaggtggagttgctgtcaaagggataggcataaatccgggtttccggttcaaccttggcaattatgttggcattaaaggccaaaatctcgtctccattttttgaatggaaaacccatgggcaagacatagtgctgtgaaattagcactccttgcggacgattgatggtcacaagctgcatttgcaccaggctctgcgagtgcagttcgtttgccatcgcttcagacatgtgccgtcgttgaatgcgcatgatggtgggcaattcaggggcagcaatggtggcgaatttcatggttttgttgccatttttctttgcgtgccgttcgacatacaaaacaaggcccaacgctgagctgaaaggtccctgataacacgcacttacctccttggccacggcttggtgattcaagcgcttgttgaccatgatcagccaatctccggcgcctgcccatcccgttgccgtctgtgcccattcaacgctgaccactttgaccgaatcgccgacttccaatggccgagtcttttggacaatgtcattgtccacccaaattagggcaggccattgctctgtcagctgaactcgtgcagcaatcacgccatttgcagcaatttgggcaaccaggtaccacttcggcgccttttcgtcttcctttttgccagggtatggcccctgaacacgagtcttcgtcaatttgtctttggcccgcaggccgacggcttggaattcgtctatcagagccccgtcctccaaacatgcctgcgatgacgaagagcattttgacgcatttgtttggtccaggcgctttgcctttttcgacaaaaaggtgtggcgagacgatgactcatcacctgaaaacccgccattcccgaaattatcccccccttggtccccattttgctcatccacttccatttctttgaccggctcaaccgtggccaaacccagcggatcgctcggatttaccaatggcatcacttccacaacaccattttcattatcagtattttgcccgcaggcgttctcctcgatgctttcgtccagcaccaccacttcgggcgcttgagctggtacttcctcagcttctccttccatttcattttcagtattgtgcccgcaggctttttcggaggacatatttttgggaaaaggaaatttggatttgttatagctaaaatgtacggaaattaattgaaatggatttgtgaaatggaaaaggagaaaaaaaatgtggggaaagggatacagaaaatgttgaaatgaataagaaatgagaaaatatgtgtgttgtaaggtttatgtgtgattggatcggaggagtggcttatttgccagtcgggggaaatgtgaaatgtgtaatgtcggcagcagaggaagatgacaggcgatgggcgtttgctccgtctaagggcaaagatgtgaccgttgatgattcacaaggacatcgctagctttttgagtcaaattatttgagtgggaatgggaaagaatgagggaaaaaaattgaaaattgtgttgtggtgttcaaaagcgacaatttgtgcatcagacgatggggagagaaaaaaaaaccggtgggaagtgcgaaaagggcaacatttaattgctttttttgaatgcgcggatgggcgcggacctgaaagaggcacccatcagcaattaattcaacaaagtgtcccctcagcgaacggttgagcggagagagaatttgaaaataaaaaattggaattgaaatgtggaaagaaaaaaacaatcttagtccaacggaaaaattcaccaaaatttggaaatcaattttccatttcaaattttgtagccaaaaaactgtaaggtatacgatggtgaaaacggagcggtcacacttgcaatacagcaacaacatctaaggatttttatgcagactaatattgccaaaaagaaaaggacaattaagccaattgttagccaaaaattagatgattgactaaatttgtctccaaaatttttgcttatttgttcgcaggcccaacgtaattgttcttctccatactcagtgattgacgaattataatggtaaagcgcatagcatgttgtgttgcagttcatcgaacacaacaaatgctgttcgaaaattgccgtactattcggtgttagtggagatgtgctgaccgtataggccatgattaacaacacacaaaacagtttggtcagttttcctaatttcgattttgtacactttgagtctgtattgtgcccgcaggcaatttcagttgatcgtctttggttgtcggcagagtgcatttgttgaaaaaaggaatgataattttgtctgaaattgtaatatttaaaaaaggtattttagttaaaagaaaatg

SEQ ID NO: 12089 - DNA, 3651 bp, Heterodera glycines
tccaaaaacgacttacataacgtcataagtttttagcccccacccgaagttgagtctcaaaaaacataatttttgtttcttcatcttttaaaatgtgagttcttatagtttaatgaacctttgttagtgtgtacataaatctgttggatataaaatcgttttgcattggacgggtgaactggcacaaagccgaattcattctttcactgattccaattcatttttcagttacaacctgcaggatgcggagcatgaggatgacatcggcccgaaataagtttttgcatgcgccattcgcctgtgatctctcacacaaagacaaaacgggacgttttcttttccattattgtgccttttcatttgcataacgaagattttattctcaagtaaagacattttgaacttttaaaaacattttggtgaaagtaaaggttatcatctcaccagccattttctaaaaactttctgtttattttcgagtcatgaaaaacaacaaaatgagtaaaagtaagggatgcagatgcgcataacccagagttcccaagtgtccttatttgtaagatttgtccttgttttcaggcttccccaaacttcaaatttttgtgcttaatgatttatttcgccgatataaatgctactaaaattattaattttcgaaggtttttttccccggcgccgcctatcggaaaccgccgccccccccccccccaaaaaaactgttttttcttaaaaaattggcaaaacaccgtaaaaattgttaattttttgttgaaaatctgttaacaaatagtgggaaccttagttcggccccgcacggtttttcacccttcatatgttgtaatttcacccaagcttttaaaattaacaatttgtttaagtattttgaatttaatttggctattttctaatttgcttctgtgattaatgaccgaaaaacctcttcttactccgaccaatcccgtatgaacaaaatttgattcgttatttcttaaattccagtggaatttcagcgattggctcaagtccaaacgtcgtttgccaattttttcgccattgcaaaccttggcgacacgaactccgcttatcgtggcaagccaatttggacaaattatccgacggacgaaatttgtcaatgcgtaattcaattgcttaacgaagtgcctgcggcgaggtgtttagccgaattaccctactttaatttaatggatgaaaaatcattcccgaaatttccgtttagagatgccgttttttatttcatctcaaacctaatccatgagaatgttcatctttatttgtcggagaaggaaaggaaagacgcgactaaatgtgtgatttttgcgatatttttaatttatgtttttttccgaaggtgtcgattattccaatctccaacgagctgtactgcgtttgctgacgaatttgaacacttttcggacggaatattccgacaaaaatttgtcattttccgtcagtctgttaaaagcggtatttctcttcaacgggtttcctccaaaattcctccccattttccttttttagctgttcgaactttgctctgaacttttccgcaagaattgtcagcggccctttttcgcccctcagcagccttccccggcaatgtttttgacaaattttcaacaaattccatgtgtttccgaactgtttgctctgttggattcgaccttcgcctccctgtcgatattttgcttttttcgattttgttttataaattactaatttgtcagattgcacatccgtccggacagtgccgtgctcgcttttgtatcggcccacaaaaatttctacgccaatttcgattggattgccattcacatagcgtaaaattcttacgattaacttcttatatacataattctgttcattttcagtgaaacattccccaaaatcgctgtccatctcgtcaaagttggggccgaggaattctgtgcccattgcaatgacatgctcaacccggcggttcgatttctcatgaaacattagcaaatatattttttttttggcattttcagaatcgatcaaatgccgcccgtgttgttcagctgcaggacgaatacagcgcaaggcaaaacatagcacaaatttagataaatttaaaaaacccattttttaaaatttcctccatttttaggctacgattgttcaaggaaatgtttttgtacatggaaaataaacaaacacttgaattgcgttcggtgttcacttccattgtggaggtgtttaattgacctttttcatttccaatatttcgtttttaaatttagaaatttttactctccggtgaaaattggcgggaattgctctttctcctcaaattgtcactattttcgcccgcggtgactttgccgttcattaatgaacttttgcctcacatcagtgggttttttgtcgattcgttttctcaaaatttcgttggattttttttttaaattacaagtgacacaaatttcatgtcaattgttccaatggacaggaatacaccattttcagttcaacacccgttccttgttgatcgtcttcaggaactcgctgccaatccggcactttccattgccatttcacccacaaattttttgcagaatttttttgagaaagttgttgaaaatgcgagcacggaatacgtgtttaaacttgcaaaaattgtttccttttccctttaatcctttttttctgtcatttgacctttgaatgtgaaaatgctttaaagtggtaaaacaactgctgaaaatctcacccttaattaattgaaaataaaatatttatattttttattgtaattaaaacgccgaattaaattcatttttcattatattacattaaaaaatacctatttgataactttacttaaattacaattctctgcttttcttctcactaacttttgctcccaaaaaatgactccgtccaccgatgaaactcattttggtggcatggacaggccatttgtgcaagcgcatttggaccaattcaattgtgcattggggacggaggacgaattggacgaaacagtcaataaaagtaagcaaatagctcaattaaattattattttttaaaaacatatgttagacctaagtttccgaataatttggtcccaaattttctgggctaaatagcacaatgtcattcagtgttcgatggttccaaaaattccttccctttttgttcatctctttcagttaatgcgctttgcaaaacccattcaattggcgcattggactttttggacggattaattgcgtttatgaaaaatggcaaaagggcgaccgtttcgatgcaaattttggacaattatgagcaccaggtaagtgtgaataattaacgacgatttgttcatttcttcccattcttttaaggtccttttgcgaatgaatgacagcgaaaagcggcggaaagcgaccaaacggacggcgccgttggattatcggaagtgcgtttttcaggggacaacaattacggaattggggaaattggcacgaatttttcaaattaggtaccaaaaactaaacttttttgaaattttggaacttattacgaaacctattacgatttttgataatgttttgtttgttcctttagggagagggaagtgctcaaagaattgccattttatgccgatttatttgctgccgcaa

SEQ ID NO: 12090 - DNA, 1467 bp, Heterodera glycines
gggtacaccccaaaacgtcgccgccgtaacgtcgccgggacataacggcgccgcaaaaaaattttcaaaattttaagaaaatttaaaattatttaagcttttctgaaaatctaagggttaataaaaactaaatttgttgatttctaagaaaaaaatcaaaaaaacatgaaaaaaaatttttttcgaatttttctataattttttccgaaccaggcatggtaactaaaaaattcttgataatttttttaaatacaattttaaaaaattttcggcgacgtttcggcggtgacgttttgtcctgctcccgtttaatccgcccatttttggcatttttcagctcgtctcaaagttgtgattgcccgcggtccattcttcagtggaataatggcccattctgctgaccaatttgtgcaactgcttagtttggttgccgcctctcatgctaacgcattgattttggtaccatttttcaaagaaaaccaattaattttattttatttttttcattttcagttcggcccatttgtgccccagggtatggaactgatgacggattcgcccgaggcaattttctccgatttacttgccgaaattgacaaaaacattcccgccaatgtccgtgtgctcattgtgccaaactcgcagtgcgatcagctcaatgctttgcccagcttcccaacgccgccactgatcggtccgcaaaatgacactgtgccaaatgtacgttttggactgggggaaatgaggcaattaattatacctcattaagaatgtcacttttctgtccgaccccgcactgtttgagttggattctgtccatttcgctgtgtcttcctcagaaattttgttgcatttgtgcaagacggaaatttgcaagtcggccaatgtggagaatgaggaccgaatgcgccgcctcatttcgcatttgttccggtaatttgatgtcgtattggattggatcggtgccgtaaaggcctaaaaatttcggaatttccattgcctcccccttctttcagtgctcgctccctttacccgctgtgcccgtgtgaccaaaatttgccatttgcgccctctgcgagtgccaatgccaaactgcgcctgcccaggaagccgcacgtgatggttctgccttcgctgcttcagccagtcacaaaggtaaagcaaaccgtgacaattgaacacggcttttaaatattttatccatttgatattgttccatgctttatccaggtggtggatgactgcgtggtgctcaatccgggccgcttcgacagagggaagggcaccggcacattttccgttctcgacttggacctttcgagtgccattggcgccacttcggtctcaccgttttgcgaagtctcactcttttcaacccaacaacaacaatgacaaaaatcacatttttgagtgtcgcaattgcccattttaacatttttgacaaaaataaattttcggaatattttt

SEQ ID NO: 12091 - DNA, 4896 bp, Heterodera glycines
aaacagtggaaggaagaaatagcgcaggaaagcaaagaaaagaaaggggagagtggagagagcgaggaggaggagagacggagacagaattggtcggagagcaaaacgacagatctgatcagaaaacaattggcagagatcgaacgagagattgccaggaggatgcagaacaaaaatgtgaagaaggtcgagcggggagacgccgcaattcactttttagggtttttgaatgaatgtctttctttctctcgtcacatcccttgtctctctccatcactctctttctcttgctttccctcttttatttctccgttctatttcctctgtcctttttgttttcttccgcacgggtttcggttcggttcgcctcgctaaatggccctttcagatggacgagcaggagatgaaccagctgttgttgaaccacgcgttcggcttccaacagcaaatgcaaaacgggcggcgacagggcgaagatgtacggggagttggtcaacaaacggaggtcagagcgaatgagtcggtgtcgtgtcgtccatcgtccacctgttcctctgtgtccttcttttttggatgctttcactgtttggccgcttttctctaacctagagtgcgctgggaccgggaattttgggcaaaaccgggaccgggacttgccgggaccaaagaagccgggaccgggacttgccgggacctaagaagccgggaccgggaccaaccgggaatttttaaaaattcaaaaaaatttaaaaaaatatcaaattttaatttatttcgagtgaaaaaatacaaaattaaatttttattttgttttttatttaataaaatccaaaagttaaagctaaattaaattaatgaaaattttcaaaccaaatttatttcaattatttcaaacaataatcaattttggacctaaatgatcgaataatattaaaattgatttacttttcacatcactttttttaggcacgttttttccaaaaaacttttggggaagaagggggtccggcggtgccgataggcggaaattttgaaatttgggtgtaatttgttaacagattttcaacaaaaaaggttggtttttgggattactaagctcaatttgtacggattttttttaaaaaatgataaacatgtatcaattaaaaaaacaatgaggaatcatattttgtcgatacgaaaccaatgagtatacaaaaagaaaattcataaatattttattcctgtagagggattgaaccaagggaaggaagaagggaaagtaaaggatactagccactaggccatttgcacaattgtcagtgcgacttttaaagaatatattaatgttttttttttaaattttttttctttaactccaagtttcgttcctaatttttcactcagacccccattcttaccagtgcttgtttttcccggttgccctaccgggaccgggacctgagcttttcaaaatccgggaccgggacctcggatgaccgggaattcccggcccggtcccggtcccgctctactctaccaaaaatgtccaaaacaaattttttagttcatctggccgtaccaggtgttttcgacagtgattgatttcgaaagtagttgatttcgacagtactttataattaattttctacataatttattgtacacttaaattaatattattatataatttacatatacaaattatttgaagtaattagacttgtataattaggtatgtttgtcaaaaagatttattgctttcttattttgtatacacacggcgagtcaattttgggctccaagtacaattaagttggatttttcgtctaagtggtctgtgagttagtcaccaaaaagggggtctcaggttcgagtcccatgcatgctgtagctgtattttgaggtttttaaagcaaataaataaatgtgaaatgataagacaatttttaaagaagctcaggatttttttttaaattttattcatgtaaacaaagaaaaaatcttatccaactgtgtttattcaaaatcgaattgttcttcttctccattgctatcttcgtccgtctcccgtcggtcaccaatttcttcttgttgttcttcacggtcctgaggcatgggaatttgattttgaacacaattttcaccaaactgacccgcttcatttcgtcaatctttcctgtgttcagaagccaatttgacacaaaatgatggtccaacaattgacgtatttgttcttcgtcgggcattgttttccacaactgttccaaacgcctccacaccgaatgcaatgcttcatcacctaaaaaatccagggcttaaatttcaaaatgctttttgaccctgctcgtctaaaagtgccaaaaattggtgttgtctggcgaacggcacaaaatggttcaacagcaagtggacctttggttttagggctagcaaagtgcgcatccgcggctgatcgttgaggaatgtccgaaattgatcaatcgacgtttccaattcgtccaaatcccgtggcgacaggggttgtgccttaaatttatacttaattttcaaaaatatcaaataaaaaagcacttttgtaaaagtttgtatttttgccaagtgccccaatgtttggcaaatgatttttggccagtcagctgagtaccgcctctccaattggtccgcatgaatcagaatttttctgattgagttccccgtcatgtccttttttctgaacgcttccctcctggtcccgatgttccgaaaaaattcgtttgcaatttccgcgctttctgttgatgtttcgagctctttgatcagagcatttccaatgccctggaagacatgaaaaggcgccaatattatgcgctcaaattcgattgattgcaaaagtggctcatcaacgattcccatggtcaacgctcgcgcagcaacagttggtttctctccattttgcacgagacgcccgaactgctcagcttgattcaccgtttcctccgtcgtcctcattttacacttttccgcgtccaacaattggtcccgacgacattcgcaaataggcgagggatacgtcgttacggctgagccacagtgtccaataattgcccacaaaaagctcagatcaccgccgagaaagctggaaatttaagttcatttcagaaaatttttattaatttttacaatttgattttttttgtccgcaatttcattcatttggctgatctgttgtcaaatgttgcacagaatttgctcaggtttgcccttgtgtcttttgcggaaaatgctgccacaatgaaattgttggccggggaatttgcatgcgccgcatggggcaatgagatggtcaatttagtgaagccctgcccgttgtccccactcaattttaaaatgactttgtctgatttgaagttgatcagattgtcttttgccgcggacaatctgaattccagtgccccggcaatgtcggaacaaaagaaaccgattctgagtggcgtcgaaactgcttcatatcggagcacggcgcagatagtctttttgatttttagtgaccgaaaatttatttatttatttgaattaaaaaacatttttacttttttcaatggtgggaaaacatcaaatttccaccgatcagacgcaagtgccttcatcctctcatacgctttttgagtcccaagttgtgacagcagaagcagtgcatcttcttcatggattgtttgttgttgtcggagttgttccttcttcattggtgtgtagtgtccaaatttgtggcggacttcacgatgtagagtttgcagcgaacatcggctcactgatcgggagcggtctcgatcgatcacatcaacgattttctcggccaaatttcgccgtgaggtccgctccaatgtagccgcattctttttgcaccgtgtggaagttaaagctaaaaacaatttggatgataaatggctctaaaaattctgcagaattttaagtgttggctggtccttctgcgcctgctgttccaattgacggcgcagatcagcgatcattgcgtctctgttgcggacctgcagtcgtagaaagctgatcgtttgttcctgctccttcagctgtttgtccaactgctcggtttgtgtcgcggcgtcctcataagccaaatccacgtccgttgccttgtccatcattgtcaaatccatgtttgttgcattgtcggtagttgtaaagtccatgtgtgttgctttgtcggcagttgtcaattccatttgtgttgcgttttcggtagtttttggacgaacacgcgcatggcgcctgaccggagtggttgacaatggccttgggcttgaatgcgggccttaatttaatttttgcttctaaaatagtacttttttgatttacaaaggtccaaagctgacgttgacggcccactttcggcggcttgggtcgatgtcccctctccatctgctgttggcacggcttcggtctgctttagccctgaaaaatgcagtgttttaaaaataaaattaattttggtcaatttttgtcactttttggcgtcgaaccgactctgcgaccatgctcttggcgccattccttctgctttcgctttgcttcagtcccagaattgcttaacttcataaattttccagttttattacgtgtagataccattttttatactaaaaatgttgcaaataaatttgattttgttgtccttgaaaaaaattttttcctattgaccaattttattgaaattttgcctaagtgaattttttggtcttttctatcgaattctcttttgttatttgaaagtttcttttctaactcgagatcggctcttccatttttacaagggaaaatccccaataaattttaagttttgcaaagttttggcgttctgattactaaataaataataaacttatttgtacttggagcccaaaattgaatcgccgtgtt

SEQ ID NO: 12092 - DNA, 1160 bp, Heterodera glycines
  unsure (1)..(1160): unsure at all n locations
caaattttttgtttaaagcgatcgtggacaattccagggatggcacagtgatcgtttccttcggcacttttgccgatattaactcaatgaaaaggggaatgaaaatggcatttttggaaacatttgcccgctttccgtactatgaatttatatggaaagttgaattgtctgatgaagatgccaaagtgtttgccaagtacaaaaatgtgaacccggtcaaatggatggaccaaaaatcgttactaagtgagttaaaaaacgaaaaagtttgaaaattcagttaatcattgatcacttagtaataagttcactaaaattaattacccttaatttctgaggctttaaattttttcatattcggtcaatgcctaaattcttggtatcaaacgaaagctcaaagtctacagaaattttttatttagcgaattgcggaataaatgtttaacagacaaaaataaattgtcttgaatatacacgaaaatggtgaattcctgatttctattgcatactttttcttaatattaacatgttattttcttgtattttcgaaattccagaaacattgcgctttcgttgttacgaagaattttttttttaattttaacaacaaaaagcactaaaatttcaaaaatgttacatgtcggctcctatcggcacagacgggtcaccattttagctgttttttttttttgaaatttagacctaaaaatggcaaaagcagtttttttttgacgataaacggctagaaattcttgtttttgttccccggcgctgaaatttttaaaataacactggacaagtaagcaaaaaattatatgccaagaaatttaggatggtcacttaatggacacgtaattggactagagccaaatttgttaatatttatataaattagtaaaaagtgcactatattaattatcctcgtagaaatttctttttagccaattttggccattccgctgcttgccgaccaactgtacaatgccattatggcacgtgtgaaaggcattgctgtccaattggatgttggccaactcaacggggagggggccgaacagctccttgccgatggacttgacaaggctaattatcaccagctaattataccttaatgagtttaattgctttgcangtgctaaatgacccctcttatagccaaa

SEQ ID NO: 12093 - DNA, 5444 bp, Heterodera glycines
  unsure (1)..(5444): unsure at all n locations
aatcatttactctttttctcattgtctctactttttttttctctcccttttctttgcttatagccatatgacaatttgctgtggggcggtccttccctttgtctcctcccccaatgtgcttgtatatgcttttcctttgtccatacacacatcactccacctggccgttggattcggatcccgacccccctcactccccgctccgaatcgggaaagctcaccattgttaaacatgtaccatcggaataaaggatattattccacgtattgtactttctgtggtgggcttatcaaaggtacgataacaccataatcagggtcatctcataacaatacaataacaaataattttttgacaaattcagcacatgtgctctctctaaagcatgagaggcacaatagtgtgcatcacaaaataatacattttaaaaaacgttggcaaatttcacttctgtgtctcatggattaaagatggggtgaaaataaggaagggatgcgatacgaatggggaccggtaaattggacaccggaaaattggacaccaagcggaaaaatggacaccgccggaattttggacactaaaggaaaattggacactaagatttcctttttaaaaaaaatcaagaattaggtgaaaataaatttgagtagaataaatgggttaaatgagggatgattgatcaatgggccaaaaaatgaaccaaaaatgagtaataaaacttattgatgtagtgattttctcgaaagtgagcaaaaagttgagtggccgaccgacaggttcaacacttcagaaatgaaataacaaccaattgtaatccaacagcatcaatacaaaaatcacttcatcaaaagtattgggccgacctgcagttaatgaaaaaaatgccgaagcggcagagagaaagtaatcactaattgtaagtaaacacacgccacttggtattaacgagaattttaatgaaatttaggtatttttaatcattgtaaaattaaaaaataaagccatcacgcaaatttgccacacacacacacaatgctcattaagtaataaatatgttttaataatcacgcaaattggccacacaaacaatgctcactaagtaataaatattattttaataatcaagcaaattggccacaacacaatgctcattaaataattaatattttcttttactaatccctccccccccctccctacaattgtgaagagaacataaaatccattcatatatgctatataaaataactgattatttatttttaaattcatatttatatgtatttttatttaatcgatttaatatgaaattcagcagtcaaaaattttaaaaaattacaaaaatattgttttaaattggtggtacatgattataaaaaaagaatgggcattgactgcgtgtaaaaaaatagttttctaatcatcaaattttcaacatctcattttgtgaaattcattgtaatttattttcaaataaatttattaacctaatttttgtcaaaaaacagcaaatgaattgcactatcataaattcgttgtcacctctgtcgaaagtgcgcgacgcctttcggatgacaaattttctgatttgtatagcatttatgattttgtgcgcttttccaatgtacaggttggctcgagaacgcctgacattgtacatgctgatcagcaanggtatggtttttcatcggcagggggttgatttgatcagagttggtcatgatcactcgggctaaatcgccgcgtttcgtaaagtgccagttttgattgataaataaaaaattgtcaatcggctttttcaattgactcatcccgaaaatgagtgaattatggggcagttcgtgcaattgagtttcgaacaaaaatttaaaaaacatttcaataaaacctaaaattttttctcaataaatcggaataaattttcaaattttaaaacctaaataaaaaactcttaaaatttttattgagtggtacgggaccgggacctggtactgaaaaacacgtacaactgagtaccgaagtcatggttttgacctgttttttcccggttttcccatccaaaaagtcccgttttaaatccaaaatgtcccggtcccggttttgcccaaaatatccggtcccgtaccactctaatttaaaacaatttattgtaaatttagaaaataagtgcaacaattaaccctttttatgtttagctctttcccggaatattgttcattttatcattaatcatttccttaccatcaatggatttttttgtgccaaatgttgtgttggattttcttgcaacgattgcattaaattgccagcaatacggtaatgtttgtattcgtttgcattacgttgtgatggcggcaaacagagcacatgcggtgctcttcccattcaattatgcacaaaacatcaccaaaaagtaaacaaaataaacaattcatacctcgagggataaccggttccggggatttccgaattatttgcttttttacatgaccaaaatggcattttatttatacatttcagtccattttttatccaaatttcggcatttcatggaaatattttttttttggaaacaaatcttaatttaaggaaagttttcgtccaatgtgtgattattcatctgatatccatcatttcaattccattttatcagtgtaagtttatgatatgcgtttcaagataatttttcgccaaatatttaagatgttttcttcaacacttcttatttgttcgttacttgtcttttttatttggcaattgtaattcgtctggcatggattaagggttaattaaggatttaatttcctaaaagattggcacatctcatttttgatagagaatttgcaaatttttgaaaaataaaaaaatttaaataataaatccaacaaaattttaaacataaaaatattcgattatggcctaattgcaaaaaattaaatccaatttttcgaaatttttttgccctgtagaactaaatttaaaattattcttgccgaaatcggttgggcttaaccatggaaatgcaacaataaataataatagttttttgcatgttttttatttcaattagaagtgaaattttcaattttttgctctaaatttatcattttcggtcaatattttcttaaattttttggcatgctttttcataaacatttatttaaatagttcagaatttttttttgtaattattcctcctcacccttttcataaatgagaccattaccagcaggagggttttaaaattttaagcacaaaagcgccgttggaataatgccgccactgatgcggcgacggcacaaaatcctttggacaaggaaagtgcgcgaatcactgtggtatgcattgctgtccaaatccatggcatatgttttgtgttacttggtaatctcaccattacgccatggtacacgatgttgacgatatgtacaaattacgacccaatcttgcaacaattgtattacccaatcagtgcgttcacatcgttgttttacatatcagacgaggcaattaatttacaatttaattatttggaatcaaaaaaatttaaaattaattaaatatcattagggtgcgatttttttgtttttaacggattttttttttgcggttttattccgctgttagagaactgcttgaaaaacacaaataaataaatgaattaatgaaatgctgtaagcatcatcggcattgaaaaaaggtttctttgcatgacatagaatttgttatttttggacaccaaatttgaatcgtctaattataaatttaattactttattgacactgagacaaattttcgaattagcccacactgacaatatattttttggttcaacctagcaccgttaaaacattaattaaaactaaattaattcgcccgtcaattgtccaaaattatttttgcagctctttttgttggccgtctgtatggacatgcgtgtgcaattcgcgcaaatgattcggaaaatgtttgtgccgtttcggaggcgtggaacttaaacaatgacagttcaaactgtacaggccaacgaatgcggcacaatgccaatgcgaattagtctcgacatacactctcgaatcattccaggacttgactgatttgctaacaaatgtcttggaaaattgttttatagcaatttaacatttcatcgagaaacaattacttatttcgagcatttaatattgttttttaaaaagagaacaatgaatgaaacaatgtaaaaatttgtatttaattggtcaatattattctacgcttttcaatattagctgacttaattaaaatttttcaagtttgtgttaatttgtggaaccataagctgtagttaatttctgatctttgtcggcttacccatttattcgtcaaaaacatatttttaaattcttgaaaattgtttttgattaaatatttattcacaataaaacatatttacataaatttgaatgttttttccaccattttattcatttttcaattaaataatcaattattttaacaaataatgttcatcatgtcgcgccttcaagctttttctttgtttctatttctgcttctaggctaattggtttgcatcttcccagcgtcatgctgaaatttgcacaatattaaaaggaaattctttaaaaaaaatttaatataaggctcactctgaaaaatttttcatatttctgaaacaaaacaaaaaacattagacaagaggaaataaaaattcttaattttgactaaggcttggactgggcttttggcacagattcatcctgcttgcgagttatgcaaatcgaaaagtacacaatgaaaaattttgaaaattttctcaaaaataactaactctctatatgcttagagcaaattttcaattttatttaatcgagacatgttcaaaaataaaattgcttttaaaaaggccagcaaccgcctctgttcatttgtgaatttttttgcgctttaaaaaaaaatttnttttntnccaaanaaaaaaaccnnntcatancccttaatccanttttttttaaatattnccaaaaaatcaaaaccnaaacctcaantntancccactcacacnctncttccntnttataannccaaccncttnnccacccaaanttttnacatttnccnttnacnttntcccattnccacaaattttnactnccancnaatnntnntnatntnaaaaccaccanaanccacaaaaatattnnnanaataattnnccaattcttcatttttttaaattttattnaaacnaacctttaanttttttttatcatttttcaataaaatttatatttaatttaanattttttcntancttttatatcnaaaaanttttnctattttttaaataaaatnaaaattaagtaagaagatttcatctcaaacaatcaaagnntgttaacctgggaggcgtgtgcaggaatttttttaattaaattttcgttc

SEQ ID NO: 12094 - DNA, 1550 bp, Heterodera glycines
tatcatggaaatataaattgtataggcgtcgcagaaggatcgagtcgataagcgccaataattttccatttattgttttggtttggccagcttgtataattcttacaatttcagctcattaccccctcaaaataaactgtataagtgttgcggaagtatggagttgataaacgctaataatttccgatttacaatttacttaagcaaatttatacagatacatttggaggaaaatgagctgaaaatgtgaaaatttcacaaagatggtcgtgaaaataataagtcggagattatcggcgctatcaactcaatatttccgcaacgcagttagagtttatatttagatgataattagctgaaattttgagaatttcacaaggatggtcgtgaaaataataaatcagagaatattattaacccgatccttctacaatattgctgcagtatttatttagagattaagtagctgaaattgtgagattctctatttacatttcattatcactttgaaattctcaaaatttcagctcattatcatggaaatataaattgtataggcgtcgcagaaggatcgagtcgataagcgccaataattttccatttattattttggtttggccagcttgtataattcttacaatttcagctcattaccccctcaaaataaactgtataagtgttgcggaagtatggagttgataaacgctaataatttccgatttacaatttacttaagcaaatttatacagatacatttggaggaaaatgagctgaaaatgtgaaaatttcacaaagatggtcgtgaaaataataagtcggagattattggcgctatcaactcaatatttccgcaacgcagttagagtttatatttagatgataattagctgaaattttgagaatttcacaaggatggtcgtgaaaataataaatcagagaatattattaacccgatccttctacaatattgctgcagtatttatttagagattaagtagctgaaattgtgagattctctatttacatttcattatcactttgaaattctcaaaatttcagctcattatcatggaaatataaattgtatagacgtcgcagaaggatcgagtcgataagcgccaataattttccatttattattttggtttggccagcttgtataattcttacaatttcagctcattaacccctcaaaataaactgtataagtgttgcggaagtatggagttgataaacgctaataatttccgatttacaatttacttaagcaaatttatacagatacatttggaggaaaatgagctgaaaatgtgaaaatttcacaaagatggtcgtgaaaataataagtcggagattattggcgctatcaactcaatatttccgcaacgctgttagagtttatatttagaagataattagctgaaattttgagaatttcacaaggatggtcgtgaaaataataaatcagagaatattattaacccgatccttctacaatattgctgcagtatttatttagagattatgtagctgaaattgtgagattctct

SEQ ID NO: 12095 - DNA, 2009 bp, Heterodera glycines
aaaaaatgtaagaaaggaatgtacctcatttgtaactgcaatcagtgaataaagattttttttgctcaatttttggctgaaaattatgtcactattcgtcactattttggacttttttcactattttgtcactattttggcactttttcgtcaaattttagttaactatttcgggatttttcgtcactaagtcggttccctattgatgatattgtcagggagaaaaattcgacgaatgaaacgaacagaaataaattacgaaaggaaaataataatgaaaagtggcggtgaagcagccacttttatactaattttgccaatttttacacgattttacaaaagagtcgttcttatgagttcactgtccaaatgtcaggtcacgctataaaaagcctttcctccactttcattttctttccttcgctcactttttccttccttttgctttcgcaaagaatttttgccaaagctagggatataaaggcattaaaattttttaataaatgtacaacaataacaaattggaaaaacataaaattggtaggagtcatttgtatcacatttagcctacgtcaatgtactgccacgtccatgtaaaaatgccacgaccatgtaaaatcatcaccagtgccacgtccatccatgtcaaaagcccacgtccgtgacaaaaggccacgtccatgttcaaaagccaacgtttatgttcaaaacctccttaatttgaaatggtaatgaacagcaaacacgcataccattcacgcaccaaaaccgtggaggggccacgcacaatcagaccgcgttgctgcaacctggcttctccaagttgtttagctcaacattgatttccacaatgaacggttccaagttgtgggtcttcatgcactcatcatactggtcatagaatgactctcgcagtatgatgggccactttcccattcttttgtgcagcaaattcatcagcagccgtcccaaacgcccattcccatcttctgccgggtggatttgaacctaaaacaatttttctgaaaagaatttaacaagttggggatcccttcccgtttctgatcacttcatgcaccaaaaccgtggagaggggccacgtacaatcagaccgcgtcactgcaacctggcttctccaagttgttaagttcaacgtttatctcaacgacgaaggcttcgatgttcccggtcctcatgcactcatcatactggtcatggaatgactctcgcagtatgatgagcccctttccccttctcttcagcagcacattcatcagcaaaggtgccaaacgccaactcccatcctctgccgggtggatttgagcctaaaacaattttctcagaagaatttgacaagttctcatcccttctatttcttatcacttcacaatttttatttctaggaaggttttttgaaccaccacttttgggattcttttgcattcccggtcatgcggcaattccttcacttttcatttaaagctccctttgcattaaacaactagtcaaatcaatgttttctgatcattgatcagtaagcattttgattttgcatctctggtcaaccgggccatattttattggtctgatcactttactcttcaatcaccgctgcaataagcattcacattcgatcactgcagagttcggtttcatattccgatcactttagcccttccgaaattctgttatttggcgatccctcagcgtttctgatcactgcgcactcatgagtgtggagggggcaacacagtgcacctgtttttattcttaccatttgggggtcccatttcattctgagaacaaagcaaatcgatatttttctgataattgatcactaagcattttgattttgcatttctggtcaacagggccatattttatgggtctgatcactttactcttcaatcaccgctgcaataagcattcgtattcgatcacttcagagttcggtttcatattccgatcactttagcccttccgaaaattctgttatttggcgatccctt

SEQ ID NO: 12096 - DNA, 3942 bp, Heterodera glycines
gatcactttagccctttctaaaattcgttatttgacgatcctttgtttttctgatcactgcgcactcatgagtgggggagggggaaacacagtacacccgtttttttaaccgtttttttaagcattttgattgtgcatttctgagcaacccggccatattttatgggtctgatcacttttgttatttcattcactcttcagtcaccgctacaacaagcattcgcattcgatcacttcagagttcggttttatattccgaacactttatccctttctaaaattcgttatttgacgatccatcgcgtttctgatcactgcgcactcatgagtggggagggggaaacacagtataccccttttttgtgcactatcacttttagggtcttttgcattctgatccttttactctgttttcgtttcctatgtttattttgcattttccctatcattaattaattaggacttaccaaacggaaatgcgctgttgccgcaaatctcgccagttcgcctccccggttcagcttttcctcttcctctttcagccactgacagaaatccctcatggcgtccgggatttccctcgcgagcacgccaatcggttcgtctccgacgtacaccgcattcagccggtagacgcctgctgcagcctcacgccctttttcaataaccaatatggcgtgatgaagtgtcataattgtcttaaaatttggattctaatttattcgtttgctaaaaatacctgtgcatcgagttccttggcataatatatttcattctcaagacaatgaaaatattttgcatcatctttgaacaggcttgattgttcatttggcgttttgatacgagctttttcttcatctgctctgacgcgcgccacgacgagcctgcgcgcttcatcatagtcttcatcgctatcgaacaaatcccttggtggcaattcgtcttccattttaattgattgaaagaattagatcgaacaaaaaaatgctaaatttgttctttaaaaaacgaaaccggatcaaaacggcggagaaaagtgatgacatttcggtcgatgtaactgaaaatgaaagggaaatcttgcaaaaattttatatttgccaattttactggatgatgaatttgcgcgtcttgaagtgttcgtccacgtagaagttaaaacggtggctgatcatcgcaattccaaggccaagttgtgaagccggaagcagatcgtacacacaaagccaacaatcggcggaaatgaaactgaaaaaaggagaaaaaaaaatgaaattgaaaattggcattttaattttacattgcttttgccattttttcctccgcttcttttcgtttgtctgacattttgttaaggggaaattattaagcacagtttttgaaggatttaatttgcttattagaaaaacagaaaaaaactgtaaaatcaatgtttcatttaaaacaagaaaatccgagaaaagcaaggaaattctttgcggaagcaaaaaggaaggaaaaagtgagcgaatgaaaaaaaatggaaggggagtgatggcttttatagcaatgcgtcgaaatacgactgattattaaaatcgtgtaaaaattggaaaataaattagtataaaaagtggttgctgctccgtcatttttcattattatccattcttttcgtcgctttcatccaatttttctacctgacaaatttcttcaaaaatcactttgtacgttttgtgcatttcttttcggcattttaccttaagtggttgctcctcctccgccatttttcattttccattccccatttaattttcatcttttggtctgtaggatgtttttgtattaatgaatcgagtcaaaaattacatttcgtgtaaaagaaacggtcgatttcacataattttttcatctttgctaagccaattgaaatccgaaacgaaaactgtcttaataatttccactcaacaaaatgtctgacaaccgaaacgaagcggagcaaaagatggcgaaagcaatgtaaaattaaaatgccatttttaaaatttcaattttaaattttgttttcctttttttcagcttcatttccgccgattgttggctttgtgtgtacgatctgcttccggcttcacaacttggccttggaattgcgatgatcagccaccgttttgacttctacgtggatgaacacttcaagactcgtcgctggaatctgggatcgatgaaaatcaaaatgaagttcgaagcggatggcaccaaggaaatggatgttgtcaatgccaatttggaatcgtttggaattacgcaaaagccgttgccaaagagagtcgtcggattcaaagccatttcattgaagcgagattttgatacttttctgttttgtaaaacgattccatcatttttcacaggtacttcaacaacaatgtcatcacttttctcggccgttttcgtccaattttggccacccgtcccattcatttgaccatcgacgacacatacttcgatgaccgcactttggagtcgatttggcacaacatttggcccatgatcgcgacaaacattcgtggcatccaattgtccaaacaaagtttccgcagtttgcgcaaattcgtgccgtcaattctcgacgactgtccatcgcttcgcgttgctgccaattccaatggtttcttcaccgattttccatgcgatgacagtgccgcggcttcgaatggacaagctgtggccaaatggcttttcactccacgtccggacaatgtgccaaaggtgttcaaatgctggttgaactacggtagctggcatttggagccagagattgaagacttcaaagcggtgatttcgatttgttttatttggcatttttacggtctttggcgcgcactgacaaaataattatgtatatccaaattggggcaccaaaccgtaaaattcatttatcatttcgtatttcttaaccaatttttccctattttaggaattttacacggcttcatctcccgtcaatttcatcgctgtcattcgcattgatttttcttatcatcgtcctctgccatttgtgctgaccaacgaattgacccgggagcaattgatgttgaagaagatgaacgatatcaaccgtgttcttctgatccgttgtccgattgtgcgcgacgaaagcaaatgggccaaatgggagaaggaagcgattggatggaactttatggaccagtggaatcggatcgacatttgagatgggtcagtaaatgaataatgcttattcaaatatccaaatttattgcttttcgatttttaggcctcttgacgcaatgatcgatccaagtgatcagaagcagaaatgattgaacgatttgttgaaaaatgatctatttaattgatgcggagttggataatgaatttgagcccatctgatgtatataaaattgttgttttgttgcgatgatcacaaattgtattctaggaaacgatgatgcacaaaatttggtaatacgaccgatggtaccccaaccgccactcccttttctgaaaccatattttgctttaataatgtttaagacaagatttgagaggtcctaattgccaagtaggcaaatggcaagaaaaagcactcaaaaaagaaaattgacgagaatttaagatacgctccaggggtgtgcgaaaaccacaaaacaaaatttcgaaaacgaaacaaaaatatttatttttcacgaaaacgaaaggaaattaaaaattttaaaactcaaaaacgaaactcaaaaagtgatgaaaaaaggggacgacacgaaaacgacacaaaatttcgtacaccccatttttgttggcattagaacggacgaaacaaacggagatggcattggccaaccaaaagtgaaaagtgataatttgaaacactaaaatttgattccaaactttaagattggccaaaaatcggcggcaaatggcaagaaaaaacattcaaaaaagtaa

SEQ ID NO: 12097 - DNA, 1116 bp, Heterodera glycines
  unsure (1)..(1116): unsure at all n locations
tcattcaagtctaatttgctacataatacatatcaacagaaattccatatgaatagattataatttcatttttgttcattaaagtcaaaattaattatttgttacatgttacatgtaaacataactcccttgggtccaccactataaatatactggaaactttcattttttgttcattcaatcctacaattgttatatgttacatgtcacgtgtaaatcaaattccatataatattttttcctttgttcattcaagtctaatttgtttgcatattaaatgtcaacagaaattccctatgaatagattataatttcatttttgttcattaaagtcaaaattaattatttgttacatgttacatgtaaacataacttccttgggtccaccactataaatatactggaaactttcattttttgttcattcaatcctacaattgttacatgttacatgtcacatgtaaattaaaatccatataatattttttccaattttgttcattcaagtctaatttgctacataatacatatcaacagaaattccatatgaatagattataatttcatttttgttcattaaagtcaaaattaattatttgttacatgttacatgtaaacataactcccttgggtccaccactataaatatactggaaactttcattttttgttcattcaatcctacaattgttacatgttacatgtcacatgtaaattataatccatataatattttttcctttgttcattcaagtctaatttgctacataatacatgtcaacagaaattgcctatgaatagattttaatttcatttttgttcattaaagtcaaaattaattatttgttacatgttacatgtaaacataacttccttgggtccaccactataaatatactggaaactttcattttttgtttattcaatcctacaattgttacaggttacatgtctgtcacatgtaaattaaaaatccaataatattttttcctnntttttgtctttcagtctatgatacatgttacattaaacacaaattccatctatcgtttttacatggtacataaaaacatgattttcatatgaatagactttattttcatttttgtttattaa

SEQ ID NO: 12098 - DNA, 2306 bp, Heterodera glycines
  unsure (1)..(2306): unsure at all n locations
agatttatcgttttncactttttctatacaaatgtatcctgctgagactgtagtcaaaaataaaacaaatttcttagataaaattctcattttgttgtgggaaaatctgctaactaatgccggatttgagtgccaagatgtaaagctgcaggatcttctttagcagaattctaaaatggcaaactcatctgcaatgtataagaagcctgtgcttttcatttaatttacaaaatattaccaggcttataccatttagaacaagttttttaaaaacaagctttactgtcgactaataaaaaataaaataaaattcgtttttttggcccaagaagtgccatttatccatgtaacgaccattgtttcctcagatttctatgaaaagaaatgctatgattaaattttataacagagaatttatcgcaacaaaatccgtccccaatttgttgagtaaaaaacaatcggtcacccccaaatgacatcaatcgcttgtgaaaaagctgcacacacactccaattcctgctcaatctgtgcatcgttcagcgaattcagcagctcccccatttccaatggcactttttcattgtgcgcttttggtccatcaatcacttaattatggatttagaaaatattagctaattcagctctggtggtacttccggaaactgtcattatttgttcattcaatcctacacttgttacatgttacatgtcacatgtaaattataatccatataatattttttcctttgttcattcaagtctaatttgtttacataatacatgtcaacagaaattccctatgaatagattttaatttcatttttgttcattaaagtcaaaattaattatttgttacatgttacatgtaaacataacttccttgggtccaccactataaatatactggaaactttcattttttgttcattcaatcctacaattgttacatgttacatgtcacatgtaaattaaaatccatataatattttttccaattttgttcattcaagtctaatttgctacataatacatatcaacagaaattccatatgaatagattataatttcatttttgttcattaaagtcaaaattaattatttgttacatgttacatgtaaatataacttcctttggtcctccctataaatatactggaaactttcattttttgttcattcaatcctacaattgttacatgttacatgttgtcacatgtaaattaaaatccaaataatattttttccttttttgttctttcaagtctatgatacatgttacattaaacacaaattccatctatcgtttttacatgttacataaaaacatgaatttcatatgaatagactttaatttcatttttgtttattaaagttcaaatttgtagagcttacatctaaatattcctttggtccagccccaataaatactggaatttattttctccattcgtctaattttgttacgtgttacgtcatacatgtaaatacagcctatgtaatagagcttcattttatcgggcgattgtagtccgaaaggtttacaataattccttatcgttaacggccaacatccggtgcgaagctggtcccgcactttgccaagaccagtggactggtgagagttaacgtaggatcaactgaaagaacctgctcataaccgagctatgctatcagcattaaactaacaaacgctttatatttgcttttgatttttaaagaacctgctcatactggagattgtgtgttctttattacattactaaccaacgcttattgtatttttgctttatagttttataaagaacctgctcctatcggagatagtgttttctttgtttatttgtaaccagtgctttatatgtgctttgtgctttttcaagaacctgctcatactggagattgtgtgttctttattgcattactaaccaacgcttattgtatttttgctttataatcttataaagaacctgctcctaccggagatagtgttttctttgtttgtttttaacccatgctttatatgtgcttgtgttttttaaagaatctactcatattggagattgtggattctttattatactactaaccaacgctattatttgcttttttattatgaataactctcataatggaaatggtttgtctgtggccaatacagcctgcctaccctcatgggattttgggcactcagactggcctctttaagtattggtcaatctttacactttccatagctgcactcaatgtcctttttggcaaaataagataggtgagccctgactgatagatttcggcaacggctaca

SEQ ID NO: 12099 - DNA, 2050 bp, Heterodera glycines
tcaattttgaaaaatttatgtccatattttgacatttttgccattttatgtccatattccgcgatttttggtccatattttatggccatattttgcgattgattttatatccatatttttggcatccctattgataaatctcctacctctgttcttttcctcctctgttccgccgctactttctccgatttcattcctaactctaacagtctcgcttttcatcacttcactccctttctccatttctctgacaacctgctccgcaaatgcctgcactggacaggcttttccgtccgtttctctaacagtttcattctcttcttcatttccattctttttttctctattcatttcaacaattttctctcccatttctttgaatttcttccctttctttttctcttttcgtccttcactttcttcaacactctttcccttttctctaacagtcttctccttgattttctccttcagtctgtcattttcttttgccgcttcctttcctttccttcctctaaccgtcttttccttctccgtctcgcactcttcaatactttcttcaattgtttcggtgtctcgcttttctttaaccgtctgccccttatgtttctttgaactcatcttttgtgtctttgcttctccgctcccctcctcgtttgccacaatattttccttcttgaaatattcagcaaacagttcaatttcctttgaatccaaatcatcgacgagtttcaaactgctaaatctgtttatcattttatttggcatttgcgacgaatttgaagatagaggagccctattcaaatgttgcgggtttttatttggagtaacagcgagaactgtgccattgccatcattttgagtcgtaaaattaagaaatataacggcaaaaaatccaaataaaaaattaatgaaactcatcttaaaaatattttttttctgaaaatctttaaaaattagcaaatacataaaagcattaaatcttaataaagccaatcaaatcaattcaatgaatggcaatatgcattaagaaatattttttataaggcaaattgaaagacatgtgatgtgacgtatatatgcttttatggtggatagtccacaaaatgaccaaattttgcgtttttgagccacttccaatggtatggctacgcccttggcatttatatccccaaaagcgttggtcaatcgcaaaccttgaaagcatttgtttttttggtataaaaaatcaaaaaatttatcaatttaaaatttttgggtcagataaaaacggcaaccgaaaacgacatacaagagctgcacagatcgcagtgttcttgtggtacgcctcaaagatggatggacctttgaacatttctccatattgacttaaaatgcttgttgtttgcccttaagcaaggctgaaatattttttaaaattaaagtttccaaataaaaaatgtgtgaatgtgaggaaagcaataaaatataaaagggaaattttactccaaataaaaatgtgtgaatttgaggaaataataaaaataaaagggataattggtttaaaattgtaattaactcatgtaatttcaaattgtaatcatataattaattaaaggtacctgtaattaattaaaggtatattgatttcttattatgatggttttttaagtatcgcccattatgatggtttttaagtatcgacatagcaccaattgaaagacatgtgatgtgacgaatatatatttttatgatggcagcattgtcaaatattattgcttttaattcgccagtacataattaggcagcgataatttcaattaaaagcatatttagaagtttgataatgaagggatagaaaaccttttaaaaacactatttttcataacaaaggaatattcattctctatcctcatagaaggctaccctaaaaagccttaaagcttaaatggtgttgaatttgatcatatcgccgcaggtggcaaaacagcgcctaaaggcaaggaaaattttcgtaaaaatcacttaacctctgaatgatagagaacaaattctctaaccttcgtaaatt

SEQ ID NO: 12100 - DNA, 2766 bp, Heterodera glycines
  unsure (1)..(2766): unsure at all n locations
atctgttcaccgaggaagtgccacggagggtcatctcccagctggtgcccaaccaaaattacattgggcacaatcagaataaccccttttacttcaaccaccacaacgtaagtgccgctttgacatgtatttctggcagaaaaaaaaatgttcaggtgcgggatattgaactgaccgcctctggcaggacatacccacagtttccgtacaacttggactacaagaacaacaggtacgcaagggcgtaccatgacacccaggagcaccttggcatggcctgtacaactgagagcaacgggatcagctacagcatgttcaagactgcctactgcctctatgtcttccaaatgaccaatgcgcaggaggactcgccgggctttgagctgatcaaggagggctgtacagcggtgaacattcggtttgccgaagcggttccgaacgagggggtcactttaatagcctatgccgaggctgacgggctcattctgattgaccggaacagatcaatcactagtgaccttacagtatgaatggtgagaattattcctccgattttgttcaaatgccctcctccaatgctgcacacgaagggattgtactgtgttttccggatgtgatcgagaagtcgccaatcaacttttttctctgcctcatctacctgtttggtgcagcaggtactgcggctgcgggattttacctgtttttgagggagaggcggattcgtcgcaggaatggacaatcggttcatcgacagagctctctttgagaacccggcgacgagaaaatattttgttggcacatttccggccgaccgattgccaaagtgcacgaaatttccctgcagtctaattgtcaatttggtgagtgccaaaaaattacattaaataaaattttgccacttcaggacccgtcgggaatgccgggaacccattggtgcgcaatatgggcgcgttcgccgggggtggcctacttttttgactcctatggcgagatgccaaacgatctgatcaaaaaatatttggcaaataattttcggaaaatttattttaatcgaagaaaatttcaatcgattttctctaatgtttgtggtcattatgttttagtttttatttattttatgtccttaggatttgattttgagtttattatgcaatttttgaaaaggccaagtaattcggatgaatttgtttatgaatttgtgaaacacaatatacaataaaaattattttaaaattaaatcaatcatcatcttcataggaaacgggaacaaaaaatccaaaaaaggtaaaagcacatgacgccaaaaacgattcaaatccacataacccattgtatttatcatagtgctcaatcatcacgcgtgtacttgttccgtcttcgttttcgatgtgtcctttcacctgtggggttttgttttatttatttatttaattaattgacctcatatttttaaaatacctggaggcaatcctcaaactcgaaaatgtagagccgatggcctgagcccactgattccataagaacacaggcatccaggtgctcatcgcgccttgagctattttaaataaaaattattaagaaaattttccgtgacaaacccaagccgtggaaccggcagaacacaatcatactcttgggccgttcgctcaataaaacggatgcattcggacaagcggaagtcttcgtttgccatttaaataaaaatttcaaaaatgaattaaaattataacataaaaatgcggatcaatattttggttgtaaacaaaaaaataattaaacagaattatgcaaacaatttactgctctgaataggcaacaaataaacacattcaatggcacatcaagaaacaaatgccaaaagtgcgcaggaatgtgcaaaagtgatcaactccgtttcgcttatcgagatacatcgtctcgatgctcatcacaaattccccttgcttcaccacaccgtcaacctgtatagcgctaccatcttccgaaacgtagattagccgcggtttgtccctgtgttcgaacacgtatcgcttgtgctgctcgtcaaatggcacaggtgtctcacagtcgaacagtatggcaaatgtatgaaatgtggccaaacagtcggcaagtgcaaacgaaaacaggcccatggcttggcaaattccctaaacaaaatcaacaattagcataaaccaaaatggaaaaattaaaaaatttaaataattcaaaacaaaacccactccttgtgacagacgatccaacatctcaagcagcaccggtgcttcatcttccacaaactcattgcgctcttgtgccagcgggtacggtccatcgagtacaggtggctgcgagttttcgtcacggttttggctcatgatttgtttttgtgtctaaaattttaaaaattaattctttaaatttgaacaaatatttattttgttgaaaaaacacaaaatggtaaaaattgggacaataaaaaaatttttttttttttaacaaaatttggagtgatagatgcaaaataattcgtaataaatggacaaataataaataaattttggcgaattattatcagactggtgtcaaatacataaatgaatggcacagcggtttggcgcaagacaattccagacaatgagcaggtgtgagggaagngcaaacgtaagatgtgaaattaaaaattattggtcaaataancaaacgcccacacctgaaanggtgcctgtaatattttttgagagataaaaaattacaagacaaatcaataataaaactaaaatg

SEQ ID NO: 12101 - DNA, 851 bp, Heterodera glycines
tttaaaattagtattttcatggtcgctgatcactaatataatgacatttattttgacactgattttatttgatcataaatttgacataattacatatcattaatagggatcggatttttagtgataaaaaatcccaaaataattaactaaatagtgaccaaaaaatgccaaaatagtggtaaaaatagtggcaaaaaagttccaaatttaggggtgtaattttttaaatagctgtttttaatttgaaaataatttaaaattaaggaaaaagattttattcactgattgcagttacaaaatattttcttagaaaatattgaacaagaaaaaaaaatttgggggaagaagttttgtgaaatttttccaattcttagggatgtatttttgaaaatttttaggtcgattcttaggggtgtatttttgaaaattttttaggtcgattcttgggatgtatttttcgtttttattgcattttttgggaaattttccaaaaaatgctaaaatagtggcaaaaatagtgacgaaacgccaaaatagtggcaaaaaactattttagtggccaacttccgaaatagtttttttttagttgcgaagctccaaaatagtgattcctagtgatgaatagtggcactaaaaatgaaaaattttcgaaaaagaatgtgtttttcgtgcatttctcgtcgagttaaagccgcagaaaaaatagttaaaaaactaagaatccgatccctaatcattaaacgtaataaaatataaatcattaaacgtatcagttatgacaataaattgcataaaatctgttcaaattcatttccatttggttgaatcgttgatcagattacatcagatga

SEQ ID NO: 12102 - DNA, 3870 bp, Heterodera glycines
tcccaaattcagatttatacagtgaattggtcgcccctctgctgaagtcgtccatctacgtcgaaacttggctggtcggcagaggcgacctcccctccgattgctcctcttcatttaaggcgcattcgcacggattgccttagcatttgtgccgagtttgctaaaacacaacaatttgcaggtgcacaatgtactttccgtgaaggcctcaaaattcgcattcaaaaacactgaggatcactcaaaatgggctgtcagtgaaagtggtcggtggacgtgcattggggacatcaaccggcaacagtcgcaggcgcgccgagggggtgcgttttgtgacggatctatcccataatggacagtaccatcagcaggtggcactgtttgcctgtccaatcccaaaattgcttctctttaccaatctgccgttgcgggggccgagtgttgcgagggagagagtcattgctaatgaatgattggcttggcagctactgtataatgccgaaatgcattctaatgtatttaaattttttttttctcgcggcattttctattcattgttaaccttaaatcggtcagtttttaataaaattggtactttgataaacattactaaactatatgtacttcccttgttttttaccacattgcctttttgaaaaaaaacatatatcttcaatacttattaatttaattattcgtccattttaattaacctataaagaaataaatgattgacacaaaaaccgacggagttggaaatgattcagtgaaagacttttcaaatatggacttggaagatgaagtgatgcgacagaagctgggaaatcagcaggacatccgtgattatttgacagagatagaaggggagctgaaaagggcggaggaactgaccatcgacgattgtattggccaagcggacagaatcgcggaattggcacgggaaattgacgagtgtgacggagcattggaagtgggcagggggtggcgcattggggaaggactgctgggaaaagcccgcccccgcagggcatcgaacgaatgttggcgacttttctcgacgaattgggcacaatcagtgccgacatgcagcacctgaagcagcagtctatcgagatcaaccatcagctgcacaatcggcagagagtgcgcgccgagctgagccaagtgaaaattgggggaagaaaggggaccgactgacggcaaaggaaaaaagagaggggggggggaacgctttacggtttttacagcttacaattaggttggctttgtgcttaaaatattctcattatgccactctcttcagttcgtcgatgatatggtcgtccctcacacgatgataaagtgaatatgttgtcccttttatggctgttaatttggtgctgctgaagttgctgcccccaccatttttcggaaactaaatttttaacgggtgaaaaacacctttcctataaggaacggcgtttttaagatttaaaatcctagttttttttcactaaatcggggggggggtggggtcagctccaattttacaccataaattcctttcttcccaggacaatcattgagagggaagtgaacagttgtgagtttctggagcagttgcacgaactgcagcacaaattgcaattcatcaagacgcagcagttcaaagacgccaaatcggtgggcgatgtgcacgacgtggtggagaatttgaagtataaagcgatggagaagatcagagaatggcttttgctgaagatttcgctcttccgaaagcctttgaccaattaccaaatcactcaaaatgccctcctcaaaaatcggtgttctgacgtcagatcccgtcattacattccccgcaccctttcagcttcttttacgaatttctgctcgcaaatgaccggcaagtggcgcgagaagtcaaagacgaatatgtggacaccaccagcaaaatgttcttttcttatttcaaggcgtacgtttcccggctgtttaaatttcaagtaaattagcggcctttatcacttcgcatcgcattctgttgagatggtcgactctgcgacaaagtccgatttgctcggggccgaggacgtggtcaaacatcccacgacaatctccgcattgccgagtcttttcacttccggcaaaacccaccaagtcggcattgacaatggcctgccgttcacttttcggatcggttccgttcctttcccatttagaaatgaaatttcactttaaaaggagcacaaaattagttggtttttttatagtgtcagggtctgatgcactttacacagcggcccaattttgggctccaagtacaattatgctggatttttcgtcttagtggtctgtgagttagtcaccaaaaggggggtcccaggttcaagtcctccctatgttgtgtgttaatttcaatttcttcttttaaagaagaaggcggaattattttttcattaataaaagttttcgtggcaataaaaaatcatattcaaaaagcgttggttacgtacaacatcgacaattttatgaattttttttagcttataacttggtgaatactagagcaaataaaaccattttatgctcattttgaagggaaaattctggagaatattgtaaattttatttggtttggccttaaattgtggacttggctaaaaaagaattaaaattattgaaatgtttgcccttgtaaaaaattttttcctattgtttaattttcttaaaattttgcataggccaatattttgacctcctctagcgattccaagtttattttatggaacttaagtttttaactcgagatcggctcttctaattttacaagggaaaatcccaaaaaatttttaagtttttgcaaatggcgttctgattactaaataaataataaacctatttgcactgagagcccaaaattgggccgctgtgtttacgagtccaaacgactttttatgagacccttccctaattatttttatttaacattttatgcatatttaaattctagacgcgaagtcgagcgacggttttttcattgggtcatcgccaaaatttgctgctcgatgatttgttggctccgctcattgtgccccacgtggcgcaggaaaataacgaaacggttttttatttatttagaattggtaattaattgttttactatgtctttttctaatttcagttccaattcgaaagtctttttcggagtgttcagtacgctttggtcgaccattgcagtcatgagtttctgttcatttgtgattttttcatggtcaatggtcagtcggccatcgatttatttacttcagtgatgggtcggtccatcagccttttattggtaattttctaattgttttaatggaaattaatgatcgtttttttctagaaaacgttggaagaaaaaattgctgccaatttcgatgcgatttcgctttttctgtgcatttgtttctgcgcgaaatttcgcgaaatgatgaccgaccgtgccgttgtggtcatcaatgggtgcgcatttcgtttgacagattcactgacttttgttcagttattgggatgctttggtcggtttcttatgggctcggttggatgccgtgatgactgcccacagtgacagcgtaagggcgatcgatgtgcgcaaagtgccggtggactcgcgtccccactacgtatgccgaagatatgccgagctgatctgttcgctgttggtgtgcagcgagttggcgtacaaagtgacggacccgcgacttcaagtgggaaaatagcaacaaaaaaaccaaaaagtgcgctaattgcaaaaacaaactcaaaaaatgtgcataaatcatactgtgcaaaggtgggggtcagccaagaggtcttacgatcgactggcacccccgcgggggggtc

SEQ ID NO: 12103 - DNA, 993 bp, Heterodera glycines
gaaattcgccccctccaacttctccccccccccccacctcttacgatcgacaagagagcccccccccctatctatccccttgcacaggtatggcgtaaattgcagaaacaaatgcaaacccttcagaaaatcctttcgcgacagcaagcggagattgagggactgttgacccgacttgccacccaactgaaatcgaagaaggaacggctggtcttccagataaacaattacgacgtcgttctcaccgttttaaatgtgcgcaaaccaaaaaaagaacattttatttgctttcagaaaaagggttttggatttattttccttcaggaaagggttttggccgattccaaggagaggggcagtttttgggaattgcagcagaccaaaatgggcacttacgtcgaggaaattctcagcccgcactttgccccgctcattcaattcgtcaacgaatgtgagccgcttgtcgaacaaaaccacacccaactgctcgcccgttacacgggtaaatggaagaaaggcgagggaaaggcactgacattttgccagggaaagtcgtccaaattgtgcggacattcagcgccgagtggcgaagatcgatcgacgcaataaacgacgaaattttgcattcgtttacaaattacaaaaacggcgccaacgttttgcaggtttgacggattggcatttcgcactcgaaaagccctctccgtttcagatggcattttcccaattcatcagttactaccaacgattgagcaaagttctttcccatgaagtttttcaaaattgtcaagcgaatgaggaattggtctcctaccagcacatcactgaaacaatcaaaagatacaaaccggttttctgacttctttccttccttttcattcttttggttgtgacttttttatcattttatttaaaaagggtgcaagagaggggggtgaaggaagaacgagaagaagaaaaggaagtgagagaaaaaaagtcagcagcgaaaaa

SEQ ID NO: 12104 - DNA, 2989 bp, Heterodera glycines
cgctgcccagcagcagacgacgacgactgcggatgctgcccctaacactgacgcaaccggagcggcgactgtgacaaccgacgcggcgaccactgcgactactccaccgacaacgacgaccgcggacggagcgacggtgaccaacgccaacgaacccggtgcgactacggcgaccaacactgaggcgcccgctgcgactactccagcgacaacgacgaacgcggatggagcgacggtgaccaacgccaacgaacccggtgcgactacgacgacgacggctgcgacgaccaatactgaggcgaccgctgcgacgacaacgacggcgattgcggatggcgcggtggcgactaacactgacgcaaccggagcggcgactgcgacaacggatgcggcgaccaacactgaggcgcccgctgctgcgactgctccgacgacaacgacgacgaccgcggatggagcggcggcgactaacactaatgcaaccggagcggcgactactccgacgacgaatgcggcgaccaatactgaggcgcccgctgcgactactccagcgacaaccgcggatgtggcgttggattagcatcatgacacaacaacagaagaagaataagaaattgccatttatccgattgagcatttgaattgtacatatgtatttcgttgatgtgtgtgtatcatgtatcaatcaatatctgatcacttaaattgtatgtattggtgatattgcgtgtggatataaactaatcaaagtcttgtaaaggggaccaaaaatatgaaaaaaggcgtcaaattttgctagtaaatgtttttaaaaattgatttcttccgcttaataccaatagctctgtgtttctcatttttgcccaccgatcagtgatggatgagtgagcctgaacttagagagagagaggcatacagatccgcttttcctgtccagatcagctagagagaggacactgatcaaagctaacctgataatgtcattaaattaattttgatagaatctgaaaatcacggactccactaattacctctaaataacacctacagaaaaaaagcgacaaaaatggtatcattcgaaagcttaacatgtttcgaatctaattctatgtgtcacttcgcgattagacaattaccaaaaaagttatacatgaaaattgcgaaaaggtcgaaattatgatgttttttcttaataaaattttttccaggctagaaaatcatttcgttttttgtaaggctaatagagcatatgaagagctttcgaatgataccaacaatcttggatttggatgcaaagaaaaaagttatagcgaaaaacataaaaatttttgaaaatctgcccacagataacacacaagtacctaaaatttgtcaggattcgaccgttttaaaaatccgccgaataagtcaggagttatgcctgaccatttttttgatgttgcaattggttgtaacaaattgtagcttgttttacatacatacataattagggcatccaaaaatatgcacataaaatcgcaaaatatgcgcataaaatatgcaccaaaaatcgtgaaatatgcacataaaaagtgaaaaatatgcacataaaattttccaattgagggtgtaatttctcaaaatttcttcaaatttgttaaccataaagtaaaatcttcaaaaatggctaaatgtggtattaaaaatcattttaggagaaaaaaacacgatacagcttaaaatttactcattttagcgaaaaatcacctgaaaagcaaaattttgcttatttttgacataaatttattaatttttaagaaaatttaaatttattcaatattctcgagaaattttggcgaaaaaatgattttttggaaaattttccggtttttgaggtcaaaaaggccaatttgtctgttgggggccgatctattagaggttttttggaaaaacgccaaaatatgcacataaaatatgcacgaaatgccaaaatatgcacaaatatgcaaatatgcacataaatcgcgaaatatgcacaaatatgcaaaacatgcatatggaaagtcatcctagaagcttcaaaacacgctaaaaacatgtttttcgtgcgtttcaggcctcccacagtccaggaaaaaaatatgcatgtgcatataattggactccctatacataatcatttcttctgataaaattgcgaaactcggaaataatgattttcgactttatgtgctctaaaccgatttgtaatttgaaattggtaaaattatgaatagggctgtgaattttagtgacgaaaaatcccaaaatagttaactaaaatagtgagtaaaaatgccaaaatagtgaagaaatagtgacaaaaagtccgaaatagtgacgaatagtgacataattttcagccaaaaattgagcaaaaataatttttattcactgatttcagttgcaaatgagtagggctgggatttttaagaccaaaaaacaaaataggtacataaaaaaataatttttaaaattaaaattcttgccacaaaaatacctttttgagaaaatttttttcatttcttaggagcgctttttgaaattttttttgtcgattcttaggggtgtattttttggttttattgcatttttgttaaggaattttgcccaaaaatgtcaaaatagtgaaaaaatagtgacaaaactccaaaatagtgatttttaactattttagtgacgaagtcgccaaaatagtgatttctagtgaccgataatgacatcagaatcgaaaatttttaatgcagaaatgcgttttttgagctcctttcttcaaatcaatcgagcaaaaaatttagttaaaacctaaaattcacagccctaattatgaatgtcagattcatgctcactgatttgtgaccccgaaaacgcctcacaaaacaaattttatggcattgaaattggtgatattcttatatgtataataaatacactatcaaaatttatatttattagtacattcataatatat

SEQ ID NO: 12105 - DNA, 1094 bp, Heterodera glycines
gctttggcagtcccacaaccggcagttggcaaagcacccatggctttggcagtcccacaaccagcgccatttcgtcgagcagcagcatcggagttaatggtggtcccacaaccataagtttgcggagcagcagcaccggaggtcgtacgatgatttggagatgaagaagcattggaggtcgtacgacgaggtcgcgaagaagcatcggaagttttatgacgagatcgctgaacgagggggggggggggaaatggcggaaaaattacataaaaatgggtggggagaaaggaaatccccgaatttgaataagtcatctcgtcgatgagggaagaaaaagctgttgacgaattggaattgtgttgtgatagcgcaacagagagcaaagaggagaaagggaaatgtgtaacccctaaaattaattgcaacaattaaaattagggataaagccgatttgaaaagagtgaaagcggtaaaagcaattttctattgaaatttaaaggggagggggaatatctgaagacatatgtacttttagcttagatttgcatccaaaatagtgtacaaaacgaaaaatccggaaatttatgcattgatttccctattctgtgttcttctatgccttaaaatttttttgaaaaaactaacaataagcgttctttttgtttttcaattaaacgctctaagtaacaggggtggagcgcgcacagaaaaatcccgcgaccgcggatcgcgcaaaaaaaaaacgccgcgaatcgcggatcgcacatcgcgcatcgcggctaaaaatgtgaaagactcaaaaattttctcttgtgcgtcaaactgcttagcactcgcttagaaaaagattctcctttttaaacacttttttacatcaaatttgttcggcttagttgagaatgaagaagttatggttgatcaaataaaaaatacaaaaaaggaattacgagtgaaattttgaattagcgtgtaaaataacgccataattaaaaatggcgtaattttttgcgcgctaattctaaatttacactggtaaatgccttttttgtatttttattttgatcagccataactcgctttatttccaactaaac

SEQ ID NO: 12106 - DNA, 3899 bp, Heterodera glycines
cacaatggggaataataacattaacctataaatcacatcatctgaattgattttatgcatttcatttttcaaaatcataacttgaaattgaagaaaaatccttttgcaccttttcagagttgccaatccaatttccaatttctctgcaatttttttgtcgctaatttttgcgttttttccttaatttcaaaatattgcttcaccttttctaaatatcttcattggtattattgtgtttaaaattagtttttattaaaaaaatatcaactcacttttttggtgcttttgaaccaattcttttttccatttccaaaatgttgcttcagaaatgcccaattctttcacaaattctttctgtttgcgttggctaaaaaatgttttaattcatcaaatcgttcaataaatttgcgctttttgtgctcataaaatcgctttttaattttgttttaatttaaatttaattgatttttccattttggtattaatttccgagttgcgcctaagaattttgcaatttttgtatcaattttggaactgaattgccatggatatttttttttaatttttcttgaattgcttcaaattttaaaatcctttctctttttttggtgatcatttggaccgattcattttctccatctatttgatctatcagtgcattttcattttcgtcattttgttccgtgtttatcacttttacttcaattacattttgtcatatccatctccaaatattttatcaaaatttggtcgtattttgtcggattcaattataaaaaaaatatataatatatatttaaattccataaattcatttcattaagagaaatatttttgtaaaaaagaaatatatgtatatgcagaaaagaattattataatcttaattaacattgaaagaatagtagcgcggccgtgcgcagtggacgtgctggcgttgggactgggcaatttgggagggcagatggggaacattgggaaggaactcataaactcccgaaggaagggccccatgggatgatcaagcccagggatcccatcccgcctttgatggacacactgggataagtggctttattccggagagactgaagatacttcgcttgaaatggcgaacattaaatacacgtgaaaaataaaatgtgatcgatcaattatcgtcgggaaaggggcgacaataagcaaaagggaaattaaatgcgaaatgaaataaatgtgagaatgtgaaattcatagggcttcggccggcaaacaagaaaacccggatctaccttacacctccaaccttaccaaagaccgtccctggtctcttaccaagattttcgcttcaaaattcgcataagcaaagaaaattatttcaaaaataattttgctaattttcatgcactttttccaattttaaatcaaaattttatgcttcgtgtcactcactcccaaccttacattggatcgtccctgatccagttcaagactcaggcatcactggcaaagtgcccagccatcaacctttgtctgcgagaactgatcaggacttttttcatttttactgccgaagcacatgaaaaaacaattcccaaagtttgcctatgaagcatgaaattttaaaatttttaattacctaagtaaattagcgaaattattttaatttaaaacctagacccccaaaatcaaaacacactcattttccttgccaaagcccccttttccactatctctcttattcctctcaatcaactccggtcatctcgccgtctttcttggcattgacatgccacgtgtcccgttcgtccacaattgtagcactttgtagcgcttcctcctcgttcgccgcgtgtgaatgtcgtccccgtgaattgtctccagcttgtgcttcgccaattttcatcgcgtcttggtgccggtccaatgtcctccgttgccaatcgcttgcgttccaatggtcggccgacagtcctgaaaatgggaagaggggtgttagacctgttttctgtaatagaaccactcggttcatcccaccaatttcgttcattcgcttcagtgttgcccgcaatctgaaatggaatagggagattagggtttaaaaaaacaacacaattacctcaacctttaaatgaaccctcaaaattttaaaagaatttattttactgatgatttcctaagaaaaattcctattacctttcatttcgcgtacttcaagtgctaagtcttcaatcatctctctcaattgttgtgtttcactagcacaatcatttttggcatgattctcagctgaatgttcccaattttgtctattttctgaattagagggaccaggaaaatctcgaggacaataccaacattcattttgaatgtgccctggtcgattgcaaaattcgcagaagagccgagtctccctactcgtataattttgtctgaccgaagtcgagtgttttgcctgctcgttcctttcatcctcttttctgttgcactctgatctacctatttttaatgaatgaatgccgaagcgcttttcactttctaccgaaatctctaactcctgaatgtaagacgtcagctttttgaaatcatttttccctattaatggagccattatttgaagcgaacgctgatactcaggcctcactttctctattagacacctacagagcatctcctccctcgctcctgatggaaattggtcagtcgttgtattcactaggggaactaaccgttttatgaactcgtccactgactcaccatctttctgatagcaagtagccaatttcctataagctaattccctgaaatgtggactatccaactttgatttgatgcttttcagagcattgcttaatgtatccttctcggttggcaaaagtttttcaaaaattgttcgcgtatgagcacctaagtgtaatttaagtcgatttattttgtctgcttccgaccaatttgatccaaagacatccacataatccagaaatttaatttgccactcataaaatgccgaagcagtttcaccatcaaatatttgaggtaaaggatttgaagaacctatagcagtaagcgtattcagataaaatattttaccaagctccgcattattttgcatcatcttgtgcctttgtatcgccgaagcgggagtcacactgaaacttcagtaaattctttgccttgtgctgccgaagcaattcctaattttaattgttttattttcccttttcggtcttatttattatttattatttgttctgtgttttggttttgtttgtttcaattaatttaaaatcactttgtcccgatctgcactcaaaagtggcaagtccgcgatgtaaatgtccgtagttgtacagtccgcagtcagtcgttgcctttgtcctttcactgtctcgtaaagtgatcgctgagtaacgggtccagttgcactatccacgtagtcgaacagcacacaaaatccgttgaatcgccgaagcagggagacgcgcaccgtagctcgacgtgcctattcaaattgtcgggcctcagtcggacttccttcacaatttagtccgccgaagcactgtgccgttgcttgaagccaaaaaagtgccgaaggactgacgatgctgctggtgggtctgttgaatgtccaccaaagcaattccgtccgatgtttgactgttcgctgctgatgtccctttttttttggtgatgaattgaagaaagatcactaattaaatgcttttcgctaaaaagaaataaagaattaaaagtaataaaataattaaatttaaaaacaattaaaaattgttcaacaattaatgaacacataaatttccaattgctaaatgtttattgaaagaatgttgaacgacgccaaagggtggatggaaaggaatggggcggaaggagaatcgtatacgggcaagccaagcgctaatgc

SEQ ID NO: 12107 - DNA, 2008 bp, Heterodera glycines
  unsure (1)..(2008): unsure at all n locations
ttttgggtatttttttgagtctccccccgggggncctttataccgccgaagcgcttttcctctctcagcaggcgcctccttagtctccctcttngactcacctccgttccattgctcctttgtccgcccaggccgatgaaaagtctacaaattgcagaaccatccggtgctaccagtagcgcggccgtgcgcggtggacgtgctggcgttgggagtgggcaatttgggagggcagatggggaacattgggagggaactcataaactcccgaaggaagggccccatgggatgatcaagcccagggattctatcccgcctttgatggacacactgggataagtggctttattccggagagactgaagatacttcgcttgaaatggcgaacattaaatacacgtgaaaaatgaaatgtgatcgttcaattatcgtcgggaaagaggcgacaataagcaaaagggaaattaaatgcgaaatgaaataaatgtgagaatgtgaaattcatagggcttcggccggcaaacaagaaaacccggatctaccttacagtataaatcgaaagatcccgattcatgagtagaaaaaagatatggacgttcgaaaatttgttttttgattaaattttcaatgggtcttgtcctgcaggttgtttgaatccagcagagttgttacaaagtgttgtgttgaagataaatggactttctcttaaggcctttcccctaatcgttgaccggtacattatctcaaattcaataatcattcgcttaacaaaatgcttacactggtttggggttctagtcggttttacgcgtcccatgacactttacgcgtcccatcattttgtgtccatggcatggatggcattcgaggccccacaaattccccgaaatcggaatttcgtgtcatccctggtccatggtattttagccgtcctacacaccgagtcaaaaaacgagacatgtgtcaataaagagagagtgcagagaaaaaaacatctctcgttttggcgtactatttctttgtctctgttaatagagaaaaactgaatttacttcgctctatagaactttttttccgccttacagattttctttaaattttgcatatcgatagagaaaagaattctgcatctttctatagtgaatgtaattttgtctatggtcaaactcaaaagttgtaaatttgaaaatctcacaactcgtttctgggatgtcaaattgcttaacttttgcttagaaaaagcttctcctcatcaagggctttcgaatgataccaagattatccaatttggttggcaaaaagcttcaaaaataatttccaaaaatcgttgttttttaattttttggacaaaaataaataaaaatattcatgttgcacaacggactcgaacctccgccctttgttcctttactatcttacaaaaaccactttgccacacacacatttactttttgaactgggatcccaaaattgactcggtgtgcctaatagtaactaagaggaaaccaattttttttgtttggtattcaataatcttttttaactaaaatttcgttgttaaacctaagctatcatgatcattaagtgtgcttagaggttgcttttgcacatttcgataatcaaagtatacaatcaagaacaattcgacgattcggaaggtataaagtttcgattgacggttcgaaaaaactgtttttgtgacgcgtaaatgatgggacgcgtaaaatgtcatgggacgcgtaaaacagactagaaccctggttggttcaagaagcactctataaatattatgccatccctcaaaatttctcgtcactcaatctaacacacttcctgtactcaacattaggcaaatatctgaaataagggtcggggtcgttttcgcgtggggcgagtttttgaactataacttttttctttgtcaaccaaatccaataatcttggtatcattcgatagccctaagtgttatctattagcctacaaaatttggaaaaatttcgttaaggt

SEQ ID NO: 12108 - DNA, 2301 bp, Heterodera glycines
  unsure (1)..(2301): unsure at all n locations
gtcgacaaaagcgaattacgcaagtcaaagcatggcatggcggccatgtttcaaatttcctcaacatcttcacggagcgcgaccgacgggcatcaacaaaatacagcccttacgtccagcgatacatagacaaggttttagcactgaaccgaagtctgagccaatcaacaaatccgccgacatcgacaacttcgccatggacaacgacccaatccacaacaaccacaagtcgtccacgcacaacgacaacaaccgcgactacaacgactacacacacaacaaattggccaaccagatcaaccacacggccaaccgcacgcacaaccacgacaacgccaatgccatggtcaatggaccaccgaacgacaacagtatcgcgggtatggcaacaacaacggccccgtccaggaatcaaattgattcgctggcccaagagcacaatcacaaccgaaaaaggacgcgacgtcttctggtgctcgaatcacggcagcactctctgggaactgaaaggtccggaaaactcgccattctgccgtccaccaccggcacttactgcgcaatggacaccactaaccatcacgctgtacaccaagatccaccggccggaaccaatcgcaacggcatggcactgctccatcaaaacgacgacggaaaattattacacaaacatcgtcggcgataagttcgtcgaaatcaacaaagaatttccgttggtctccaaacgactctgccaacgaatggcacatcagcaagaatgcccactcgccaaaacggaaatgcaccacgatgataacaatcgtatttgggcaacaaacgaccaactccaagtggatttccctggaccaatcaccggactcttcaaagggaaacaaaccagctcggcaacaaattgctttgcgcaaccagcaacactgttcgtcaaatggcacagtctccaactcctgtcgccaatccatcgcgcagaccactgcaattacgcctccgagtattgccaactgcaagacaacagctcactcatctggacttcagcatgtccaaacgacaactgcttcatgtgcgacttccaagaagccgaagaaatccacggagaattcaccaagctcaacggtcaaacaacagcattttggatctcggaagaccgacaaaaggcactgaccttcaccgagacacatgcagtccaagcatgcgacgggagacaaatcgtcctatcggagcagaacttcggcattccaaaagagcaatatgacatcatcatgagcaaccacacaagagagagacgcaacgtgcaacccgagcaactcgcttcgcagctttcagctgctcaacttgccacaacaatggcactctcgcagctctatttgaaggaatgccagcgcaatgtgcgtgtcagcaacccaacgcttcaggcacggaaactcctcaagcgcgataatctgcaagcccgatggatcagcgaaacaacaatcgaagtgtttccctgtgttccaatctccctctccaacatcagctaccgaacaacaaaggactgctacaagttcattccggtcacaatacatttgccaaacgcaacaagagacgcattcctcgacccggagatgcgcatcctctcactcatctcaaaaatcgcaagttgctcaccatttcgctaccatcaccttcaagtgcaacaaaaccccaacttgtgggtgcgaatcgactcaagaaatggaaacgtccaacgactggcacaaacagtcatccatgagctttacgagacgatcctcaacaaaacggacaacgatttggatctccacccactgatcttccatcagtggcagctcgacaacgacaccgacttcgccagccttccgcacatcgacgaattcgaagattcggaagaattcaaaaacaagctggaagagcaaacgacgcaacgagcggaagcactcggcgccttacccggcggaatcgaaggatggaccgtcagatggctccaagaacggctacaggaagccatccaatggtggatacgtctcgcctcggcatactctacatttctcctttgccgagacgtcatcctaccctgcttaatcgcatacttcctcaacccaatccgcatcacactcatgactctgatcggatttcgacccaagaatcagacaacgcctcaaatcaaaccacaatacgaggacatgccattgcgggagatgctaagcactccgatccnngcgaaacgacgacaattgccnaatgcatcgactccaccatccgactggacacgacgacaggaaacgcatcattccgaacagagcgagagcgcat

SEQ ID NO: 12109 - DNA, 1074 bp, Heterodera glycines
ttctgcttcctctcctgtcaatttcaacgcccgaactcctcgggctttgtcgacaccaccgcggcgacctgcaccgcactcaacgtcaagcgcacacggccaactccaagcagctcaacggagctcaactcaaaacacggccatctccaagcagctcaacggagctcaactcaatcaatcaatcaatcaacgggtggtgatcggacagagtgcataatgacttttaatatgcataaaaattaaaggaagaactattgttttcgtttaatccaatgataaaaatataaaagtgaattcaattgaaaattcattttaaaatattttaattaatttttaaaaacaagttaattgcctttgcttacattaaaatataataaaatataaatgaaaatgaaatatccgagacaggattattagaagtagaagaaattattgctggacgagagttgtaggggttggatgagaaaatctttcatatatgcattaaaaagctaaaattacaaaaaattgtattaaaaatagaatttgtaaacttttctataacaaattttcattataataatccatcaatctggtatcattcgaaagctcttaacatgttctatttgcctcaccaaaaagcaaaaagtttttcaagcctggaaaaaagtttattgagaaaaaaaacttaaatttcgactttttcgcaattttcatgtataaaatttttgataattgtctaatcgcaaagcaatagcttctaaacagattaaactttcgaatgataccaacaatgagtagtataaagttacagtggtaggggtctaccacaggagagggacactacccccttcataacatatacttggacaggacccctgcccggtaaccttgtgatcaaatttactttaagctatggtagagggtcctggacccctgcccctgtaacttaaaaaacgtttcatttaaagcggtagtccatgaaccctgcccttggaacaaaatacttaggcgaaggtgtcagcagaccccagccgagggaaggatgtcgaaggggatgcgtcaattttttttgtgcagctatagcagcccttc

SEQ ID NO: 12110 - DNA, 4820 bp, Heterodera glycines
attagtccatcaacttttatcaatcaatcgcattttccaccccaataattaaactacttttcttagactttttctatcagaacaaacaggcaaataccaaaactcattttgtaactttcaagtagacttagttgatttggctcacaaagtacaataaatccagaagagttggatatgtatgtttgtatatggatgagttggcttaccccacttcactctaatcgattcctattcatttttctgtgttcggagttttcccgaaacatttgcaccaaaatttttattaggaagcgtctttttttatttattatgcttttctttaagcttcgccccgtaattcgctctcttaggcatggaagatgcccacacgcatttgctcgaactgcccgaagatccgagcacagcttttttcgccgtttttgatggacatggcgaggcattcttcaattccctcatcatttcccattgcatttcaggtggcgctcaaattgcgaaatacgccagtgaaaatttgcatacgcaaattgcccaatcgaatacattccgtacgtttatttaatgacatgcttgttctattagacggttttatgcttttttaggtgagggcagaatatccgatgcattagttgaggcatttttagaattggacgagcaaatgatggccagtgaacagatcagagaggaaatgtccgggagtaagttttctaatccaatttaatgctataaataactcatagtttttcgagttttttttcctttatgtacattttttaaggtacggctgttgcggtgctaatcaaagacaattttatttattgcggttcttttcttttttgtacattaatttttctctattttttaagcaaatgctggtgattcgagggctgtcgcttctgttgatggcaagaaaattataaattttaacgttttaaaatgaatttttttaaggcagggcaattcctttaagcattgaccacaaaccaagtgagtagaatcttttatggattaggaaaaaacaaacaaaattctctcatttttaagacaatgaggaggaaagtcgaaggatattcgcagccggcggatatgtaataattatacaatttttatgcttttttatttcactgttaaggtggaatttggccgagtcaatggcaatttggcactgtccagggcatttggcgactttggtttcaagcagaacaattccaaatcggcacaggaacaaattgtcactggtatgaatattttgtgactaataatagaacgcgtatagcaaatagaataaacagtaaaacttgaaataatttggtattttgtaattattaattaccatttttagcatgccctgaagtggaaataaatgccatcactgccgagcatgagtttattttgctcgcttgcgatggaatttgggacgttattggcaatcaggaagcagtcaatttttgtcgggaacggctgtaccgtggggttttgccagaaaaggtgaatttcaactgttaccacttagaaaatggcaaaggcatagattattttatcattaaaacgatggtgctttcatgggactttaacatgcattgaccctctctctttttatacatcatttaactgaaccccccccccccccccaattgtcagatttgtgagcagctcctgcaaaagtgtcttgcaccggattgtgaactgagcggacttggctgtccgttttcttaattttttagttacatattcttgtttactttaggtgacaatatgaccgtcattctcgtctgtcttttgcaggtccccctcccattttttgcattgatttcccctttattttgctatgctttcccttttattaggattactctttcgacgattacctcgccaaactccgtgccaatgggacgggcttcgaattcgaacatgaagaggaagaggagggtgaaggggtggacagatattccgacgcccacccacagtccgactcagacgagcccattgaagaggaagttttctcaacaccgccaagccattcgccaccagtgctttcgtcggattcagtgagcagggagggaatgacggagcagcaggaggatggaccagtgccgaagttggagaagcaacggaacggcaccgggcaaaaaggtgagcggcacagcattttggttttctactggcaaattgaattacttccgttagttggtgtggaagatatcaccgaggatgtccatgtccctccttcacccgctggcgccgtggaatatacgcaacctgttgattcctctcctggagcacaaacgacttccaatgattcgacacaacagaggaatatgtgaaatggattatttatatgaagattttgtttttatttaattaaataaatggcgatgatccatcatttcataaaattgtgttttcgtgaaaagcctattcattttcttatgtgggtaaattagtgaatgctcgtttcttgaccaatgttttaaaatgagtgagtcgatatttaatggctaagaataaggggaaatactttatttattaaatttgggatattgtctctgtttcacaatgttggaaaatgaaaacattaaaatttgtccattggttacattatgaggtatttatttagtgtttaattatcggattaggccctcaaattagtaggttcttcttgtgagtgtacgcacgcgcaatttcgtcatattttccacagaatcccgagaagcgggaggtgaagccgagaacagaccgatggtacctaaagaaattaaaaagaaaatcagagcaaaataaaacggtaacaaataaggaccaggaaatagtgaatggctgaagccagtggagaacggcacggtaggcaaacaaatattgcatttggctagagacggcgtggcgccgctgcaggcggagaaagacggcagcggtgagcattgggtgttcaaaggagacggcaccacgaagcaattgcatcagaaagaccttaacagaggggcgagcaggacaaaacgtcgctatcgaaacgtcgccgcctaaacgtcgctgggatataacgtcgccgcaaaattttttttctaattttagaaaaaaaatctagaaaaattgtcataaatttagttagctagctaaatacgaaaaaaattctagaaaacctcaaaaaaaatttctatcaagaaaattcaaggaaattttaaaaaattttcacgttttttgggtttttttccggaaattcagcaaatttagtttttattaaacttagattttcaaaaagctaaaatactatattttttttttgcggcgacgttatgtcccggcgacgtttaggcggcgacgggggggggggggggagtacaggtaaaaaacaaaacaaaaaactgttccgggaggggaaagggtaatatataaaatataaatttcaaaaagtcgtcttcagactccgggtgtttattacatatgtgtgttgctggtttttttaacctcaatcagtgccaaagtgcccgaacgtccgcacccatcggcgcacataatcacacttgggttcttggaatgacgcgccctgcaaaaatggcattatttttaaatatgcggcataatatgacaattaccgtatcagcacacggaagggccaatggaagtcggtgtaactgcgccaatcgcagtgccaaagttgaagacgaaaggacttagaattgtgcggacaatgcgtcgcccccgctgccgatctagtcgatgagggaattgccgctccatcgtctgaaatcactttccccgcttagttttgatgccctctgtccctgtttcatttgcatgaccatagtccgccgtttttggttcatccgtgttcagccaaagttccaagtgaacaatggtgaacagcggatcgctggccgcgtcattggatacatttttcacacgaagttggccaaagcgtcggatttctccctcaaatcttaaaaaacggctaactaaaattgaacatatggtcatgccttggccagaagaatgggcagtgacttttggccgcactgccaacgacgacactgctctccgtcagtgagtcggtggtcgcttcacaaagcatgaaaatccattcgctacgctcctgccatatctttaaattttggggataagaacattacaatcaaaaacagagggaaacaaagcctcaatactaataataacaacaatcaaaatcacaattttatgtcattgtttggcaatgatcatggataaaaatcttccattgtaatttaattgtaggaaaggaatctaatttaccatgcgccaaaagtcagggatggtctgctggagcggtgcctgagcaagaatgaacgtgttcagaagcggacctccccggacatagctggcattgatgaagtcgccatgcccacttcatccaaatgggaaagaaaaaacatgacagaaaaacaatttcaacttgtttgaatattcgcttaattttcaaaaattcacaattcaacgcgtgtcgaaatctgtgggcagtcgaaatccccaaaaatttggaggtgttgcttcgtggcggcgaactcctcgtgcgttatgccctcccgaacgagttcagccggaacattgaaagtaactcgggaccaatcggcacaagtcaatcctgaaagcaaaatttgataatatttggattgtttaccacctttaattgcttcaattgaacttactccgattgcgcactttcaacaacgaattcgcgtcgaatgccttttgcgaactttcggttgctgacagttcaactttgtcgaaaaatgattcgagcacgtcaaattcggcaaagaatttctgtaattcaaaacttttttgaaacggga

SEQ ID NO: 12111 - DNA, 1166 bp, Heterodera glycines
ttaacaatttaattaataattttttaaaattggcgtttattaaacattgcatgagaatgcttctcaggtggccacaatggagggctctcttggccttggagtgatgagcggcctttttctttccggccaacttcgacagtacgaataagtagtaatcattcacgttaattaaatcaaagatacatttattatgcctcttcaaaaattacatttaaagataaacccaaattgaaattgccaattaattatttgccatttttcttgccccccccttctgttacaaattctttgctcatcttttgccatttttcccaaaatttcagttttttcggttaccctttggtgttccttctgctcgtcctcctccatttgcttattcttgccattgtttttctgtttttccgtgagctcgcctccgatgagatggaaaggcgacggacgacggacagccgacgaaggcgccaatcgcttcttccgcctgcggacgaagcgcaagcggaagacagagacgccgccgccgcagcagtggcggcggagggcgaaaacggcgaaggacggcaaagtgccaacaattaaaatacaattaccatatttcctaaaatacagcccctctctcaactaaattacaaccccccttttgaggagggttgaaaaataaagccaccaggggccctattttaggaaatacggtattaaattttaatgtaaccgagtccgaattcctctttgaagatactgacgatgccgctgctaataaccgttcctccgtctgctggtgcttttctctcgtccaaaagcgtctcgctgaaatggcccgcgtctaccgggccaagcgagcgccggcggctcagcgatgcctaaacattgtgctggtcgcactcggagttcgtttcatcgaaattccatacacagaatattacacattttcacaagcgtttctccattaaggtgaatcttttcacttccgccggcttaagggacattttatactcttttctgcgctaccgtctccaatggactgaccgggagtacggttggtacagcggaacggacagtgcacttgacagtttgagtgtaagaaatggtgcaatttatttttttttagagatattaaagcggttgaattaagctgttactttccgagaatattcccatttcaaagttta

SEQ ID NO: 12112 - DNA, 2653 bp, Heterodera glycines
  unsure (1)..(2653): unsure at all n locations
ttcaaagtttaaaaacncggaaaagataataatttaaccggtttcgtccgtccctttcagtttaccaccgtttctctctctctctctctctctctctttcatttggccacttccttcccctttctcaggtgatgttgctttaccctctgctgcacaaaagtgccaatctcaccgaccttcagttggctttgttcggtcttttggccaaaatcgtccgtgatgctctgttggctttttcctcctccgtccttttggtttcgcttgcgctgattccgtcgatgactagtcgttttccgactgccggaatgagggcacttgcgagcgcatgcgtacagcagcatgagcagggtgagtacggtaataacctgagcagagttgtggagggaggagccgtagtgtacggtaccctggtaagaatacgataagtgaaaaatgggtggagagtcagtgatatcctaatttgctatccgccatattactttgtcacggtcgaagtacggtaaacaagggtttgttgaactgtggcactgctgcctatgggtgtttggtattaaatgtggcgttattgtgctgcggtgtttggctttctgttccgtttaggcaaagttttttcgctgatcgctctgatggacggcgtcgcttcgcttttcgcttcgcttttcttcaacggcatttatccctttacgctgaatttcttcgccggcacaatgctcatcttctccgcccttctgctcattttccctgtctctcttttggcgtatgtctctcttctttttttctttgctcaaattttcggacaattttaaaaaatttattttgaaaataataaataaattgttttcgctttttttagtaaaattcatttcaacggattggacaaagtgacgcaacgtgagaatcaaaacgaaacatagcaaatgatctgccaatcattttacaaatatttcaatgaatgcgttaacaaatgtttcatttcggggtttttcccaaattttgtttatttcttttattcatttgtattattataaatcaagcattcattcatcctcccctccctcccattcattcattcgttgattttgtcactcgttttgatcgttgtgcttatttatttgcattaatttgtcatctctcccccctttttcctttgcttattcattcgtggcacatttatttggttggggtaacagtgaacatttccttcgtttggccatggcttaattttgttagcattttccacttcggaggtgcgagtgaggagtcagctgatgatgaagcgaaattattaaaccagtcctttaaaaatcgcatttcaatctttacattattcaattcatttattgtctttttttacatatattttcttaaacattcattcataaattattagggtgtgagaaagattgtttctaccgacaatagaggcgagaaaatgtcgaagttcgagacccaaaagacagaggaattctcgattcaaaaaacgggactctccaagaacctaaaataaagcataagcttaggcctaagcctaggcttataagccgaaagcttaagcttagtctaagcctttgtacgaactgccaatcacaataaataataaaataacttactcatttgttcagaatatatttaaaaaatgacacttcatttgttgcttgtccttcccgttttggcgatggctttcgcttttggcaattgccaaagtcaaactataattagcggttccggctgtgtgtaccatgtgagtgtttactagagatgcgccgtgagtgaaaaaacccgtgaaattcacggtagccgtgattcacggcgcatctctagtgtttacctaatttgaatattttgaattatgccgtcgactcagtagcagcaaatggcatttctctccactgattagttgctatttgaaaatgatttttataaattaaaattaccgttaattgtcatcgttaattatgtgaacagaacggatgggtgactgaaagtggacgctcgcggccgttgaccaccaacgaacgcagtcaacttgacaattaccagcgccaatcgcaaagtgccgccgctgctttttccgccgcatttcgtccgccctttccttttggagggccaattaacccgcagttgaatttgccgcaggttataaaccgtttcaaattaaataaattgttaaaatagtaaaatagttttaaatctgctcttttgaaagtggttgatcgatcctcgcgctttcccatcacttaattaatttgccatgcttttcctgtgctttcagatgccatgtttctgttccgctgcctcatgcgcgggcggtgtgtcatgggttgacaattaatcagtgggccgatggacagagggaattaattattcactaatgaaacgaatttgtctgattcacagtcgggggattacaataaagcacataaatattgcggataaaatgctttctattttgaaatcagtaattttttaattaataaaaagttttaatgacttattgatgttgacactaaatggtttttacctgctcgacagaaatggaatttaacagttaattttacaatttatcgatataggtaaactcgaattttgtcagagtataacatcaaaaataaaaataaatcaagaaaatttgtttatatataaagtacaaata

SEQ ID NO: 12113 - DNA, 3288 bp, Heterodera glycines
cgccttatcatccatcagtcggctatattaagtaaaacaagttgtcagaaatgaaaaagtcggcaaaaatcaaaaatggaggggcggccaatccgattattttatctatttataaaatcagagacacataattaaatgactaaccaaaaatttgaatgttatctcaatcttacttgttgctctttgttgaccatattggctatagtaaattgcagaattgagaataatagaaaaaggctgaatttagaaaaacaaataaaaacgaagttatttttgtgagagatttttcctaaaattttggcatttaattacaaaaaaaaaccaattatttacggttgagcttttttgtttaaggaaggaagaataaatgcaaaaaataaatgattgaaattagtaaaaacgtcggaaaatttttggaattgcgtacagagagatgaaaggcaaatgcttcaagtgaggctgacacattgagttggaatttctgttgcttttccaatgaatgctaaaaacggatggtgattcaaccgcctttttcatgttattccctcggctttcgtcctttacaattttccaacaaacgaaaaaaagtacaattttttgaataaatgtcattattttaaatgaaatgaatagtggcggatagaatgtgtaaattccgattttaaaaaagcagcttgtttcaatgtatttctaaaagagaaagtttttaaaaaataaatttaaaattgaatgaaaaatttatattttttcattttttcaaaactttcctcgatggtggcttcgtctggcctactggattaacaaacattcagaaagttgtgccaaaaatgttgaaaaattgatatgacattttcttaagtgttcatactaatagagcaaataacaatccaaggtatcgtatgctacagtaggttggaaatagtaagaaagttatttttttaatttttcaatttgaatttttttaccatttgcctacgctttattatcatatgctttttgttttgaattaaatatgaccatttgaatcattcaactgatcagaagataacttttattttaaatccgaaaggatttgcttgaccaactccgaaaagactgaaatggttagaaatttttgaacgaacttatgcttttcgcctcagaaattttcggtgttttttaaaaaatccaataattggaattttaaagaaacttgttaacattgtgtaatggtcaatttatgtggctcttagtcgactaccatataaaaaaattgtctctttattaatggaatccttttcagaaaaaaactgtaaaaaaccaatcaaaaatattgtctcataattagggatgacatttttagggttttgccaattttttccaaaatgtatttatttattttcttgacaagaaagggaaatggcgctacttaaaaagaggcctcttttgaaaattttttgcacttctttttggtttaaattttttttcaattttttttcgctttaaaaagtcctgtaaccaagtacccgggggttttcgaggtcgctgatcacgaatatgatagatcatttttttgctgtttcaatgatttgtgactacttttagcctttttaatcaattttatggaatagtgagaattttcaaaaattcgaattttcgttagcaagccaaatgcagactagaaccaaggaaaacaattcatacaaccccgacactaataattattgaacagacttatttaaagtaaagcgctaatttttttaaaacaaaatgcacccttatgaggccgagatttgaagtgtgattctgccgttgactgcaacaaatttggtgaaccagttcagagccattcttttcagcagaaacaaaaaagaaatgaattaatttttaaaaaccaaaaatatttaaattttctttttcaattttttgacattttcttttttaaagagttaaattagtaaagtcggttcaattatatatatttgttaaaaattgtcgtgagtggaaaatgcccaaacatttcacattgtcagtgctttccattccctcacttatttctgccaaaatttgccatgaaaatcctttgatgcgcacagtttcgcttttacgttcactcttaatgacttctcgcgcaaattccgacagtttttcaatttccatcgaaagtgtccaattggatttgttgggatcagaaacaaatttctccgtttttttatttttaactataacatcaatgaccaacgtcactttgtcctcttctctgttgtgaaaaccacttttcgggtccatcaatttcttaattaatcataatatgtcaattaaggtaataataattccaattggaactcaccgtaaaggaaaagaaattttcaaatcccctgatggttgatttgttgtaaaaagcacggtcacaaaatatcccaatggaatccttcgccccatctttttgtgagacaattcgaaaagtggccgaacgaacgaagcagcgccattgcgaatcttgatgagcataatcatcgcagttcattcgcattaattaacagttaatttgttgcacctttttcagaagcggtgcacaaacaggggtgccattttacctggaaaacccggcatttgccgggttttgggggtccttgccgggtttttgccgggtttttgaagttgccgggtttttgccgggtttttgggtttttttccggctttcctattttcaattcatttatttgaattttattaaacattttgccaaaattaagagccaaatatagttttcgttaatgttcaggtttattttattcatttttgatcttcattttctagcccgcagaatgtcccaaaaatctatttctgatttcatttccaaagttacatttcaacaatcatcttcaactcaaatttccagcgctgaggaagcaatttcagatttagccgtttctgtctcgagtgatgaatttggggtgatttcaacaaattgactttgcaattctgtcgatattcccttctaatgcattttgtgaatcagtcttttctgttctgaagaacatcaaaacggacgagagaaacagtattgacatgcctttgttaaactcgctaatttcaatcaaattcaatgcaaatatttcatgtcccaatgctcacaattactttctttcattgccaaatttgctcaaacaggtgaaaagcggtgataaatatgttgtttaattgtttttgacgtttttttacagtgaaaaattgacttaaaaaactgccgggttttttgccgggtttttgaaaatttttgccgggtttttgccggggttttcaact

SEQ ID NO: 12114 - DNA, 3868 bp, Heterodera glycines
  unsure (1)..(3868): unsure at all n locations
atcttgttgttaccaaaattttgattgaattctccaaaaaaaacttcatcaaaaaatgctataaaaacggaaaaataaattaagaatcgatataaaaatatttaaatttagcccatttcacctcacatttctattggtttctttctcaacagtggagaaaaattatttttgttacttcaaattacattaaaaataacttaaataaatagaatttattaattaagatgaacttaataacaaatggacgaacaaaaacaaaaacattgccgatagcgagaacaacagcaacgttaattaataaaatgatggcaaatttgattcatatcaacaagcacaaccaattaaattatggctaattggttgagtgaaataaatgttttaatattatttgtctaatttaataaaaatgaataaaacttttttttggtactatacgagaaaaatttttggcgcccctacaaagtgtccaagcctcgaaatgtccaagcctcgaaatgtacaagccacgaaatgtccaagcctcgaaatgtccataagggtaaaaacacgaaatgtccaaaactcgaaaaagctcataaaaacccggaaaaggagtctaatttagggttttcggggtcgctgaatacgaatacgaccttcatatcgccccttgcctaacccttgatccacccgaagaagaaataagttcaaaaatttttaaaatatgtgctgtactgacgacttagatttttctattcatttagaccaaatgataagtaataagcttgaaagtctacaaaaactcggaagaagcgttatatttcagacatttcaaacacaaatgaggatgccgtgaatttgggagtggagctttgcgaaccgaatgccgtgataattttctacaacgttgaacaacagactttgaacgaggttgaagttcaataatgaacctttgagcgcggaaaaacaaattttgggagacattgcctatggttgaatggtacgtatgaagcgacgcaaaaaaatagactaaaattattccttttcagaagtgttctttctttgccacttttgccttccagcgatttgttttcgtattttttcgtcgatttccaaaagtttaattatttttaagctgaactagtgacaacaatttcgaccatcaattcagaacacagctacgcggctactccaatacagctcggcatcggctcaccggcgccttgaactctacatggctaaccactgtgactccacaagaacagcctgttcaatattcgttgagctcgctatcgacttcaacagcgccttcagccatacattttttcacgaatgtcgtttatattaaaaatttcaatggactggaggcaacccatctgcattttatggttgttttttaatttactacaggcaaatttaaaaaaatatgtttgaaaggtctctgccaccaccctgccctcccggacttcatctgtaaaattaatgaaaacaccgactgatggatggacgctgcccgatctgagctgctcgccatttcattcgcatgtgacaaaagggatacaccatacaggacgccgtcattatgcgaattttgccggacgagtaatgcaacaacaatggtgaaatccatggccaggtgacgccgatcggtcttcaaattgaaggacattcaagaaaattgaaggatttcgagaattttgaggattcgattgtccatgttccgttataaattttattgtatttttaataaatttatttattttaacttgtgaagtttgtctagggatagaattcggatcacttgcgaactcaaaaacttgttcgaattttggtcgccatcgtgtatagaattcttagtttattttggtattttatatttatatttgggtccagggttaggcaaggggcgatatgaaggtcgtattcgtattcggcgaccccgaaaaccctaaattagactccttttccgggtttttatgagctttttcgagttttggacatttcgtgttttttacccttatggacatttcgaggcttggacatttcgtggcttggacatttcgtggcttggacatttcgtggcttggacatttcgaggcttggacatttcgttggtcagcgatcaaaagggccattcctctcttaggtttttaacaaattcaaaaataacatcttagcaactaccgtcgttttatccatttttatcaaaatcttatgaacgtgacataatggcctattcatctagctgattttcttcagttttcttatccgcgcatataatggatgaagaagacatcgctttggacttggttcgtgataggataaacattgatgtggaatcgggagaattcactgctttggacaaggttggcttgtagttaattaaagaaaatattcacataatcccaaattaggagagtgatgaagtaataggtgacaaaactgcagaaagtgataaacgccttattcttgacttggatgaccaacaagcggggccttcggagcaaaaagtcggcaggagagggcctggacggaagtcagcgaatccgttagtatttgtatatcgtcggcatcattcatccatttgttttcggattcaaggacattggacaatcttctgggccatgcaaacttagaacatgcccgagggcggacaaaggaggccatgacttttcttttcgaagtcatttatcccgttcatttcgactcatttcgaaatttaaggtagtcaagctggccccttaccatgtgcagacatacaaagaactttcggatttgtactcggaattgggccaaaaagagaagagctttgaattcaaaatgttggctgctcttttaaactctaagacaacagccgaagaatgggatgaaatagccgggactgctaagtcgtttaaccggttggaattggctgtcgcatgtttggccaaaggttgttctatgacgtcttcggcactttctttttaatttagcgattcgatgtgaccccgagaattggctttactacgaaaaacgcatccaaattcttgatgcatccggtgaaacggatcttgcaatgaagacacgactccaagctgcccaatcgatcaattgtcaaacttccaaaatcaacttcgcatggatcgataaattgataaaaacggtatttattttgggattttttaccgattgggaaggatacaacgccaacttttaaaatggatactgctcccacttctcccaccacctacattatgaatcagtcccaataaggcagccgattattattgcacgctgaaagacgaagaacgggcgaccgaagcattggaaacgttcattttacggagccgacaattcggacggtccattgatttcgagcatttggctttacttggtatgtggataagcaaaggtcgttttgaggactcagcaaagtcaattcttgcgatgcataacgaattggtcaaggcagtcgatgagaaaggcgacaacgcaatgactgtgaggaaatgggaattatgtgttcatgtgccgaattccaccaaattattatttgttccaggtgcattttacaaataccgattataaattgagcccatttccacctccgtccggttctcattgggtgatcaatgcaaaaatgaattcgcttttgctctcctatctgatcatttgctgggttcatcttggacgcctcgacctcgtcccccaacttattgactgcctcttggagagaccactcggctcttccgacgaagaaaatgcctttttggacattgctcggtcccttcattcaactcatcaacttgtattggccgttgaatatatgcagaaattgagaaaggaaaggcccgagtacaatgaaagcaccgatttttggttggtttttgtgcttttccgactcnntaga

SEQ ID NO: 12115 - DNA, 1329 bp, Heterodera glycines
  unsure (1)..(1329): unsure at all n locations
aaaatcattttagagcatacacactgatgacagccactgtcatgttccaaagagatttctattaccagatgccaaaaaaagagatagccatttttttggaccgtccatacctcacatatactcaaacggcccgaaaatcatttttagagcataacaactgatgacagccactgtcattgtttccaaagagatttctattaccagattgccaaaaaaagagatagccatttttttggaccgtccatacctcacatatactcaaacggcccgaaaatcatttttagagcataacaactgatgacagccactgtcattgtttccaaagagatttctattaccagattgccaaaaaaagagatagccatttttttggaccgtccatacctcacatatactcaaacggcccgaaaatcatttttagagcataacaactgatgacagccactgtcattgtttccaaagagatttctattaccagattgccaaaaaaagagatagccatttttttggaccgtccatacctcacatatactcaaacggcccgaaaatcatttttagagcataacaactgatgacagccactgtcattgtttccaaagagatttctattaccagattgccaaaaaaagagatagccatttttttggaccgtccatacctcacatatactcaaacggcccgaaaatcatttttagagcataacaactgatgacagccactgtcattgtttccaaagagatttctattaccagattgccaaaaaaagagatagccatttttttggaccgtccatacctcacatatactcaaacggcccgaaaatcatttttagagcataacaactgatgacagccactgtcattgtttccaaagagatttctattaccagattgccaaaaaaagagatagccatttttttggaccgtccatacctcacatatactcaaacggcccgaaaatcatttttagagcataacaactgatgacagccactgtcattgtttccaaagagatttctattaccagattgccaaaaaaagagatagccatttttttggaccgtccatacctcacatatactcaaacggcccgaaaatcatttttagagcataacaactgatgacagccactgtcattgtttccaaagagatttctattaccagattgccaaaaaaagagatagccatttttttggaccgtccatacctcacatatactcaaacggcccgaaatcatttttagagcataacaactgatgacagccactgtcattgntttcccaagagattctattaccagaattgcaaaaaaagagatagccattttttt

SEQ ID NO: 12116 - DNA, 3650 bp, Heterodera glycines
ttagcattcgcatccatcattaactgtatttgccgatcttcttcggccaatcggtagtccttcttatacatctcgacttggtccgggtgaatcacttggacctgatccactgagaacggcgtgaggattggtgcataggggcggggttggaatttgttgttatgtttttgttgttgttgttggtcagattctccttcggagtccgagtcggaagaaattaaaatggcaggcggtgttggagacgaattttttgatgtagaatgatttgagtgggtaagaagggagtcgaatcgagacattttttgctgtaaatttgtcgaattgattgtgtgagtgtgatggctgattgaatgaaatgtccgattaaaagatgaaaatgattgaatattttggggctcgatcgtctcaaaaaaggggttaaatggatttgtttgtcgcgcaggggtgtgatcgcgcagggtgatccaaacatccggtattattggttgggcgaaaatttggttttgttcattaataaattgttcgtgataaaatgctttcccgtcttccatcgttaaatttcccgaattttttagaaattttcgaactcccgttccaaaaaacatttcgtcccatccgttggaaattcggagtttgaaattttcatcaaaaatccacattatcacgtatttgtcgtcatcttcaaatatttcccagtcatttttgattaaattttcggaaatggtggaagttgcgggaaaatttgaagtgctgagataagcgaaaaaatttgtgccatccaatcggatctcaatttgatgtggtgtttccatttcttccttgtcttttggttggcccagtggattcccttcacttatacatgccacaattgtttccccatcatgcatttcttcgtccgattcttccaattttgaatctcccagctttttattcccatttttatgttttggtttctcattctccaatgattcagtgtcctgttccgcttcttcgtttgtgaagtatggcttgcattggtccatgtgtacagtgaatggttgtccatcggggtcaagttctcggatttgcaaatttggcttctcaattttgatgacgcgaaatggcccttcataatttggttccaatttattctttttgtcatttctgcgtctcaaaacaagcattccttccgtccatcggacttctttcgtgcctttttgttgctggatcatccgattagcacacttcttcagactttctctgatccgagattttgcttcttccatccttttggtcagctcttggacgtatatggccatgtcattgtactcttcgccgtctttttcgagtagcatctcactgggaagccgtggatcaaatccatgaagcacaaagaatggcgaatgatttatttgtgagttaatcgatgtattatatgcaaagcaaagcatcggaagcgcggcagcccaatcttttccgccagtcgtggtgactagcatgtccgcaagtgttcggttgaatcgttccacttgtccattcgctgattggtggtatggcacggtcgtttggtgtttgaatccccaagttttagcaagtgactcaaatgtcgaactgaggaattgtgttccacagtccgtcacaacgatttttggaattccaaattggcatagaaatttgtcaacgaatgctgttgtcaccgtcgtcgcagattgttcccacagtggtagtgccgtcatatattttgaaaatgaatcgattatcatcaagatgtattgaaatccgccttttgccgtcttcaatggtcccatcaaatccaagtgaagtctttcgcatggctgtgacgctggtacaattggacaaatgggctcagagctcatttggttcccaattattttccgtttttggcacgcgtcgcaggttctcacaaatttttgaatgtccttttccattccttcccagtacaaatttcgtcggattttgtcttttgtccgcttctcgcccaggtgacctccttggaaagggtcagagtggtattccttcatcactctttgtctcagactgcttggcacataaattttccattcgcctcggtccattgcacacaaaagatcttcagtaattctccattttccagtaaattcatttggctcctctgaattttgatccttcttcaaagtttcccgtctcttttgtgtgtccgtctcctgtttttgagcctcgcgcatttcactttgtgaaatttttggttcaattttcagccaattaatttgtgtgtcgttgtcgtccaagtatcgtgaaagatggtcacaaaattggttccgttttccagggcgatgaatgatttcaacatcgaatgccatgatagccaattggtatcgactgagtcgcccttccaagtccttccgccggaataatgatgtcaaagccgaattatccgtgatcactgttgattttccagctccttccaaatatggtcgaaaatttttgagggaagcacaaattgctaaggcttctaattcgaccaccgaatagcgcttttcatgttttgttagcactcggctgaagtaacaaatcggatggacttcgccttcacggttttcttgtagaagacatccggcaattgcttttatgctggcatctgtttccacaacgaatggttgtccgaattttggtggagccaaaactggagcagtcatcagctttgtcttcaattcctccaaggctttctcatgtggtggtccccattctgtcgtgctttcattttttgtcaactcataaatgggttgaagtatttctgcaaatccgtagacgaattttcgaaaatatgacagcattccaatcaaggatcggagttcggtgatatttttcggtttcctcaatttgtgaattggctccaaatcctttggatctatccgaacgccattagccgaaattaaatgtcccaaatagcgaatctctcccaacgcaaatctgcatttctctggtttcagtctgaatccaacttcagtcatcgttcttaaaaaggtattgatgtcccgaaaatgttcatcttcagtcattgagccgattatgcaatcgtccaaatacacaagaaatgtcgctgagcacatttgtcggacttcttccatggctcgttggaaggttgttggtgctcccgccaatccgaagggacaacgtagccattcgaacagtcccatgtggcagatgaatgcgctcctttcttcgtgtcctttcgccaatttaatgtgaaaaaatccgcttgagcagtccgccacggagaaatattttttcccagagacttcgtcaaggatcgatttaatcctcggtaaataatatgtcgatcgcttcgtcaattggttgagcttccggtagtcaacacaaattcgataggaggcatcaggctttcggacaagcacaattgggagatgaccatgccgaagtggatggtcgaatgacattttgacgcagcaactccttgacttgacgctctattttcgggtgaagtgcgacaggataacgatagggtctctgttggaccggccgtgcgccatcgattaggtcgatgcggtgtatcgtttgtcctttgaagagtccgacttctccaagtttcaccaaagcgctctcggtctggcggatgatatttttcagcttttcaatttcgtctcgactga

SEQ ID NO: 12117 - DNA, 1019 bp, Heterodera glycines
agaaacgaatgggataaaaagaatcatcaccaaaagatgaagtaaccaaaagagtcggaggaatctcgtgaaaaagataagcgagttcaatttgcataaattagacaattaacgaaattatcgattttaaaaatttaatatttttattcgccaacccaattgttttccatttttggtgaaagtgatctgccgaataacagaattgacgccaattcctacggtatcgcctgcaccgtaggaatattcgacatttattcctgtttctttcccattaatccaaatctttccatcactgtcaattgcataagtgccctttcggcttcgaattgttccatccaatttgttctgctgtttgactgcaaatccgaagctcatccaactgagaaattaataataataaagaaataataattaaaatttgaatatttctgaaaaattttatattcaaaaaataaaaaatctctctcttaccatttcaaatttccaattgaaatttcgtagtaaaaattgtcagacgaatttttgtccagcaaaatcggatgttttgcaaaggcagaagaacagtaaccttttgaggagaaattagtaaagtaaattatttataaaaataccagaaaaatttctcttataatggacaatgagacttttgttgccaatgatttggaggttctcatgacgaaaattggcatcccaataattttgtcggaaatttgaaaatgccttaaaataatccattttaaaataaaattgttttattatttaaatatatttttttaccccttaatttaccttcctctgctttggttctgctctaatgcactgattgtttccacaattttcttctgatcattttgaattttttgagttgcttaaaatcgaattaatttttaataaatgtaaataagcatttaaattgataaattttattttcgttttaattttcttcccctcaccttttgactgctctttttgctggttctccaaaacactgattttttcaaaaattttctctgatcatt

SEQ ID NO: 12118 - DNA, 2878 bp, Heterodera glycines
  unsure (1)..(2878): unsure at all n locations
aaaattttggaaaaaaatccagttttttggaaaaacaacaaaaagaagcattcaaaaggtgaggaaaagaaaattaaaacgaaaataaaattaatcaatttaaatgcttatttacatttattaaaaattaattggattttaagcaacttcaaaaaaaaaaatcgaaaatgttcgaaatcggggttaagggttcgaaattttattgatatgagttcagattcgtgcttagcgaccccgaaaacctctggaggcatctttatgcctcaaaaaaaaatttttcttatggggtataaaccagggatggcattccgaggccccaaaaattttcggaaatcggaagtcggaattctgtgccatccctggtataaaccacatagtaccaaaaaatttttttgtcccacataaaattcaaatttatccaaattgtttatgtcattcgcccaccttaagctgttgttgttgatcagcaatcaattcattgtttccatcaaattgtccatcattttccaaattaattgcagcgccattcacttctaaaaataccataatttaatcttttttggttgaaatattcatttaatttcagttttcaaactttcaatttttctcccatttcatttacatacctccattttctgttgctgtgaaatcatctccacaatttattgaattggtcgaaattgacatttttgagtttgataccaataaaacaagcttggattttaaatttcctcgaaagaattttgttgttgttgttgaataaatgacagggaataaaaagacaaataaaaataaattagagttgagcgggaccgggaattttgggcaaacccgggaccgggaccttttcgggttgaaaacccaggaatttttggctgggaaaaccgggaaaaaaccgggactagtcccggtcaaaaccgggaccttggtactcagttgtccgtgttcaggtcccggtcccgctcaactctaaaataaatgactgactattcattcatttcattttgtttaggtgtcagtccctttcttttcaaaatttaggtcggtttgatttctcatcaatgttgaaaattaggcatgtgaaggaatagaagaacaaaatcaaaattgagaatttggttagacatttttttggcgagtaagagaaaaaaggaaatacaagaggaaaaagagagaaagagagagaaagagaaggaggacagaaaaaaaaactatataatgctttttggcgtaaattttttctaattttcggaattttcttcgctaaaaatcaaattttaccttaaagtaaaaaaagtcatgaaaagcgtcaaaaaattgaaaaaattttgaaaaatttttgggcatttggccaagaattttggtgccaaaaaagacattttttcgaaaaatcgctaaaatttatgacaaaaactgccgaaaccccaaaatatgtttttattcccaaaaagtccaaaatatgttatttttgagcttttcatgtgatagcatatgcgcaaaaaaaacatgtaaaaacatataaatccgttccctgcttataattttatttagagagataacgaaaaaatgagttgtgttatctctttccccattttatttttccgccaaaagtcatttgaaaaaaattgctttaaaatttcaaaaattatcgaaattttaaaaatgatgttgattttgcctttctctcccctcgagcccattggcaacaatttaaggcgaataattacgggaggggtcggtttagtctggccgttttagtctggcaagctgattttgtgccatattgattctaatctgattttttttcgaaaaatgtttaatttaatactaaaacatacattgaaaaatcattacgggcacatttcataaatttgagataatgtaccaacgagataatcgctgatgatatcgggattaacattgacattggcatgcccgtaagagtcgaagaattctcgcatcggcgatatcaccacctcgaagtccaacgaaaagttgcaggcgaaaaattcggccatctttgacaatcagttgaggcatacgtgttcaacgcttcacacttgaagtgagaaggcagtacgtaatcaaaatccaaatgaacaaatcaaattttggcataaaaattaggaaaagttgacctttttgtcgcagctttattcggaaaagcagctaacattggtgttgttgtgttctgcaagacttgtacacgaattgtagccggcgctttccacgtctcaactgcacgccgttttagctgggtcacacgtcgctgacactccactgctcggcgctcatgtcgcatgtgtggcttccaataattttgaggacattagcattaatgtcaatgtgtaggctgaatttaaaaaaatattctttgttttatttttgcatacacctttgcatttgttattaggtccgaaaaattcgcaacgcaaacacttctttgtaggtgaacagaaattttaaagttatatataagtatatgctcgacaaaaaatgatattttataaaaagtaattaatttgtgggtgaaagagctaaccagactaaaccgaccctctgactaaaacggccagactaaaccgaccctctgactaaaacggccagactaaaccgaccctctgactaaaacggccagactaaaccgaccctctgactaaaacggccagactaaactgacccggcccgaataaattaaacgcaaatctcaaatttggatatgtataaaaacaaatcccctttttattgctcacccaatgcaattaccgtatttgctctaattatcccccaatctccattaatcccccaatctccaattatcccccagtctaggaaagggttgaaaatnaatccccagtctccattatcccccatgggg

SEQ ID NO: 12119 - DNA, 1210 bp, Heterodera glycines
  unsure (1)..(1210): unsure at all n locations
aaaattatataattaattcacnagagatttagaaaacctcgaaaatcccttatggcctcggaccaatgatttcctagaatttataaaatttaatccataaaaatttttagaaatgaatgcatcagtctggaaaataggtctttttgaaaaattaaaagatggcaaaatggcggagtgccgcgaatgcaaagcaaatggaagagccaaatatgaatttggcctgccagacttcagcaccaaatcgttcaaaaaccatctttttcaacaatccatgctaattcggaatatgtcaagaattttgaagaactggagaaggcgaaaaaaaaatccaaagaaaaagttgagaaacagccgacgatcgaaaatttaataggcacgaatttgaccagcagcggtagttttgtgttggtaaattttacggattttggttttttaggcattttgtctgtggctgacaaacgaattatcagcatgataacctgtaacaatctgtcatttggtttgctatctgacccgacttttaaagctcagtgtaaatatgagctgaaggatgaaagcgattatcggtaaaagtcaaagcaattaaaaaataattttttaggaaaagagttctcccggaagcatacaaactcgtcaaggcaaaaatactcaaggatttagatgattgcgaattttcaaaatttgattttattgacgcgattacatttttgattttcaactcaataaatttgtctaaaaattatcccccccccccagtagtattgggataaaaatctggccccccctgggcagagagatgcgcattcactataggagagtggagagaattagagaaaaagagtaaaaaaatatgcgcgagaaaacagagataagtgattaaattataaagccccgggtcactactttgaatgctaaaatcctcgtccacagcgcagtgcgctaccgtttttgtgttcccccaaattaagcgatcgatatcaacggaaattatcgatttgtgaaaaatttgaatgcacacataattatgaatagggcttcgatttttaggctctaaaaacccaaaaataggctctaaaaatggaaaataggcactaaaaaccctcatttttaggggtgtaaaatgacaaaatgtattcaaaaaagtaaaaatattctgccaaatcgttaatgcaatgcataattttcaaaatcacaaattctgtcaagaaaa

SEQ ID NO: 12120 - DNA, 4103 bp, Heterodera glycines
  unsure (1)..(4103): unsure at all n locations
ccgcctaaancacaattcggagctacatattatantgagtcttttaaaaatttattttaataaatatatcgcattttgtaaaacagacagaacgaacatttgaaatgtacaatagtgacacacaagtcaataaatacatagcgaacaatacgaaggcaggcacaattaagtggcatggcacagattcttttttattggggaaacaatttatgaaatgattgatcaattctcttcgcgtggctttctctgcttgaattgcctctcacaacgatttggttctcaattcggatgcagcggcagatggcagttccctaaaaacatagaaaaattacgtacgaatcggaccgattccccgccccgtccaatgactcacccaatttcgttgtcgttgaagccaatgtggaccaaattggcaggaacatcgtccataatcttcgcaatgcgccgccaagcttcaagctgttcatcaccgaaatccatcgggaagcgtacaacagccactttcgtttttaatgctccgccaccattcttcactttgtaaacgcgacttgacatggacagccgttcttgcgtctgatggttctccatttgggcaccacactccttgaagcggaagggcaacttcgagatgacaatgtaattgaccgggaacgcagcagtggtgaaggactgaaattttggggaaatgaataaaaaatgacggatttaaagatgcacagcaccaccttgaacaagttgttcacaaagtcgttccatttgccttccttccatttgttcagcttcagtgacaccggtccgtgcccttcctcgcgctgcgtgtgaacccacgtgtacaattcacggcatgtcgggtcaacatcagcattctctccatcgacagcaccgtcagcagacggacactcgggcagcatttgcgtgtggattcggtgcaggccggcacagtcgaacagcacggtgggcgacacgtgtttacggagcatggccaagtcacacttcttcaggaacaaagtgctgatcccatcccgcaacagcggccaaatgtgtcgtgccatcactttccaactgcgatattctgtgaagtaagtggaaaattccagcgcaatgtcttcggcgaggagacggcgaattgtgcacagaaaattgatgacctcttcgttgatgtacctgcagaaaggaggcaaatgttttaaggtcaatttggaaagcaaatggccaccaaatggagattgattggaagccgacgacactgtccggcagcggagtggtgggcaatggcaacgtgctgaagtcggagccgtcgatcgatgtcatgatttctgcgcccgattcttccgtcatccgctcacagatgtgaaactcgccgaagcaccacttcctctgctcgaaatgcctgtccaccaaagtgttgaaccgagcattgaccagcgcgaacttcatgccgacttctccacgattgatccatgccaatgtgtccaaccaaacgtcgtcgcagagattgctgaaaaaaggagtcatccatcattatctttcgaaaaaagattaagctcgcttccccacatttggcccatgcgtcgctgctgttgctgatgataaataatggtgttgtcactgtgccgtttgactggtgccgttgcgcccacttctgcgtcggttgtttcgactgctgcgtcgttgcccagaaaaggaggaaagtgaaatgaaaatgaataaaagtgaggacaatggccgaatttggttccttttatactaatacgtattttttcttctgcaaattttgtagtgttcagcaaatgcaattttcctctaatgaaatttgtaattactagagcccggcgggatcgggactcccgcgggattttacgggagtcccgctcccgactcccgcttttttcggtgaacgggatttttaacgggagcgggatttttacgggattcccgttcgggactcccgtcccggaaaattttgaactcccgctcccgctcccggaaatttttacccaaaaacgggagtaaaaatgcactggtaagaattgatttttttggtaaaaataatgatttttcattgaaaatctgttaatatatagccaaaatttcaaaaaaatttcccggcggcgcctatcggcaccgccggatccttaaaatccttaattttcttaaaaaacttgctcaatttgcaaaaattggtcatttttgaacagaatctaacaatgtattgtattaaaattttcaatttttttcccggcggcgcctacggcaccgccggcctccctcctcctccttggtcaccaaaaagttttttcaaaaatacaccgcaaaaaattttgtaaaattaataaagggagtccaaaatataaagttaataaatgttttgttcgaattaattataaaaaataatttatttaagcaatttgaaaaaattttctgatttttgactcagaaataaaatttttttatttcaaatttctcccttataaatttttctatatatttttaatttaataaattgattgccctttaaatttgtgcattaaaaatatttttgtgagtttttaattaaattttcgaattactcccgctcccgcccgggactcccgttaaaaatggacgggattttaacgggagcgggatttttacgggaatcccgttcgggactcccgtcccggaaaattttgaactcccgatcccgctcccggaaatttttttttaccggactctagtaattactaattagtaattatcgttactgttttttctagggttttttgattaccctttttgccacaggtgaattatgcgtataaattgattgattgatcaaaaaatgaattaatttattgattaattaattaacatgaattaattaattaacatgaattaattgattgatacaaaatcaccaccagagaaaaattaaactcaaattcacggtcatgaaaatcttgaatttcacggggttttttggattacggtcacgattcatgtgaccaattcacggtcacggttcacgggactgacgcagcaaaaatgccgttcgaaaaatgaagggcataatttcttcaacttacaaaagtggaaatatacatctcgtcaatttgggacaaattaaaggaccaccatttctgtttatttggcatttgtttctcaggacaaagatttcatttaaatttcttgcataaattttttataaatctcgcaaaatttttaagatttcccggcttggcctacaggcattaccaagtgcctatttttagactcactttttacaaaaaatgcaccaaaattcaccatttttgttccgccttaaccaaatgatcggtcgtcgtctcttaactttgccgccccgcgacgacggacgatgacagtcgtcggttaggcgaaggtccatagtccaccgcttcccccccccggcccctcccaaaagttcctcttttctagacgacatttttcttcatcataaaaattgtgcattatgtaattgttcatttggcccactgtttgttcccctttcgttgccaaatgcccatgaaattcacgtgaacggctgcagggacggacagcgaacggcggcgactgaaggcaattagcagcgaatttgccacttatcaaagacaaattagcagtggacgacgacaatatgacacagcagaatgataacataattattataacaacaatcggtgataagaaaaaaaaattgaggacaaggaaaaagtacggttcaagactctcgagttgtattctgtaaaattctatgtttgcccgtctaagttttgaggcgcagatttgctcggttctcgaccgaactaatctttttttgcgcgcaccggacaaattgtcacttttgtcagtgaggacgaaccttcacccggacgaatgtgggatccaaaaaaccacaattttttttcgtaatatttgcttgattagtctattcctataaatatttccattaatgccacaatggtaaaatggaaaagaagtaaactttgcgagagtctcgagaaaattagtgagatgcattctttgacacttcattaatggcaacaacagttctttctctccctctcctctcggtgacttctttgattatttttgtgctgctgata

SEQ ID NO: 12121 - DNA, 3333 bp, Heterodera glycines
aaattttgcgagacatttcatctaaaaccgatactcttcgtgacatatttctcacaattaaaatcgcgcggagtctgtcgagcgcaaattttaaattgttcaagcaattattgtaagcaataattcttagttcattaaggcaattatcgtgccacattttgtcacgaaataaaatgcgggagaattgtcctgtccaagtttatcccttcagtaaatgcttggcaacactttttattttaacaacattctctttttcttagcaaggtatttcattaaatgtaatatttatttattttaatcttcaattttatcataacgagtaaaattaataattaaatgtactaacttaattataaataaaaaaatgcttttacaaggctttaaaaaatttatcgggattttcaattatggccaatttggacaactacggcaatgatacggtaattaaatgccaagataattatatcatagccaaatttgcagttttatttggccttcaaagatgtccatcccagctggtcactgattggatttgcaggaatttatggaatcattgcactaattggcatcattttcaatttttctgtaatttttatcacaatcaaaaaaaagttggtttgattaattttaatttatatcaatttaaccattttttttataattttacaaatttatttttggtcactcaatggcacaaccaattatcttttggcactttgctgcttttttgaatcgctttttcaacttggccatttcctttttgtgtacaacgcattttctggccagaatttcattgagtgtcgcctagcagcaaaaattttatttattcctttcattggaattggtaattttaatataaaaaattatagaaaaatattttttaatatatttaaatttaggtggaattgctccagcaatatttttcactggcattgatcgactgattgcaattgctttttcggaattgtatacaaattacaatattatccaattttgttaattacagtaattttaagccatgacaaacttaaaaagcaactgtatttggcgctgctaacaattctttgtgtgttctatggtttctgctactctgcttcggtgtaccaaaattcaaaattgggtgatcagatgaccacgggatcttttgattttttaaaggtttgattttgtttattttatttaaaactatttatttttagaatggatcattattaaatacagttggttttttgcttgtttcaatgactttcattatttatgtttgtgttggaattgtgatacgtatcaaagcatcaggtaaaaatccacgctaaattatgcatgccccaatttgcccgattgatggacaaaattgtttttattcatgttttaaattttagtgtttaaaatttttgactaattaaatcatgcttatctgggatgggccaaattgaaaaataaaaagcgaaatttgcgaaactgaaaaatgcgaaatgaaaaaaaagcaaaatgcggaaagccaataggtgcgtaaatgcgaaaggcgaaaagcgaatttttttcaaaaatttaccaatagtcaaaatcatagattttgaggttgtgatgcaaaaaacaaaacaaaatttctgcattttccggttaaatccttttctcagatcacaaaaaatgacaaattctacccattttgggattaaaatttcataaatcaaggtaaaatgagggtcaggcagtgccgacaggcgccgccggaaaatttttggaaattgtaattaaatgtgatagaaaaagttgcaaaagtttcaaaaatttacaatttttttaaaaaataccgaaaaaggcatgaaaaaagcaccatacgtcaaaaaggcacgaaaattacgtgcccggaataaggcaccaaatcgcaaaaaaaagcaaaaaaaatgcaccaaaaagtttaagatagaaccttctgcagcccaaaataataataaactgtaagcattcgttttaaaaatttaacgctccaaaaatattcatttttaggggtggaattttcgcattttgcgccaaaaggcgaaatgcgaaatgccaaaaaatgcgaaaagcgaaacctaggcccatccctgatgcttattgtcttggattcataattgccaaaaatttgttttaattaactctttttttaggtttgccatccgctgattcgatcaatcgtcgcacttttcgtgcactttttttcattatcactgtgaatgtcggcggttattggttttctgcaatttcccatttgctgttaattcccacaatttcatctccgatcactgcttggtttggccatgcaattgccgcattttctgggattattggcgcagtgtcaaatggaccaattttatattttacaaggtatgaaaatttaattttttttttaattattttcaattttagtacggagtatcggcaagcattccaaacggagtttccatttgttttcagacgaatttcaaaccaaaatcaagtggttccactgcagaatacacaattatgagaatttctttgtaaagataaaggaaatttaaaacttactagtatttaattgaaatgacatcagtttgtctaattgttgtcaataagtattaaaattacaactaattaatgaattttcatataactcttttgttgaaattatgaaaatttcactgaaaaatttttaaataatttttctttgtccatcattaatttatagataaaaggtaaatttataaattcgaaaataaaggaattaccgataaattttttaaatcctaaataaataaatttaacatttaatgaaataccttgctaagaaaaagaaaatgttgttaaaataaaaagtgttgccaagcatttactgacggacggaacaaacttgcgcagcacaactcccgcattttatttgtgacaaaatgtggcacgataattgccttaatgaactaagaattattgcttacaataattgtttgaacaatttaaaatatgcgctcgaaagattcccgcattttaattgtctgaattcgtcccgaaaaatacacttacgtaaagggctttaaaataacttttgacaaattgattagggtttttactttttaatttaagtttttgtttttgtgagttccaagaaaattaattaattgaataaaaattccttcattatatttttgattaacttcttggtcaaatcatttgcattgggaattagtatgtaattaaggaaaatttagaattattccggattaacctgaaaatcaattaatctttagcttttttaccatacaaattctatatgaccaacaaatgaaaattaattaattgtgaaataaatttgggttttta

SEQ ID NO: 12122 - DNA, 2523 bp, Heterodera glycines
  unsure (1)..(2523): unsure at all n locations
attaatgaattttcatatactcttttgttgaaatantgaaaattcnactgaaaatttttaaataattnttcttgtcccatcattaatttatagataaaaggtaaattataannttcgaaaataaaggaattaccgataaattttttaaatcctaaataaataaatttaacatntaatgaaataccttgctaagaaaaagaaaatgttgttaaaataaaaagtgttgccaagcatttactgacggacggaacaaacttgcgcagcacaactcccgcattttatttagtgacaaaatgtggcacgataattgccttaatgaactaagaactattgcttacaataattgtttgaacaatttaaaatatgcgctcgaaagattcccgcattttaattgtctgaattcgtcccgaaaagtacacttacgtaaagggctttaaaataactttggacaaattgattagggtttttactttttaatttaagtttttgtttttgtgagttccaagaaaattaattaattgaataaaaattccttcattatatttttgattaacttcttggtcaaatcatttgcattgggaattagtatgtaattaaggaaaatttagaattattcctgattaacttgaaaatcaattaatctatagcttttttaccatacaaattctatatgaccaacaaattaaaattaattaattttgaaataaatttgggtttttatcatcaaaaaaaagccgcagaaaaatggtatttttcataaattggaatatattttcgaaacgtcaaataccttctgagtaaaatttagattttttttttgtaaattttcatttttgaattttaaaaggccccggtaagaatgtatttgcaattcaacaaaacccgttcatgccaatgcttcgtcaatttcttctataacaaaaatgccaaatgtgaaccctttggcacaaaattcccaaaatcaaccagcagggtaattaaaaaaaagaatcttttttttaatattaaattcattaacaatccattaattaggcaagagcagagtttcgatctcaaaattttgaaaatcctcatttcagccataaaaaatcctcatttgccactaaaatacctcaaaaaaatcctcagggaagaaataatgataataaaaattttaacaaaaattggtgcaaatctttttttttgaagtcattatttaaaataacaaatattttatattgaaaataactagggcttccttttttaggcacaaaaaatcgcgaaataggcattaaataggcacaaaaatcctcaaataggcactaaaataggcaaataaaattttcaaaaaatttttattaagaaaaaatatttaattttgggaacaatttttttaaaaattttttcaattcttaagggtgtatattctaaaattttttttgggtcatttctttagggggtgtggtttttcgtttttattgcatttttgttaaggattttttcgaaaatccttaaataggcactttaggcacaaaaaccccgaataggcaaaaataggcattataaaagtcatcgtagacacctcaaaccaagcggaaaacgcgtgcattaatgacaaaaaaaaatttttttctttattattattgtacataggtacattgtgaggaaagtcatatatgtagcaggtgaatgagttgacatcatacaagaactaatgaaaaagctaatattaaatgatcttttcgtaataagagaaaaaacaatctgtcataaattaattgacccgaacgaaacatacagagctaacacttagttgttaattttttttatttaagccgtaatttgatataattgagaaaaaaagtgattttttaaattctggcaaaaagccacacagagctctaataagtatatcagccatttttaactcataaaaaaatattttgaaaatttttctctcatttattatttatttttttatgctttattaaattgaagaaaaaatttatctatcaaattataattatgataatgcgtcattgatgacatagtattcattatttcaattaattagatgttaggagtttgatgattacatatttagttaataactaacaactcggccaaacagtccttttcaaataaccacacttttaagaagaaaaaaaaatcagaaaatatttttaacttacacaaaattgtgtaaagttaatgcataattctttttaaattttctttcaatttattgcaaacatttaaatgataatattaacaatattttttaaatatctatttttacaaaattttcacactgcatttaaattataaagcggcttataaaccgcaattatgcttaaataaattaaaatttaggtcgtcgtccgatatattgtcaagccaatttagattctaaaaatggccactttaaatgacaacaataataatacggtaattaattggtaaaaaagatatttncttttncnnccatttttcagttgtatcttttaaagaaagatgtccatcccagctggtcactgattggat

SEQ ID NO: 12123 - DNA, 2645 bp, Heterodera glycines
ttaaggggtgaccagcagtccacttcatcacgttacccccccccaaaaacaaaagtacagaaagtagcaatttattaaacataattaaattaaaattataattttataatttagtcaaatgccattgatgaaattggcatcgatgatggcttaaatgagctcgaaattggcgagtcttttctgctcagagtgccgttcccacttcggctcccattttgtcacattattcttacggtaattaaatttaaaaaatataaaatatttaattaaattttagttttacgcagcggactctcagcaaatgatggtttgaaaaattttattttttgattttataaaatttaaatttcagggattttgcaaattgggacccaccggaagcataagcagagggacaatccaatggagacaaatgatcaaaaaattgggtatgttttattttaatagaataaatatttgtaattattaatattaattaaaaaaattaatttttagattttttaaaaattggatagctttttttacttataaaaatcgaaaaaaataatttaaaaattgaattttcggcgctccaatcgcggcttggcatcagctgattgtgtccgatgaatgcccttcttcgtctgccgttgcacctgccacgggcagtggccaccgttcgccgccaccgccaccgtcggacgaacgccgacataccgtaccccgtcggcgtaccaccgtttccgtgccgccgcttactgttggaacgctgaaagcacttaccgcggcggcgcaacaacgactccgtgtaaaagcaattgaaaataattaatattaattcccgcctcccttgatttaattgatttggttagggtaattattaattattttttgaaatttaattcattctaattcatttaagaatgaaccaaagggacatcataacaatgccacgtcgggcaaagaatgtgcaccaattcgggcataaatttccaagaataaaaaataaattaaaaaattgaattctgtcattcattaattacttatcgagtccaggggtggaaaaggcttccgagattccggggtattatcgtgccagaagtacgaattacggataatttatagggcctccgttcccacccctggccataattgtattttgataattaaatgaccatactcaaactatgcttaattgattctgatgattaaattactttttttatccattttataatttaaatatttttgtgtaaatttaaatcatttatttattttgagcgttggtcgtgaataattgggctgatccgcaatttatgatatgcttttaatgatttttcttatacattttcatatcgaataaatgggcaatttccaaaaataatttctcccatttaaaaatttatttttaaaaatttctagtaaattaataatgcatatttctaatcatttttctctcccaaaatctgatcgcaatgatttttcgtccgattactttttttccggtcccaaattgcgctttttgttggctttgcttttggccggcgccattaagccatcgccgtcgtccatcgtttcttcagctgttcagctgcacattttcaattccggtcggtcagcgccgaccaaaataatgcaaacagaaaaaaagatggaaaatgggggaggcgcaagatttgttacgatttttgtggccaaacgatgggacggacggacggaccggacgaatttggcccaaccatttgatatgaagcatcaaaaaaagggtaaatatgggaccaaaaacaatcggatgagcgaaaatgagagagagagagagagggacggattgggcggcgacggagaaaaagtcggacgtacgaaaattgggaaaaaagagagggagggaatggccaagggatgggccaagtgcagcttaaaagagtgcttcagcccattggctttatcattctttcattgttgctttgaaaatggctttttgttatttaattaataaaaaattattttagtagcggtatttctttaaaaagcgcctttttggatttgcagttttttcaaaatttatttgaagcaaaaattaagctaaaatattatttgagttgccctaactttccgcttttaatcagctgtcaaatgcttttctatttttaacgaagaattttatgggttttcattttttagattaaattctagtgggctatttttcattgaattttttttcgtccaattatttttgagtttttttaaattccaattttaatttttcatttaatttcgcttaaaagttttccaaaatgtcctcccatcttttgttttccttcttggtcttttgttcgctgctcatttccgccattttcgcctgtggaggtggcccggcactgccggctgaccctttcgacccattgggcccgtggcatcaacgggtaattagctaattatgcgttaattaattcattacgcgattttcgcggggattaagaatgctataattagttagctattaatgataagagtcctcaataaaaagtgaacacatttgcatatttaagcatttggactgtggcattccgccatttgcctatcgactgccgagcggttggttttggcatttcaattttttcaatatcacggtccttaattagccgttccatgtctcgggccaattt

SEQ ID NO: 12124 - DNA, 2280 bp, Heterodera glycines
  unsure (1)..(2280): unsure at all n locations
accaaattaaagcaaaaaatttgggcccaaccattttaaagcaaaatgcctaattggggtgaattaaaaaaattagggaatctttccccaaattattcattttgttctgtcccaaagatgcccaagcaaaaatccacgcaatttgggtgaaatatcagccgggagatgaatgcgatgatgagcaggaagcgacgtaagtggggaaaaggatgaaaatgatgccaacgggggaaaagcatgccggatggtttgaaattcgtatttttcaagtcgcgcagtgatcagtgcaattccggaagaggtgagtgatcgaaaaacatttatacaaaacaaaaatgagtgaaaatatttggaactttcctagattctggaaattttcggagatcgaaattatgaatattttaacttccttttatttcgaattttaattttaatgcgtttcaaaatttgattaattaaaatcagccgatcactttttttgcttacaattaggttcgaatgcaaacattcaaaggcgtttgtgggccgggctttttgaagaacgaaagtggcgaagtggtggacaaaattcgccacgtttggttcaacgacgaactgaacgttgagcagaaacaggcggaggcaagaaaaaaagagggagacaaaacgccaaatttaagtgccaaaattaaaaccattgcccatttcagttccgcaaaattgccaaagaaatgctcaaaggcgaatcggttggaatcggagaaatttaaaataaaaaaaaagaaatttaaaattaataatttttaaattaaaatttgtcctaaacccaaggcgaagcgatttgatcagtttgaccaaaaactgtccaaaaacattgcggaacgacagcagacaatccaagcgatgtcccaggcgggccgagacgcgtacaacaaatggacgaatatgcgcaaggaggtggacaaataggcataccgtattttctctttttatccccccggggggattatttttcaacctcctcagaaagggggggggggtaattagacacggggggataaatggagaaggggggattatttttcgacagatttattttctgtaaaatttttgaaatttttgaacatgtcgccaaaaaatgtcatcgcgtcaaaaaaataataattttttattgcatttttttaaagaatttgggaattttacatgaaaaattcgaaaaatgctaaaatattttttaaaaatattgaaaatccaaacccaaacatattttttccgatattttttggaaaatttctcaataaaaattcaagaaaatcaaaaaatacactcctaagactgacctaaaatttaaaaaaaacttaaaaattggggcaatggtaaagttttgtggtttcttcgaaaaattatttaaaaatttaagaaacacattttctaggctggaaaaatgtgctgatcacgaatctgagctcggattttgcaaaatattgattttatctatgatttttatcaagtactagattttttccaaaattttaagaaattagtcgggcgtaaaaagaacacacaggatgttgtagagctcaaaaagagctttcgaatgagctattgaatgtatggagaagtcatgcttttagttatttacgattttttgattaattactagcccttaagggtcatatgagacgggggtctggggttcgagcccgcttggctgtgtttattaaatttttaaacttatttttcgaagaaaccacaaaacttattgccaaaattggtaaatttctcaaaaattcatccctcaaattttttttcttaacaaaattatgtcactattcgtcattattttggacttttcgccattattttggcatttttttagcatttttactatttgtttttttttggaaaaatggtttgatcactcacatttccatttccccccccccnccccccgggggggggggggtaaatggaatttttatttatcaaaccatttttccaaaaaaaaacaaatggtaaaaatactaaaaaaatgccaaaataatggcgaaaagtccaaaataatgacgaatagtgacataattttgttaagaaaaaaaatttgagggatgaataattttgttaagaaaaaaaatttgagggatgaataattttgttaagaaaaaaaatttgagggatgaataattttgttaagaaaaaaaatttgagggatgaataattttgttaagaaaaaaaatttgagggatgaatttaagggctagtaattaaatttcaaaaaatcgtaaataactaaaaacatga

SEQ ID NO: 12125 - DNA, 4124 bp, Heterodera glycines
cgcttggcgcctgagagagcgatcggaaaagtgttcaattcatgtatggcaccgagaatagtcttctcaacagctgccatggctgcgaatttacttcatggtgaaggaaacatcactgatgcagatgttttgctcgttgatgaaagcactcaagctcagtgggcggtggtggttcacctagttgcgcggatgcctaagctcaaggcattgcttttgacgggcgatcggcatcagctcggagtgcatcttcaagaactacctgacattttccactccggatatggattggaaagcgtcatccttcaagcagaggcttcgatagggatgaactacacattcctcacaaagatgtacagaagccatccatttttggcaaagctcatcagctatgcctcatatgaattgcacaatgagcaactcattccagcaagaagcgctgaagaacgctcactcatcacgggctcagattttcttctgccggttcaagaatgtcctgtgggactaattaatgctttctcatcattccgtgtggacccaaaaagcgattcgctcacagatgaccatcaaacagaagtggcatcgttcttggtacaagcacttttggaacattttggcaacgatttttcgtcaagaataatcgttctgtgtatgtacacgtaccaaacttcggaaattgaacgaaagctgaagcactgcggtgttcgtgcactcacagttgatgcctaccaggcacaggagtgcgatgtcatcatcatagtgacaacaagatccaagtattccgagatgggatccggaagaacggacaacatgcacttctttgaagacgatcaacgggctactgttgctctctcaagagcccgccacgctgtcttcatcattggagatttggtttcaataagtgcaggacaagtgtggaagcgcttcatcgaaatggcgataacaagaacaagcgtagtccgagccgagtatgttttggcacttttgggacgaacactcgtgaggtcgtcgacatgcctatttgattcggccaaaagagaatcggtggaggatgaaggctttcttgaaagttgggcattgaagcatgggttgcgcctggaccgaacgaatgcctttggacaacaacaatcacagcagccgcgagctccctcattccaattccagaatcgccactttcctgcactacagacgacagggccctcagatcaagccggtccatctggcaacggtggtcaacaaagaggtgcgcctactttggcaccacagtatggaagaggtcaaggaagacgtggcccggacaaccagtggatgcactacggcggaaacccgaaacgacagaagggtggcagacgctgaactcacatgatgtcctgcgggtctcacttctctccttttcttcaatcagcacggtatgtctttcggtcatattttttttattattaattagttaggtaattttcatttttggcccctatcacttaagcactttatttcctttcatttttctgcactcacaagtttttttttcatttcatccctccctagcttccggtgttcgcaccgtttacgctgtgatataatcagtggggacactttcccaccgcattacggttttaatagatttccgctatttttttttctcaaagcgattttcttttacactagttccgataacaaaattattgtaacactggaacgctagccacgcccattatcaagggcctttaatctaagcatttcacattcattcattcattcttccattctttcgttttactatcctctattttagatactcttgcacaattccactgctaattctcatctcacattcccattccctctcattatgtttcctttctctggtggggatccacctaatcgaagcgctgcggcgtcaaacaatgcactgacagaccctgaggggctctccaatgatttgcctgagttatcagtagttgataaattaatgtttgctggaaagattttaagcacaccagcacggttgtctgatgtggacaagctccatacggacttagttcggactgaggatggtgtcaatcgcatgacacgtcaccttaacaggaagataaatcaaaccaatagggacttgactgaactcaaggatgatactcaaaccttgataactcaagtaaatactcttgcaaatagttatggtacagttcaagtgttgcaaaaccaaaatcagtcaccattagtcaacaaccctcctgtcttaaattgggcaactccctctccactcaggaatccaaataatagctttggcaatgctaatacttcggtggttgaagccatacatagtgaggaagaggatgaggaatttgaattaaatccttcgggattccatcatgttaacatgcttttcgctgaaagcagtccctctttcacgatcttctccggaaattctccattagaattcgatcgatgggcaagaaagttcatggacctgcttgactgcaatggcagaaagtgggatgattctgaaaaggtggcacgcctcaaggcatgccttgatggtgaaccaagacgtatctttgataatttaatgcctgcccacaaagcaacttcttcggaagccattcaaaaaatcaaggaaaaccttgacactccacaaaataaagaactcatctatcaggcactaagcatgtgtaagcaaagggaaggagaatctgtagatgagtttagtgcacgactgattcctctaattgaggccaccacggcggaccttacaactaatgctagtgaggaagtactctgtcgagcatttttggaaaaattgaatccaaatctcaaatttctcactcgaaccctgagtgggcccgtcagaagggattttcaaatattgagaatgaatgcacgggaagcagaaatgatgcatagagagattcctaaatctattccagcacctcttttcccaatttcggaacaacaaaatccgagattcaacaacaccgagccgccgaaccacccggaagccaactttagaacatgggctcccacaggctctaacagagagcctataagtcccagacagaggaaccggaacaattgggataacaatgcccaagcctcaagaggctcttttaacagatcaaataatcatcctcaaaatgacagaagatggaacaatcgcactttcagaaatgaaagacgatggaataatcaaacccctcaaaatgaccgacgctggaatgctcggccagtttgcaactactgtgggaaggttggtcacctcgcgtttaaatgttttaaacgtcgtgaggaatttacccaaccatccaagaatttgaatttcatcagagcaattgatgaacaaaacagattgataaacgatctttcaactaaagtcaatagtttaacttttagaaacgaccaatccgctgaggcggcctctcaaaatataaacactattcaaaaactcaccaaatctagtacagacaaaagtccatctatgatgaatgatactcttaaagcaccctccaaaataagtaattgggaaacgagtaaaatggttcaaccgaaattttttcctgtactaatgggtttgactcttatttcatctctctcttcgactttagttaaagatttcaatacaatcccagctagtccaatgatttgtcaaactcgcgttcaaccaatgccatggtctcttcccaaatttccacgatgccccaggatgtcaattgacacaagcaaaccactaatcaaacaaagacgcaccatctattttcccaattcacttgaattttctaccaaagcctgggcctgtcgcagaattatcaaaagtattcagaaatatactacaatcagtggtgtatctgtagaacaacatcttgactctgaacaaatagtgatgagtcatgatgaatgtctacgaatggcaaacaataagcactgcagcttaggatatctcaaaaatgattcagggttgtggcacacagataggaaaattgaccagacacctcgtccttggttattaggctctttttcctggaagaaagttcagagtgagaattgctttgcctttgaaactgaagtatattcgcacattggtgctacttcaattataactcctgcgggaaccgctcaagctgtccatatgagaa

SEQ ID NO: 12126 - DNA, 1291 bp, Heterodera glycines
  unsure (1)..(1291): unsure at all n locations
tttcttacaggaaaaagctagcgtaaccattgaacatttttatatantttttgagcaaaataaaaatggattttattgctcaaaatgccaatggatttgaccagaaaaacgaatatttggaaatagtatgttttgctaattcatttggtaagtgaataattcaaattttacaaaattcctatagcaaaattttaagaaagccccaatggacaatatgccgaatgaattaatttgaaatggacagacgatgatcaaaaaagtgatcagcttatggtatttcctatttcaacattattttaaatcatatttctcaggactaataaaaaaattttttatataatgaattttttaatttatttggtaggaaaattttaaaaatttaaatgtgatttttaaaaatcatcctttaatttttccttttaaaattcttcacactctcttcaaaattcctcattctcttcaaaatccctcattctttttcgccgctgctcatttggcctccactccctgcaaaaaagattatgatgaaatgcatttatgcacacaatcccccccttcccataccactttggcgcccgcctcttcggtgcgacgctcgggagggtccttcgagacctgggcaaaggaaaaacaaacaaaatatttccttcccatccccccctctctacctcctccacaccaacgcgctcaacgcgcagcccgaaacgctggggcgactctcgccccgtgcgacgcttcaaaaaaaaagaaaaatgctaaaaatagggggcaggaaaggaaaaggcaaacattacctcgcgcaccacgctgaacacctggagagggcgaggcgcattgtcctcattgactccatccgggcgacgaggtcggcgacgacgaatgccggctccacgggccggcatgttcaaaaacatggcccaaaaaatacacaccttaacaccataaaaattaattttaaaaatgaatgaaaatgaaaaattattaaattaaaattaaaattaaatttacctgggcgaggaaaatgaagaggaaaaagatgaacaccatgctgttcacgcatcccgtcgccttggcaatgttggcgttgttcaactgctgcaccacatcggtgaggttgatcgagacgttggcgttgcagggcgccgccaacaagtgttcggagaatgatcccaaatgagcggtgttcaaacactcaattggtttagtgaactcctccgggcggatgcaaacagcatccgcacggagggaggaacaacggtcttcaatgatccacgtgatgatagtggtacgg

SEQ ID NO: 12127 - DNA, 1670 bp, Heterodera glycines
  unsure (1)..(1670): unsure at all n locations
cgcccggaggcaggaacaccgctcttcaatgatccacgtcatgttcgtgggacggagaatggagctcattgttgatcagattgccaaaaaaaatggggaggaaattcaaaaaaaggataaattcctagcgatttcaaccccttggccattcccacaaaaatgctatggagaaatgattgtcggatggtcaaataatgaaaggagatgcagatgatcagtccatcccctctggccatcccccttccccctcttcaagcccccctttcttacaatttccaacttttgttcggacattgccgccttttgtcatccataattttattcacaacttttgtcaattgacccccccccccggtaaagcgccgatccgtccgcttattcaatgcagagaaatgcaaaacgaagagacagcaaatttgtttgggacgaatgagagaaaaagaaagagagaaggacggagagaattcacacacacactccgtccacttcaccctttcgctttccacacccatcggcgcacagatggcaaaagaataggaaaaagtttgcaccgccaccacccccccccccctttgttcgctgaccaacagccaacgccgtcgaaatgtagaaattttattaataaaattacagtataatgagggaaaaattttattaaaaaatacagaataatgaggaaaaattttttgttaaaaattacagtataatgaggaaaaagtgcggcaaaattccacccccgcacccacgggtttaaaaaaatttttttaaatacagtaccccgaaaaaaatgcggtaaaattttgcgcgaaaatgggccccggacacctgccggtaacagatgttttcacaccctctcaaaggtgtgaaaacatgtgttttcacaccccccaaccccccaaacgggccccgggccataactactcataataaacaaaaaaactgatttacatgagtgctaacaaaattttatttatcatttattgctcattttgttctgataaaaagctccaaggctcaagaaatgaaatttttcattaaaaattaatattttttggtagaaaaaggcattataaataaatagtatatgcttttctctacatagtgaagttgagccaagtgtccagaggataaaattatctttcaccaatgctaatgaatcgatttggtgcccaattccttcgtccatcgacttaagctggaatttggaatgccaaattcattggcaatttttctctcacttatcattggattttttattttcatttcctcacttcttttcacatattccaatttctcagcatctgtgtaaaatatccttttcgcttaaatgggaccaaattaattgttaaaatgagatttttgaaatttttcaaaatttcaaaaaaacaatgaatttagcaaattaagctataaaccagcgcacttgtaccgaagctcaattatcctgtactaaaagggccatggatcgactttactgatttttagaaatagctcacccaccagtagggatgtcaaaaatatgtacaaaaagtagtcaaaatatgtatataaatatgtaaaaaaaaaccaaaatatgtaccaaatatgtataaaatctcgaaatatgtataaaaccccanaaatatgtaaataaaagtcccgatttttgttgcaaacacagaaaataaagt

SEQ ID NO: 12128 - DNA, 5865 bp, Heterodera glycines
  unsure (1)..(5865): unsure at all n locations
tttttcattagcctttttaatttcatacttatttggaaaataaaaagngacacattgaagatgtttaaaataattatttatattattgtacactgacaatggtaacaaattaggtcaaatgttaggcttggattttacaaaaatttgaattcgtcatgaatatntaattaagaggaatattggattatataaattaggccagatgttaggatttggtgtaccaaaatttaaattcattgtccaaccgattggtacatatttaattaggaggaatatttgatcatactaattagatcaaattcgcagcttgggttaaccaaaatttaaattcagcgtccgatttgtgcatatttaattatcaaatgcgcggcttgggttgatctaaatttgaattcgtcgtccgatcggtgcatagataattagggaatttttaattttgcagatacatcaaaattttgtcggtattaattaaagcaaaaatttcaaatttaccgacaacacaaaacaatgaaattgggtcaagaattgtgattaatttgattttttggatataaaaggcagtacgaaggtttaccgttcataaaccaaattcataattccctccaaatattgtttttatgcaaaaataaaatatattttaaatagattcattcgcctcccaccctgctcttttcgtttcttaaaatttttcacatttactgtttgcattttctatattgcattattccaaaaaatttaaaaataaaatttgtttagcatttaccataaactaaatttatttattccaaattttaaaaatgtctacatcggaatcaaaaaatggtaaaaaatatacaagtcctcccttaacattaacaatctttcacctacagtaccggacgacgtcgactgcgaaatgcccgatgaacgtgttttacacctcgaatgttttaaaagcggcgattatggtgtaagtaactgtgatgaattccatataaaaaaattttttcctcaattttaatcagatgatggaattgtacgggccggaccgtgctaaagagatgctgatcgatttgcgcgactatgctgaggcgtacggaatgccatgtcagcatgtgaagatgctgttgtacaaaatggacaaaggactgatcaaatggaagggaaccaagccatgaaacggatgatgagtgatcagagattttggctactggacgaaaggggggataattgaactcattggtgctgggggtgatggatgcgatataaaaaaaaataaaattgagataattgttcaatgtttgttcatcccatgattggtcacacggggctcatttctgagcgcccatctcgccaaaaaccgctttgtctttacaattttaaaatgggtgtggcacctggcccgacttttttgcgtataaatacgggctcaccggatggcaatgttcatttggcatcccattttcaaattcgctattcccatggcaatcaacatctccgacaaaaaatcgttgtgcaaccaaatcctcggccaaacggacctcaccgtgacctcgagtttataaccatcagcggtccacgcctctcgacaccccgcttcattccttttgatgaagcgggccgttgtaggtgttgtaagggaacggagtccgaaattgacactgtgatcacgaaagaaggcatcacgctttggtgcacccgcatagagaaggcccaattcatcccgttcgatgttgtgtatgatttgccgggtcattgttttttccgtctgaaaaataagtctcgtgtgttcaatataccctatggcgacataccctcttctgacacgcacaccactaaacgacggacacacaccaatgaccatcaacacgagctgaagcgcaaagcaaaggtagctcttgacttagtggaggccggactaatggcagatgccatgcaggacggcgcacgttggaagaaggcgaaaacagcaatcaatgtgctcggcaaccttcttttggcggaatcattagacaacacttccgctaatgacacttcgctgaaaaatgataccgtagacatcaaaaaagaagaagaagcaaatatggaggaagaaaaggtgcaggaagagcccaaagaaaaagaggaaaacaaggaggaccttggagacattgacaaaaccctcgatgagttcttcaacagtattaaagcatccacttcaaacatgtagaccatcattgtgtgtaaaaatgttaaacacccaagcattcaacgataaagacattggctttaaattaccatttggtctaattatttcgggcccatcgtcgtcgggaaaaactcaatttctgctaaaattcattgccgaatcggaccatttaatcaccccaaggcctgtatcgatgctctattgttttggtgaaatgaatgcggcggtgcctgtacttcaaaaggcgggagtcgatgtgtacgcgggagtcccatccgaggaattaatcaaacgtctccctaagccccttttgctcattcttgacgatctgatgttgtccatcgatgagagatacctatccgatttgttcactaaaaaggctcatcatcaccaatttgcagtggtgtttgtcacacaaaatttgtttgagcgcaaaataaaagtggcccgtctttccgctcagtacttggtactgatgcgggccccaaattcgttactgtccatccgcaacattggcgttcagctctttccgcgtcagcttgacttttttcttgacgcataccgcaaggcgaccgcccggccctatggctatttgttgattgacatgcatgcatcgtcggacccatcgttacggctgcgaaccaacatatttaaggatgaacaggaggaagatgaaggcacagtcgtgttcattcccaaaaatggagcggcataaccaacaacaacaagtaagggttggacaactgataaaagaaaatgcgcattggctctgtgccttggcccgaacgaaatcctccaaaaaatgtaaaaagttgattcgaatggcaagcaccgatcagctgctttcacttgtggaaatttgtttgaatctcgtcgcttcgcgcttccgacttacaactcgacagaaaaaacgattaataccctatgtgagcactgtacgccggatgagcagaacgaaaagtgagcggggtgccaggcgcgtacttgtccagaagggcgcaggatttggcggattgttcgctgctcttttaacacccgttttggttgaattggcaaagaatgtcgtgagcaaaaatgcataaatacccccacatcattattgttttttcatgcaccattcattcatcattcatggcaaataaatttttacttgtccctcaagaaatttaccggggtctcacctccatgtcggacacgggcgatattaatttggatgccgttaggcgtgacttagaccgcgccagggtcgtacgaacacatccttctcgcaaaaatgtcaactacaaccagcagcttaggcgatatttaaaaatgcggcaagagttaacagacaaaccggccaaagttgagctcaccaaagggataagcgtgctgttgaggcgaggcgctgaagatgaggagggtgaagttgtggacactccaccccggcctcccgctcctccaccaccacctccgccgcctggacgacgtccatggcgtgggccaattcctccaccacatccaccaccgccgtctaagagaggtcatcggcgcccaccaagtcctccgggtcgcgctccatccccgccaggaagtcctccgcctcgcccacaacgtcctcccagaccgactagggcatcgcggagagatggtcgtttggagcagtgggagaaaaggcgaaatgatatacaacgacggcaaccagttgtgcgggaccttcttgcggaagcagctgctgcccccttaccggaaagtgatacagatgatgattatatgttggagagtgggttagcgctgccagcgccatcacaatactatggcgacttgcctgtgctgccctacaatgctcaacgtgaaattgagcagatggacactgctcagcagaggattgccatcagaagaaaattaaaaaaggacgaagcatatgatgatgatttggaacacaaaaaatacagggttcattacccaccttcacctccccggcttccgctcccgcctcgtgcgaaagcaaaaattgaaccaccaccatcacgtcctaccgccaagagagagcctaaacaacaaaagccaacaaagtttgagctaaaaccatcaaaatttgactcctatttacgaccaaaagtcgcaccgccgcctcggtcgaaaaaagaacctgaattcccgcttgaccttcggccatccacatccaggcaggctggacacttgcctcccccagcacccaaaattataccaaaacctgaaccgacaaagaggcctgtgccataccgtatcccgaaaagagagccaaaaattgttgaacaacagccacagccgctgcaacaaccccttcctgcttctgccgtcgaagaagaaatgcccaccgttcctccgcctaggcgggggaccaaacgccactaccccgtaaatggtgagaatgatggtgaggtgcgcattagaaaacgcgtgaggcaagcgcgaagggtgagagtacagtactcacccgaaccgggcccatcaacttctgcacaaagggatgagcaacaacaacagcgtgaactgtttgccatcccgtcaaatcagctgaccatgaatcagcgggttgaacgactgtacatcaaatgcaaccgttatgcggatcgtatgggcgttcgaggaaatacaattaacacagcaaacggcaagccgttggcacatagcaatttgcgaatgaccatcaggtatataattgacaggagagcgggccgccctaccattaagccacctggagcggccatatttgaagagaggcttaggcaagatccaattttgtattcatggacggctcctccaaagaaaacagcacagagcaaaacaacccggacgccgcagacaatcaagaaggaatttcgcccgaaaaagtggagttgatcaactccacgcttgacaagctgtacaacgacccatcctccccagcggcgttcgcaggtgttacagcgttgtggaaagaggcgcgaaaaaagttgaaaaatttacggaaaaaggatgtgcagcattatttggaggggcaccgcacctacactctgatgcgcccccgaagggtgcgctttccaagagccaaaactgttgcggctgggttcatgaccgatgttcaagtggatttggccgattttcaggcgctttcgcgccacaatcggggtcaccgatacctgcttgttgcggttgatgtgctgtccaaacgcctgtttgttgtaccgctgaaaaacaagagagccgacgagatgttggaggcattcagacaactcatcgaccaaatgccaatggtccacatcgcatcttctccgacaaaggcacagaattcaagaacagattgttgaaggaattcttcgatgagcaggaaattgagaagcatgagtcagtgcattcatcagtcaaggcatcggttgctgagcgggccatccggaatgtgaagcagcgactgtaccggtattttgctcaaaaggagacgctgaattgggtggatgcagtacagaaaattgtggacggaattaacagcgctccaactcgtgttcacgggatgcgccccattgatgttgacttttcaaatgcgcagaaagtgtggaagcgattgtacggacaccctgcccttcaaaagcggacgccacgcttccgtaaagatgaatttgtgcgcatgagcagagagaaagggcaatttgagaagggatatttaccanaattatggagacgaaatcctggagattgat

SEQ ID NO: 12129 - DNA, 1392 bp, Heterodera glycines
ctccctcgccctcctcctcgccggccgtgtccatctcctctttatttgtcgtggcggtgaacagttgcgatgggtaacccaaattgagcggcgacggcttcgattgatgctttagggtggtcagctgattgggccgaaaagagagaagggactgagaagggcattttgaagctgaagagcatttgagcaatgtctaaacaaaggcaaacgaatggaaaagcgaaatttgaatttcaaattccaattccaattcgcccactttcgcttcgcccaattcgcgtgaaagtctgtcgcactctctgcgcaattcgtccatctccgtctgctgtttttggagcccattttgttgctccatttgtcggctcgcagctgcggctgcttcgcgttcgcgtgttgcctttaagaaaataaaaatggttttttttaatgcaagatttaaagatcacaaaacacaaatgccaagggttacgcggcttgggcgttacccttttaaaaatatttcaagaattttaaaaacacgctttttagctattttccttaaaaaaacatttcaaatttggtcgataaaatgtcttaattaaattaaattttcgaaaaaaaaattccggcggcgcctagcggcaccatcagcgacggactccttctgtccccatttttctttttaggaaaagtatgccgcaaaaaaagtagcccgaaaataactgctgacaacgagcaagagagcacaaaaaatggtcaatcgcaaaaatagttttacctcagccccaaaattccttgaccctcctcccccccccccccgggggcttcgccctccatttgcctgcaactctctccgcaactcagtccgcagtgtctcttccgctcgcattcgttccgcgtgttcccccatcattcgttgcctttcgctcgcccaccgttggcgttgcgtttgctgttggtcgtgcagcgaattgagctcctccagcagtgttttcgagtgcaattgcccactgcgcaactcctcctccaaaaaggaacattttgcactgaaagagacgcaaattaataattgccaaagcaaagggagggagagggcatttggaagccaataaaaaggaaattgagtgaatgcgagtgccattggcttgccttaactccgccatttgtgcgttacgtgtcgaaagcgtgtcgaacaattgctgacattccgaagacaaagcagcgccaccgccaccatttgtcgtcgccgcggaagtgccaacattggattcggccaaagcgaactcggcacgttccttcagtggcgattataaggtggaattgcatttcccttttgcaacaaaccttgtacgccgcgaactcctccttaagacccgccaacatttgcgcgttcatttcactgtccgcgcggag

SEQ ID NO: 12130 - DNA, 2235 bp, Heterodera glycines
aataaaattgttaaaatgttttttcgtttgtttctctttgccttccatttgttgagttaattcggcaatttgtgcatttttggtgcgcaattccgagtttatttcctccttttgctgttgtaattggtcaatcctttgggaaaactcctaaaattttggggtggaatttatttcttgtttcttcagttgtttttgctaaagggtcacccatttttaaaagtttcagaattaaaatgggaaaatcgtaaaatatttaaacaaaattttgagtacattcagaatcagggtgaaagtttttcaaaataacggaatttataaattgattaaattttaaaaatgcaccaaattttgtttgaaaattattacttttgattttgggatttggggcaaattctccctccccctggataagcctgtcttgtaagcccttttctgattggaatttaattccaccaattcccgtctccgtttgtcattttgtccacctcaacaattgcttccttctcgcccattttcgtggcattgtccgccaattccttccgtgccgcaattaacgcatttttatagtccgccaattccattgcgatcattgcgtcgcctttgcctggagcggagttcgagtccgacgacactttgacagagagttggcgcatttggaccgcgtattcttcggactgaacaaaaaaggggattaataggctaattgtggggacagtctttgcaaatgccctaataatgacaattcgttttttgcctcttttttggcctttgtcagctgtctgcgagtgtccttcagcatgatcagttgcttcttcgccaatttgaccaggtcctcgcgagaaagcaaatccaactgaaaaggcgccgttgggcgatggcaccgaaaaggcaaaccttcgccaacgccgtgccgccgccccccgtgccgtgctgttgctgcaccggcacttcgcctggttggtccttggccattggtccgtccccgtccttttccttcgtcccgtcctttcttgactccgattcattgtcagtttcatcctttggcccattcattttcggcggattaatgtccatttcttcgattggatacaaaacaaacgaaattaatacgtaaatgtgagcctaaactttacattcaaatcacatgaaaatcatttagtaatttatgtatttcttttcgcagtgactaaaacactttttgcccctttttttgcttaacatttgaaattttcggtgcttttcttcgacgaacaaatgaagcaaagctaaacacacaaagagagaaacgcacaattattatttgggttttcttatacaattttgttgagtgagaagtgaacaaatcgtcacaaccacgggaatgtaaacatccgaacaaaaataaatggcaaaaagcagttaaaatctaattttaaatgcaataaccaaacaattttgtgacaatttcaaaaattggatgttacaaacccctgaaaaacttccattttacagcgagttttacacagggaaggaaatgaagattaggacaacacgattttgggagtaattttctaataaaaatttgcagaatcgtaaatgtttccgtaatattttttggtttagtccaaaatcaaataagaaaaaagtaattttaggaaaatgaaatggggagatgaaaaagtgcaaaatatttaaggaaattgacgaagatcggtgccaaaattcttcaacgtgccgtctttgagtgttggatcagccattgcagagtgatatctgaaaacagcaaataaatggcggatgccaatgacaaaataggatttgaaatcaaaatagtggcgatgtttatttgtaatttggtgccgtaccaatgttcgacttttccttgcaggagatggaatagcagcagatttcccggttttggatggactcgagattcatcgcgtcgattagttggccctcgtcgagagcgtcgggaaggtcttttttgttgccaagcaccagcacggggatggcctccaattggggcttgctcagcaattgcatcagctcacttttggccggctcgagtttggatttgtcagcagcatcgacctgaacaatgacgaaagtgtcgtgatgaaagtaaaaatggccaccaaaatgtaccataaaaacaatggcattcacaccgcgacagtaacgctcccacatggaacggaagcgcggctgaccgcttgtaagccaagagcttaaaaatttggggagggattaaatgaa

SEQ ID NO: 12131 - DNA, 1552 bp, Heterodera glycines
aaaaatggcattaaaaaggccaaaattgacccagaattttaagggaccggaaaatggcattacggccaaaaaccaacccaaattggataacatcactctgaataaaaccaagaagtattaacattccatcatttatttcattttttcacagacaaaacgccaaatatttgataacaaaatttgaatttctaccgtagaggggggaccctgttgttttcaaaattttttgtcaataataagtcgagaaaacttctttgcattgaatttttgagatagttgattaaattctgatatcttttttaatcaatttcccaatttaaaaaaaaacgaaatttgaaattttggtttttcgcctttttcgagtttgggttaagaattggtcaaaattggtgtcaaattcgtgatcagagatttacttgctgtgttttttttttgtcttaagtacccataattagcttttcgttgtccatgggttttaaagttgcagagttttaattgttcattgaaaggtttcctttttggtacctttaattgaatttttcttttttaaagtgtctattaaaatggctcattagcataattttgattggcattcgctacgccaattgtttcctttccaattacacaaatgtcttttagcctttgacatcattcaccgtttgtgtttgtttgcgtttcgcctttttttggctgaacgacgccacaaaagaaaatggcaaataaataataattattataaataaataaacaaaaaataataattatcaaatgccaataaatgccattgccccaattatttcgccggcccaatgttttatttgtcctcggaatttttatgtaaattgttttacgcaaattgccaaaatagcagagcaagtgatgccatttattatgcgatacttttggcatttcgtcggagtgccaatgctataaaagcaacggccgtcgcaggacaaaagcgcattcgaacactgagggcccaacttgtgtttatcgtatctgcattaccgtattcttaccattgaaaaccctaaaatttttgcagtatttttttacatttgtttcttaattatttatttcccttttcttaatgatttgcataattaaatgattaattctctatgatataaacagtttaaattatttttggaagattaattaattactgcggtaattttattatgtcaaacattttttgtatttcagcatcttttgtctttaccatattttatgtattattttttaatttttcttcctgttataatacagcctttttggcattcattccaaatttggcatcttttattggtttgtttttcggcattagtcatccagtgccaatttcgtcctcactcactaattaatccttccggcaccgttctctcccccggcatttcccccaccctcaaatattctccaaaatagcgtgagcttcggcccgctttttctttcctgcgcattccggtaaccaatgaagcccctttctcccccgtcccctcaattcctctccgtcccaatgtttcctcccttttccgttaatttcctttttggc

SEQ ID NO: 12132 - DNA, 4303 bp, Heterodera glycines
  unsure (1)..(4303): unsure at all n locations
taaatctttntggagaagttagattttaatatttgtgcacggtaaaataaaaatataaaaatatacattcatcttgtggtgctctatagtttcccgagtcgtacgtacaacaactttattgaaataatatctattcattcattgattttgatatattttttacctcatctttttataatttaaacttctatcattttataaaacaaattaaatcatatgaaaatagtaataaaaaatttctaaaatctaaatgttagaataccacaaattaaataaaataaaatatatcaaacttaaagaaatttcatttgtatattttcactaaataaaaaaagataactatgcttagtatgcgttataataaattagaaaatcataataaagaggaattcctaaacatcgaattaattaagaaatcttttgaaacagtgttgatcatttataataattattgtttgaatatcaaattagaattaaaaaatcaaattaaagccaaaaaaataattttaaaaataaataatcttaacttaaaaaaatgaaataattaatatctttcaatataatcaaaattaaacttaaattgtccttgatatcattcgaaagcctaagtgttttctactatcctgagaaagtttaaaaaaaatttaggcttcatataatttatggccaaaaatgtttgaaaacccggtttccttgtgtacttttggcaataacttttctcaattgagcaaagttatggatagttttttgttgaaaatgttccattttaattggacccaggcctcgtacttttaacaatgagcatattatcactttactctgtgaaattgaaactacaattaatacacggcccatctcatttgactctgctaatcctgctgatcctcggaccctccgtcccatcgactttcttcgcccgttgggtttctttccgcccattttttcgaacctttttgaaaatcctaatacaccgcaaagagactcaactgacagtaccaccacatcattacgagatttgtggaaatcaatttctaattccctgaattcattcaagtttaaatggactaatgattaccttctttcccccagagaacgagataaaaaaataaaaactatttccggtcatataaccaacagatctgtaagtcatctctacccgttggaaaccgaagatgaatattgtaaccgtaatcctcttaatcgtcaaaacactaccacaaaaatataattgggcaaaattccctcccaatttcaaacctaacccggccaatgtgccaccatccccccccccttgtgccaaaacataggccggaaagaaatggacttgggctctccaccaccactagtatcacatcactgatttaattttttcttttgcgacgggaggatgctaatcgcaatttttcccacggcttattcggccgatcacggcctttataacattaaaatttccattttcccattaacattgttttatggcattaaacttcgtttgtttttctcttcttttccgccctcgccttaatcatctcctctgtcacacgctttctttaataaattttttcccgattattggattatcatcttacaatcactgcgatccccaccctatataagaagctcctataagcaaatccaataatcatcaactcaaccattcagcaatgggaaatatcatcgcgcttgaattggcatatcatcagcatccaccagaagatacaacttcccacaacttttggtttttcttcgtcattatcaccatgacaatttttattggagctttgatgttgtttgggatttttattttccgtaaattttttcgtcgccttcccctccctaccaattccagcaaccagcccaaccccgggaatgtacctgatcgcccatactcaccctcgtcaatttccactgtttatgtgattttgatcttgaccctcgttttcctgtcccatactgaggcacaccccaagggaaaaatgggcaagggaggaattttaaaaccgatggcaaaagggtcattacccattattggcacctcggccctttattttggaatggacgcactctttggcaaaaatgaggaagaaagcagcatccatccatccttagcataatttgcgtttattggcttcgtcaccctttttgtcctactcatcatcattaaaattgtcaattatctacgctataaaatacgcccgctcaacaaaactcgaaccccgaaacaactcctatctgtgttagtaactgccccggacaccattgttgcgccacaaaaatttccggatgccggtgtgttatatgatttaattttattataattattggcattttgtttgtgtgcatgtctgtttttgtctcccttttatcttattgatttgtaactgacttatgccctttcctcattcattgagttgttgttggttggtctccttttggtgtgtttgtcttctgtaatgttctgttttacttgaattaaagtgtgaagttgttgtgaattgagttagttttcttgagtgagagctgttttttatattacgtggcgctcctggcttctgggacaactcactgccattgcttaaagaccgggaataacgccgacgacggagctcaaagactgaggctgcaaataaaagaaaatttagtcgagaatttgtcgaagttgctcaaagactgaggataacttcgccatttgagtgatttgctcaaagactgagaagcgaatttgttgaaattgcagacattgttggatttgaattgaaccaagacggttaccgaaaaatgactgcagtgcattcgtttttgagttcgaattcgcctttgaacgtcgtattgggaggcaaccgagggcttgaaaatgatgctgtttggagacacagtgaaattttggatgaacgagaaatgcgacgccgattatttgcagtgagtgccaacaacaacaacctgctcagatgtatgaaagaggagaataaacgtagagagatggaacgaccgattcgatcgaataattttctgcaaaattttgaattgagaaatcctaacaccacggcatttgctcaggtgtaccctcccgttcatgaatcggcacctccaccaaattttgatcgaaatgaaggacaaatgcagtacacacaaccgcgggtcgacaacaaccaagacccgattttcgtgcggcaaattgcggtccattcgaaattaaccgcaaggcatatcacagcaaatccccaacatcatttaactatgttggagaatgaagcttctcaaggccaaatttggcaaaatgatcgaattttggcccatgcaatcaaaagtttggacaatttctcctattcgatgacattgaattcattgccagaattgaagggaaattcgggctcagatcaagtgagatcatttttccaacgcttcgatatcgccactgaggaatggcctgaagctaaacggctaaacgcacttcggtcgaagagttcgggacgcgttgagcgggcacttaatgttgccgtcgcaaacaatccatttcagtacgaattcattaaacgagcattgattcatcagcttgagtcgacagatgcgcgacatatgtcagcttttgatgaattaatgaatggcgtttttcgccggaataacgaagccattgatgactgaaaccaaaaggaggtgttggacaaattctgatcgaaagcggaagaaagttgaaaagaaaccatcaaacactgcgacccaattaaagaaccgaaatttaagtaattgtggtgagaaagggcacaaaaagttcggcccaaaagaacaggtgggaaagaaattcgaagcgcaaaatggcggtggtggcaaatttggaaaaagcggaatgattttttccaagggcaaaaatcccaatgttcaattagggacaattgaaattttggaaggtggggaggagttgaagaaaaaaaggattaatttggacagaaatgatcagcgagaaaaaatcagactaaatgtctcaagtggcggatctcaatcgaatttaggaaaaaatgtgaaaacatttttgaattcttttcgacaaagaagtggttttgggacaattagagcggaggctgatcattggatgattcgaagaaaagtgccatttgatcggggttgggtcgagttgaccgcctcgtgtccgggcccgacttcacattctgcttgtgatcgaccattattgcgcggacttcgatgcaatagcagtgtgctgaatcccagacgacatcacctttcgacagccggatgcgggatgtgcagatgatcggcagggacgcctctcgtcagcggccggggatgt

SEQ ID NO: 12133 - DNA, 1492 bp, Heterodera glycines
gagagctgttttttatattacgccggctctgatgcacccaccgacgaaatttcttcattggccgttgatccctcgaacatcaatgactcgccttcaggtcataattggggtgacagggaaatccaaggaaacccgaatcccccgaaatccccctgcgccccgcttctttccgcctgccaaccgtgcccttcctttgagccgcactttgccgttgtccaactgtactcgcccacaaccttcaccaaaatctgctcaaatcgaacgaacggcgatggtcaaccggacccgcatctcggaaggtggacgaatggaagaccgttgccaagttcgggaagccaacgccattgaacaaaattcgattcaagaccccaccttgtcccatccccccatttctggctgtttccctggacagtctctccacgtccattcacaattccgcgccggcagtgtcgcaaatcgcgacagaggagagggtcctggtaattttggaacacaaaattgttcatacactacagtgttaatgtattgtgatgataaaaactttatgatttaaataattgtcgaaattattcgtcgtgcttagatgaaagatgcaattgagtgataccaatattttaaaattaggctcattataggcgaaagtatgagtaattttctgtccaaatttttccatttgattaagcattttaaaatttgtctcacttttagattagtatattacgtaaaaattaatcaaatcacatcattaatttattttaacgtcatgaaattgttaatattctaaatggtttttatttgcgttattccttgtaatttgtatctataaaattttatttagatctcacgcaaaaaatacagatcaatgtatcaagtcacagatccatatagaaattgtttttttctgaagtattgcgtgtttgaacagttatctatttgtcaaatatgtatctttcaatatttttcatctgctaattaaaagaccatatttatttatggagtttttatcaactcttattttaaaattttaaaattaatattttttcacatgtgttcattaaatagggttttatttgtttaagtcgcttaaatttattatttggacaatcaataaaaatatttataaaaaattttcgaaatatttttatataataatttattttcgtttataaaatattatgttgagtaaggttataatagagttttaatagcaaatctaattattcattatctttaaaagttttgtttttaaataattaatcttaaaaaattaattttttttaaattgaaatcctgaaaaatattatttaacctaaaaatttaaactcttctagtagatttattgcaatcacttcagttaattagattagctctgattagactaaactttgtacatgttgtcaaaaatagaataaatattcaaattatgttttagaacaattaaccagttttagaggtctattatttgctaactccttttaaataaatgaaataa

SEQ ID NO: 12134 - DNA, 872 bp, Heterodera glycines
ctctctctctctctctctatcacttctctctttctttctctctgccctccctctctatcactgtctctatttctttgtctttgtctctctctccttttgtattttaacttttgtacaattagtgagtgcatttggattcgtttattcctaatgttattgcatcagttcgtaatattgttgtattattattattattgtagatttccttctcccctctcccctcgttgaatcataaacttccggcaatttttgattcccatccgtccggatggactctctttccattcctgtctcttccgtctcttccatcccttctgtctctttcttcgctaatcttccttctccctttttactctcctccgtttttcttatctctgatctccattttccttctttgctacacacattccacaaactctcgacgaatgctcccatctccgattttgaatgaatgaaagaaagcacacctttttgcttgaggagcacaaacacaacaaaaatggttatgggaaaggaaaagcgtgaaaaagggatgagagggaagaggagggagagagagaggggagagagagagagaagggaaatggctatctctgaaagtcactattaaatccctaccgggaattggacaccaacttttgtcttctattgtagcggtgaataaagcactaatagcgtgtttgaaaacgcacgaaaaatagttctagacaaaaaatggatatcctctgaaagtcactattaaatcactaccgggaattggacaccaacttttgtcttctgttgtaccgctgaataaaagcactaatagtgtgtttgaaaactcacgaaaaaatagttttttgaacaaaaatggctatctctgaaagtcacta

SEQ ID NO: 12135 - DNA, 2989 bp, Heterodera glycines
  unsure (1)..(2989): unsure at all n locations
caacatcaaacnggattgggacgaataaatatttgcaaagctggtagccggacttaaatctcatcaatcccctcctattcaacacattgcatattcactcatcattcttccgctgtggccaattctcatcccccgggggtgcctttgcacttttggccattgttttcatttgtataataattccttttgcttccatctctcccaaatcgcaatccgccggccctttttcgcctgattttccatctcgagatgaatgcagccaaaaagatccttatctcctctcccattttgtttcctttgtttttctctcacgcattctcctcctttcgtctgttccctcatcactttgcagctgctatctctctctctctccccctttttctccctctctctctctccccctttttctccctctctctctctccccctttttctctctctctctctctctccctttctctctctctccctttttctccctctctccccctctctctctctctgactcattcattttctttctttcctcgccatttccatccctccgtttcactaatcaccgtttgtttctcgctcacttctccacatttccatgcttttttctgattaaacatttagcacaattagtaaacccttctgctgctggtccagaaaatgtcatttgattcgtcattctctcggattgacagaatctaaacaccgtcgacagcacaaaaagggggggggggggggggacgataaggctgtgtcgggagtgtccttctcaaattggcaaaaagctttccgtcctatcgaattttgattgctcaccgcccccctcataaatatttccctcgtccaattgcttcgcccctcccctctcagtatttttacggctttttcttcgtcaattttaccaaatttgaaaatgcgtaaagcagcaaaaaattcctagaagaaggagcatggctcaagtggagaatggaatatcacttagtaaaagggtcagtgagattctttttctccatttgctccattcgcttctccgtccaccgccttcggcaattattcaatgaggacgaagtaatcgtcggcactttcggtgcctttcatttaaatgtgttttttatggcaaagaatgccaatgggtcggttggctgcatcagttgcaccccaaaaattttcgggtcaattttgacccattcatttcttttttgaaaatgaaatccttttaacaatggggacggcacaattggaaatggttgacgatcgcaccgtacgacccgtggtgaaatacggcacactgttcaactggcgtgtgcttaattttatgaaactgatgaagttacccaaagataatgcgaagatggagtgaaaaagatgccagcggcaatttccgcccgtttatatccgatgatccgttcaaatttgacacagacgaatgattggatttataatcatttattaatgtatttttgaagaaatatttgatttattttgcaataaagcccggatgggctgaaaaaggcacaaaaaatgaaaatcgctacatattttaaagttttaaaataaatcatttgcaaaataatattgtccaaaaaaattcgcggcgattgttttgcgcaaccatcaatgttgcaatttgactatgatgtgtagggatgggatttttaggcaaaaagctatttttttctgagctccccgtggcctgaaatgcacgaaaaacatgtttttttgggctgttgttaagctacttttcgagttattagtgcctattttctaggcttttatttttagcgcctaaaaagcctaaaaaatgttgaaagaacctatttttgcctattttggcgttttacccaaaatttgttaataatagtgcaataaaaacgaaaaatacacccctaagaaaagaaaattttttaaaaattcatctccaaaatttatttatttattttcttgacaggaatgtgatttaaaaatgatttatctcaatactgagttggcctattttttttatttttttaaaatacattttgtcgttttacacccctaaaaacgagtttttttagtgcctattttccatttttagagcctatttttggggttttttagagcctagagcctacctattttggcagtttttagagcctaaaaatcccatccctaatgatgtgcaaccacagcaatttcaatgcgcgatttgcaaccgcggagttatttttggcgttttgaacattttgtctgacatttggtttgggtttgatccattatgccaccgaattctctctctctccaccctggcagcatttttatccacctttcttttatttctataaaatgccattcctcccaaattgccaataatattccatttgaatgactactgagcagcagaaaagtgctgtcccattgactgaactcctttcctctggccaatgcgctcgttcggcatgggctcgcaaatgccaacttttggttttggagggtgaacttagcaacgggttggaattgcaattggtcgaatttgatgtggcactgaaattcaatgaggcgaagcctttggcgaacattgcgcagaaaatgtcttaaattataccgtttttcattgtttttttctaatattatttttagttttcaaacggacaaatcaaatgagaaagtgcggcaacgaattttccgacttttttcaattttattcgaatgctccgacaaaaaatttgtaaaaggtttttgggttttaattgttgttggaaactgaaagttaactgatgaattactcaccgtcacagaattggtcagcgaattcaccatggacactctccaagaaatgtttttcttcgcttttcccgaccaacgaaactccaccaaaggcagtcttcaggtggaatgaccgttgcttaacatttaaaaggtaatcctccggaattggtgtcctgacgggaaaaaaaagaanaatttcctaatttttgtagaaattcttggcagtaaaatccaattctaaatcactacc

SEQ ID NO: 12136 - DNA, 1008 bp, Heterodera glycines
  unsure (1)..(1008): unsure at all n locations
cgttttggcattgactgtctccgaaaattggaagaaagcgtccgaaacactcgaagttattgcgaaaattcaaaattatactaattacccctcaaatcatacctaattgcttctattttggtcgttttttagcatttcgaacaaaaaacgggcgaactctccgccgaagagcgctctttgctccgtgttcagcaactgcaaacgctgatcagacttcggcacctcccaaaggctttggcactttgcattgaactgctcggacaattcgtcgacttcagtcaaccggacaatgctggcgaattgcctcccgaattccctctctccgtttctcgagtattttgccgaaatatttcctcctcaaatttccgtgccgttcgttccccaaaggacactcattggattctgctctcccaccgtgttcatcttcgtctgtttctgctcctcctcctctttcacatttgttggctcgcctttgcgaaatgcgtcgcccggggagtcaaagcgacggccgacggcacagaaagtgccgccagcagtgccaacctcttctttctgtcgctgattgtgttggcacagtcgtgctgggcccactttggcttcggactgttcgagcagttgtgcgaacatgtgactgctgcggttagaaattcccttctcaattttcgtgctttttccatggcatttttcatccttttttaaggatcgtttcctctgttgcgattttttccgctacgtttcaaatgctgcgttggtggatgaactgctcgatctcgaccatgtcccaatggcactttgcccggacggcgctttccttccgacgaccgagtggcggaaaagcattctcgagggcaaagtgcgattggcgggaaaaccggcgttggctttgctcaaacagtttttgttggaaaaccaacagaaaatgatcgattcccttataggcnttttaatattattgttgtatttattttacttttatccttttttatttcactgtttaataaattaatt

SEQ ID NO: 12137 - DNA, 1553 bp, Heterodera glycines
ttttatttaaattaatttgattatttaattattaaaacccacaattagtgtgatcaattacaaattatctatgaatattactccttttaaattttaaaaacttaaaaaaggcagtccaattttttttgtcgaattatctgattttcgaaaaattcatcaaattaaaaagatacaactttgtaaaattgtgtatttgagaaaatattattgagaaatcccaaatatgattggatttttaatttattattttaaaattcttaaaattaacctcctcagcttaaaggccacaatctacgagaagtgcattaaggaagtacagtactcaattttgaaaatttacttttatgtattaacagatataaattttaatttgtgttttcttgaaatattatttcataaaaattttttcctggccatttaacgcccctccacctgaaaaactgaacaaaccaaaacatcattttaagcgattgaattatacaaatgaaaattaaactttcttttttttcttatttttaaatgtattttaaattaaaagtacattttattttaatttattttttatttgtttatgcgaaataattttgaataacgttactaagaaacaatctaaataaaaattttcttataattttgcacataagtaatcaattttttaattattattattattcgatatccctaaagtattctctattagcctgtaaaaacttcttaaaatttcattaagttccaaaataattatgatccataatgttcgaaaaacatgttgtttttttttgagttgttaaatccatacttttttgaagtgaatatgttttttttgaaatttatagtctaatatagaacatttagagaactatcgaataataaataataacatcaattaattctgaatagtttttcattcaagactttccaattgatgatttttgagtaatgagacgattcaccacaaaaaaagaaaaacaaattgcattaattaatagtattcttgaaaagtttcttattttaatagtaatttacattattcttttaacattttgatttggacattttttggcatcattatttttttttccatttttcacatttttattcacagaatgctacaataaatgatctagccaaaaaccgttggaaatttctcgacacgaaaaacttaccgtaaaaatttcgagcatccagttaaattggttttactttgttgtcctcataacaaaaactaaaaaatttatggtccatccacactttttccaatttccggttccaataacaccaagccttccgaaatttttccattttttaaaaatgtttttcacaattctaatccctgaatgctccaataaatcctccagctaaaaatcgctgccgaccaaacgaacgaacaaccatcgatttatgcattcattttataatattccttcttatcgtcatcggttgaggggagggggggggggggagaagtaagtccatcatctaaatttttaactatcatttgtccttattatctttattttgtattaccatttttacattggttgaccattttt

SEQ ID NO: 12138 - DNA, 1557 bp, Heterodera glycines
  unsure (1)..(1557): unsure at all n locations
tttttactgagttntatcagcgcttacggcacagaaaaaaatgccaaaatcgaaattctaatatgtnnanccaattaccataaataaagtaatttttttgaatagtaaaattaattaattggctaatcattgcctttnnaaaaggaatgacaaaacaaagacaatctcattcagttcgagtgccaatgcattttgctcaaatgtttttgctgtttatgatctcaactttccatgctcaattggttgctgttgataatttaaatccgagacttgaaaaattgtcaattaaggtaataaaaacattctattaatacatttaattatctttcatttatttttttaattaaaatcattttgaaaatatattaaaaatgttttttaattcatttttgtattatcaaatttataataattcttttaatatttaaagcataaaattttaaaataattaaattattttgtaatatttttgagtaaagccattctgatctgagcaaggtagaagaattaattgcgaaaaaatatttaaacaataattcttttttttcttcaaagagatgcattaatttaagatttaatgattgtcttattataaagggttaattgttatttatcaatattttcaaaaaaaaatatttcaaaattttcaaaaattttttacaatttatttaattactgaatcatttcgaattatttattatttttttaattttaggagccagaatttataccaacttgatacatcaatttttaaattaaataattaacgaattaatttttttttcattttattattatttatatattcaattttattctctgtctcactccctctctttcactcttctctctctcactccctctctctctttctgtcaaaaatgatgcatctcattaacaacgatcgcgttttttgttatcatcataaaaatgatattttatcattgacgattttcgactattattttattactttttccacgacagtggcagcccttttcaatcaatgctaacaatgatgaatacgtgaatggcttatttatttatttttttgtatttttaaattaatttcaagttttgctaacctcgtccaaaaaaatttagctgagtttgttgaggattttacgaatactgttcgttcttttccttggtgcgccaccacattagactccgtttatgaatattttatttcttttttcaaaatttttttttatctattcgggtttaaaatttatgaacagataacaaacaaaatttatttgtgatcaaagacctttaaatttttattaaaaaaattacattgaattgaatcatatgattaatattgaatataaagtaaatgcatacaaaattttctcatttttaaaataatttcttaaataaagtttttgcctctttaggggaaggtatcagcaaatcgtataagttttcagtgtaatctggctcaaaaaattaaatttaattttttcagaccaattaaagaagcaaaaatgcaaaaataaacaataaaagcacaaaaacttgttcagacttattcttcttagcatcagatggcac

SEQ ID NO: 12139 - DNA, 3231 bp, Heterodera glycines
  unsure (1)..(3231): unsure at all n locations
cgattaatgccaaaaaacagatggccagtaggatacatgttgctgtgaaaatgtaaaaaatatttaattttaataaaaaaagcaaaaacaaaattgtaagaaaaaatcctttaaaatgaaaaatcttctttttcaaaaataaaaatttaaaaactgatttaattgttttttgaattccctgccgattttttctatgccgttaatcacaattcttaacctgacaaagtccatttttttaaattgaagtcatctatgctaatggcactggtcgtaataaaaattgccaacacctcaaactcgcgagtaacaaaataaatttaaacattttattttacaatatttaaaaaaaattaattccaattttatttaaaaaattccaaattttcttttttattaaattaaagtggattttccgtaacagaataaatttaacatttatttttaaaatattaaaaataaaaattaattccaatttttatctaaaaaatccaattttttatgaaattaaagtggattttccggcaattttccgctcggatgacctcccaatttttctttttttctttttgattgttatccgtctcatccactccacaaaatctgtgtgcattatttattcattcattcagtggcggtccccaataaatgtgaacactcttcccaccattgttctatgtacagaaattgctgcccaaattgggctttggtgccctttgttttgtccgccgtcgccgccgcccccaaaaaatgaatgatttttccatttgggcgatcgaccaccaattccattcaaacagtttttgaaggggcgcacagtttggcgatgtgttcaaacagtcagcaatttgatttttggggggggggggatttcttttgtgaaaaaaatttagaaatatttgtagcgaaaggtttgatttaactttgatgggttttataattttgtaaattttggccattttcatagacttaggatttttaatgaattttcaattttgaattttttgttttttcgcgctaaagagccctgatttgatgttttcggggcgtaccagcccaaaaatagcatcaaattaccaatttttagatgaaaatagagccaatggctttaggttttcacaaatttcagcatcgatgccttcctatataatgaattttaaaataaaattttttcgaaagttccattttctatactaagaattgtcggaaagttagtccaaacaatttgttgtgggtccttttctctcaaaatggcatcacagaggattaatagcctgcataataaatggccggagattcacccttttctcccctttagctccttttctttctatctccactttgctctctttctctcgtctctctctctcactcactcacttttttctctctcccttagtttctttacattctcttctatgattggccctctcacctttttcttttctctctctctctctcactcactcactcactcactcactcactcactcactcactcactcactcactcactcactcacttttttctctctcccttagtttctttacattctcttctatgattggccctctcacttctttttcttttctctctctctctctctccctttctcacttttcattgcatatgatttttctctgtttctctgctctgtacaaatttctctatgttatttcctctctctctgcctttctttctctgtctctccatgatatgccaaaaaattgtcccttttctctgttattttcattatatgtatattatatgcctcatttccctntaaaaattcttttcctctctttctctgcccccacttttcacacaaaatgcacactctctcctcccacgcataaatagcatacatttggcgcctccggcgctttctctctggcgttggcgttgtgtgcgcgcgcaattatgaaaatttgttttgtgtcgcggaatccgagccggcgtttccgcccgagcaaaaaaactttcttctccaacccaagcactcaaaaagcaaatgagcacacatattatgcaaaaagtgcggtccactcactcacccacttcagtccattcattcgtctctttggatttttttttgtccgtgcaaaatgccaaaaaatgaattatgccaaaatgccattttcagagtgatttcaatgcctgctgccttacattttgaatggcatttttttcttgaaatttgatgccatttaaccattcttaggttatgttaaagcatctgggtaaaatggtggtaaggaatatttccgaatttctctcgattttcctatgggtttttcgtttacctaactttgtcatggctgatgtcggacgagcacttagaaaatctgtaatcccaactacgggtcggggtcgttttcgcgtggggcgagtttttgaactataacttttttctttgtcaaccaaatccaataatcttggtatcattcgatagccctaagtgttctttattagcctacaaaatttggaaaaattttgttaaggtccaaaaaagttatggtcagaagagttcaacaaaccaaattttccaacttttttggctcgaactttttttatactgaacgaaattttttggaattttgcaggctaatagtgcatctggagggctttcgaatgataccaagattgttggatttggttggcaaagaaaaaagttatagtccaaaaactccgccccacgcgaaaacggcctggcccgtaaacttacaaccctacaaatgagtagaccaaaatacgctttaatgctcaattactagggttataagttgtatgcactaaaatatgtcaaatatgcgcataaaatatgcactaaaaatcccccaaatatgccctaaaaacccgaaaaatgcccaaatatgcactaaaatatgccttaaaaattacccaacatggcttctaactctcaaaaaaaaaagccaaaattgtgtaaaaatacagaattgactttaaaaaagtggcctttttagataatttaaaaaaaaaatttggttttcaaagtgtatatatgcaatttcgaattgaccgagatatgttctaaaaatgcaaaaatggccaaatatgcatttattctcgaaaacccccaaaatatgcttttatatgcactaaaagctttcaccaaatcaaaaaattttaacgcagaaatgctatttttgagcccctttcttcatagcatatgcgcagaaaaaatatgcaaaatcatacaaattataacccta

SEQ ID NO: 12140 - DNA, 3767 bp, Heterodera glycines
  unsure (1)..(3767): unsure at all n locations
ttttcgtcatattangaaacaattcgtcagnttcattcacatnttcgaancatattaaaaaaaaaaacaaaatgcgtaagtcgatcacttcnttcatacaaatgcgaacactattttcaattcggttatcgcactaattcaaacacacttcgtcaattcgtttcacaattttgcacaaattcagaaacaatttgtcaattcgttcaaatttgcacaaatttaaaaacaattcgtcaattcggttcaaaatttcgtacattcgccatttcggttcatattttcgcacaattttcagatataaattcgtcaattcattcttattttggtataaattcaaacacaattcgtaaatttggttcacatttttgcacaatcatacataatctatttatatttgtaatattccgaaacaattcgtcaactcgtttatatttataataattcagaaacaattcgtcacttcgccaatttgttttacatgttcgcacaaattcaaaacaattcattaattcgtttatatttgtaataattcagaaacaattcgtcaattcgtttatatttttgtactaattccaaaacaactaattatttttttctttctctctctcttctttcatattctcgtactaattcaaaaaatcgttattcgtacaaattcaagacaattcgccaatttgtttcaaattgtagtacattcgccaattcggtttacatgttaatacatattcaaaaataattctcaatttggttattattttcatacagtcaattcaaaacaattcgtcaattcgcttcatatttcgtacatatttaattgtataaattcaaaacaatttgttaattcgctttacagttttgtgcatattcaaaaataatttggttctatttttcgtataattcaaattcaaaacaattcgtcaattcgttttacactttcgtacatccgttaatttggtttttactttcgtatctattcaaaacaattcgtcattttgttttacattttacacaaagcacaaattcagagccaaatatatttcgtcaattcggtttatattttcgtatatattcaaacacctttcgccaattcgtttcatattttcgtatatatttcaaaacaattcgccaattcgttcctattttcacacaaattttcaaatataaattcgtcaattcattctcatttttgtacaagttcaatcacaattcgtaaattcgctgcacattttcaaacaaattcaatcacaatttgttaattcgttttatattttgtaatgattaagaaacaattcgtcaatttttcgtactaattcagaaacaattcgtaaatcctttttatatttttgtaccaattaaaaggaaaaaaacaattcgttaattcgtacaaatgcaaacattatattttcatacatttcatctcctattgtcgtatatgcttaaacaatttgttaattcaattcacattttcgtacaaattcaaacgcagttcgtcaattcattccctatttttccccttcttcgtacaattttcacacacaaattcgccttttcggtccttcctaggttcgcacaattttcaaaaaaaatcgctaattcttttaattttgtaaaatctcggagtacggttgcgttgatttgggttaaaactcaaagcaaattcagaacacgtcctcgtcctcgacatctctacccgccctttgttccatttggctcaacttgctctcccccaccaaacactcagtccttctcacgtggtgccatttcacaccaactcagcctcaactcacccctccaagccgaaaggtgtggcggaaaataacacaaaaaaaaaactgacatttaacaattcacaaatttcacaacattccttttgatcacatttacgtttttgatcacatttacgcacattttaacacctaacacattttgcgcattgaaccaattacctcccagctcaggtcccaccccaattaaatcagtaaaccaagtaaacccctggttacgaagtacagtatccagtgatttaagacaattaaatatttgtttcttttggttctaacattcaattctcagttaatatatttggtgcattgaaccatttatatctgccccggaatcacccccaattaaatacagcaaagcaagttaaatcctggttattgtgcgatatccagtgattatacacaattaacttttactttatttctttccctttacggtgcgcaagtccagtaccctctctgatacatcccacttcccctatcatggtcaatcccttagagaatttgccttacgaagatattgttgcgattgaccgtcgcctcttctcaggtagaaacccatccgtccaagcaaaagttagtgacctcgaaaatgtattaagtcaagtttctggctttgaggatgcctcaaacagaaaccttcgctatcttaatcgtaggattaatgcaacaaatgaggcaatctttaaactttctgaggaacttaatactgggctggcaaccatggcatcccggattgattcccttaactaatcaattccggccccctagtccccctcgatttcataatagaaattggcagcaaactcccaaccagaccccctcatgttattattgtaaaaagcctggtcatgtaatcagtgaatgtcggatcctcgcctataaaaatcaaaacagaaattcgcaaaattggacgtcccaacctcctatgttcacccatagcaaccccaacagtattccaatctcccgaccccctccctataacagtggtagaggaaatcaacctcatcaaagaggcacatggcggaaccaacagtcttttcatcatgatcaaaggggtgcatggagaaatcagcaacccttccaccatgacaatcggaattggaatcgctacccaaatcccaaccagccttatggccgaggacgacaaattaattcccttaacacctatgattcccttcccccagactcattccaaaatctttcaatgtctgataatggtccccacccttcatttaacactcttacattctctgaccaagtccaacaacccgttactgcctcaccatctcaaatcaaagaacagctcgtgtgctctggctctgctgataagcaaccaaatctcacggatgctttaaaatccgaaccaaagcctgtttcccccactcctattgtcacaaattgggaaccacacccgcgcagctcaaatttttcaatagctccctttctaactcgttttaattttatcttgtgtatcattactctttctctaagtgcttctttggtatcatcctctcacagtcaatcatccttaaaagtcctccctatggtttgtcagacacacgttgagggcacaatttggtctcttcccatttggctaccatgtccaaaattaaagcatactccttctgacacccctatcaaacaacctattcgccttttccaaccgaacccattcgaacaaaaatccaaggcatgggtgtgcaggaaggtaaagaaatccctgattgagtacaccaatccatggaatgatttaatcattaagcaactcccgtccgaaaatctcccagtattattagatgaatgtaagcaaatggttcaggaaaagtcatgttccgaaggaattctaatccaaagtggggagctccttttctccaataatccaatcagctatgaaaaacggtatcccttccttggctggtcctggaaagcacacaattccacaaattgtttcgcttttcaaactgagatttttgtgcatcattc

SEQ ID NO: 12141 - DNA, 3745 bp, Heterodera glycines
ttcctaacatttgatcatttattcccaaggcttcaagcaaatctttcgtctgcaatttccaccacaaataatcagtggaatatttctgttgatggcactcaacttgcgccttcttcgtccgctggcgccgaagcttcgcaaagggcacaaacatttggcggcggagaaggcaaatcgaattcggattttaattgaatttaattcacaataaatatttctttttttaatttattattttcactgcttttcctttaagtgttttcctccgccgtttctgcgcaatcgcagccccaaaatgaccgtgccaaccaatcgcgcggcagtttatattcctttatgagcagcccttcgccggccacttttcaatcgacgtaatgccaaaatatttttttttttttgtacaaattaaatttcatttgctcagcatttcaagcaataataataataacccattcggaagtgcaattaatggcaattcatcagcaaatgaaccaacaattatcacagtgaaaggtggggggcgaacaaaaaacgtttattttatttgatttttaagggattacaccgcctcagagcagaagacaaaggcattttaagcattaaaatttgaataattttaactatttgttaaaaaagaacagatagaaaatattaaaattgacaagtgacgattaaaaaagactaattaattaagtaaattcaaaaattcagtgcttcgattgacggcgacggcacggcagaaaaattgagccgagagaatgcgccgttgaaaaagccaattttaacggtggaaaggctggatccggtcagctcatcgttctgttgctcggagggggaagaggaagaaaaaggcggggacaaattaattaattaataattaataatgcaaaattaaaattaaaataattaaaaacatttttacgtatattaatcaaatgttttttgcatttaattgactttttaagatgctttttttaggtttccgtgttctaagcattaacaatgatgaagttgcgcagatttcgccctcttcgaccacagttttggcgagcaaaaggccatcgtggaatgtggacggagaagtgattaagcaaatattaatggcattaattggcaaaggccattaattaccgaaaatatattgattatttggacaggtaatgtttttcaatttaaaattgcaaaagtttaggacgacgagggatcaattcccactgaaattctgaacgaagaaccacaggaaacatttaacctcaacgacaatttggagcaatttgtaatgggtaattattgaaattaattaaatattttttgatttaatttaatttgaatccctttaagaaccaacccgaaaaaattacacattgaaatgtcgaatcactcgagacaaacgcggaatggacaagggaatgtacccaatttactatttgcacttagagaaaaatgacggacgaagggtaaatttaattgagttattaaatttacaaatttggtttttattttcagacatttttattggccgcgcgaaaacggaaaaagtcgacgacggcgaattatttggtaccaatgcgatgggcacagcaatttcacaattaattcctttttcaccgttattataattaagatttcaattgatcccaccgatttgcgacggaatggccgaagttttatagcgaaagtcaggtggaaaaagacaaaacaaatgacaaattgacaatgaaaagggataatctgtgcttaggtccaatgcggtgggcacaatgttcacaatttttgacaacggcgaaagtccgaagaaaagttcggccatcggcgactccgtgcgcagggaattggcggcggtgatttacgtgagggattcaattatttgcataattattcaacaaattggccacttattttaggagacaaatgtcctcggtttgaaaggcccacgaaaaatgaccataataattccaggcaattaattacaaaatgtttttgttggccattaagaaagtgattgatgcttatttaggcatttatgttgatcaaaaaaacaattacatccgcccattgtccgttcggccaatttcggtggtttaattaattttggatgaatattttaatgacaaatattcaggaaaaagattcgattttggagagatacaaaacgaacagattggaggagatggtcgtgctgatcaacaaacagcccgtgtggaacgaaggcaagcagaaagggaaggacgatggtcatttgtgctcatttttttgatcagatacccagtcgtacgtgctgaacttccatggtcgcgttacgcaagcgtcggtgaagaatttccaaattgtccattcgatgcacggtaattattaaaatagccatgctttcgacaaacgccaaaaattgcgttgttccattaagcccaatcgtacgatgggcgacagcagcaacaaaattcgatggctgttgacccgagtaattaggcgctcattaattggccaattagcttgttcattagtattaaatgctcagtcaattaagatgaatatgtgataatgcaattcggtcgcattgacaacgaatcgttcacaatggacgtggtcagtgttaagcattgaacatttagcaattaaaaaattaatttattcgtttgcttattagcgataccctctctcaccggttcaagcctttggaattggtcagaatattcaatttcaaaatgaatttttgaatctgttttttcaattaagcaatgagcagcttccatggcaaattggcatgcgaatgaacagagaaatgaaaaagaagaaaaagattatgatgaagccaatgtttacaatttatttggaaaaataaaacaaaaacaaaaaataaaataaataattatatttgggagaagggaattaattaattgttcttttaacaaatagtgtaaatgtgatcatttgctgccacctttcttactgtatgtaccataggtaataagtccaatagaaaaaattccaaatggcgaaaaccatcggaaaaagcagccgcgaatagcggtcaatttgaagtcctttgcgtgaaaaataaatgctttgtcgcagaaagtgatttgtgatcttgtaaaattgggttttttataaattattaaaatttaaaaatgcaataccaaaggattcgaatcaaaatctttgatttccttaatattttcattaatgtcaatgcgttccggcggctttaatgatgcgcgaaactgaaaaattaacagaaccgtttaagtttatttaataatttcaattcgtgagtgattatccaaagcttctcgcgtgctgctgatcattttgtttcttctggcgaaatgtgccgacgacatttattcgtggaggacgcggcacaaaatccaacacgggaatggtcagagtaattttgttttattttgttcagcaatagaatcagtgaataaataagtaattaacagtttaatccaatattaagtacatatttatgtaccaattaagtctaggaattgcagctggtgccgataggatccatcggacaaataattttttatatcttgttaagaaatggtaaatacgatattcaaaaaatttccatatttttgatcctttatacagaccagataaacagcgatttcaattagtgcatgttactatttttttatattttcaggatccattcactggtcatccggatgaaacacgttctcgtggtcagcaacagtcctcgcatatctgcagttgcggagcagttcaggtg

SEQ ID NO: 12142 - DNA, 2581 bp, Heterodera glycines
ttttgttctgagagcatttcgagagcggtcaaactcttgcggtagtctcgaatattttcctcaatcctgaaccataaattcatagcaaccagcatccaaaatgccattcttttctgactttgccttttgctgaagtgcgctcgtctcaaacattttaaaacggcggaaattctcgcgctcgtcctcctgcgcatcttccaaactttttttcttcattttgagaaaaggttccacattttccttaattaataatatatagaaaaataaataaaagccggcctttttaaaatgaaaatccaaccaacacttccgtcctcataatttgtcgacgtttcatccgttcttccgccgttaatggaagcaccgcacttgtggaagtattctttgatttttccttaatttccatggccaatctgaatagcaaatgcaaaattagaatagaatgggttaagttaaatgagaaacaagaaattctgctttttcattcattggacataaagtgggaaaaactttaaagaactttatgtttaattcagggcgcgtatctgtccttatttgtaagatttgtccttatttcgggctattgttcttattttgttcttatttcttaaatatattcaaaattttgaaattttatggcagaatgtcactattttatcaagaaaatataaggtttgcgcaaaatttggttattttttgacaaaaaactgttagcaaatcgcattaaaaattacaaagtttttcccggcgtcgcctatcggcgtcaccggaccatctcccccattgttccccaaaagtttttgaaaaaacgcaccgcaaaaaaagtatttttaaaggcaaaaaaagtcgtcgcttggcttttaatacaaaaattggccttttttggtgaaaatctgtaacaaatcagaattaaattacaaaaaatttttcctcccctcgcacttcccaaaagttttttggaaaaatgcgccgcaaaaaattgttaaaaatctgattttttttatcctgaatgcactaaaattttatgatttgctaatttcctccccaaaattgttaaaatcgttaatgggagacaaaaatatactatttgatacatttttgatcgaataaattgtaaaaataactgatttgaagcaattttgcgaaatgttcttatttttgaccctaaaatcttattttttggccttgatgctcttattttgaaaaattttcgatccgagccctgcataaatcgcgaaatatggaaaaatatacgaaaaatggatatggaaacccatcctagaagctttaaaccaagttaaaaacatgtttttcgtgcgtttcagacctcccacagtccaggaaaaaaatatggatttccatataattggaagccctaattattaccgacgaaatacagtagttgactaggtcaaaaaattcacgtctaccaaataaccttgccttgtgttattgacaaaaattgcatttacatacgttcactagagttcacacatttttgtgcccagaaatttgttcatttgcgtttcgtcggatttgtctaaatccaaaactcattagaacatagcgttcatttataaatattaaacattaaatgcataatgtaatttgaccgaatattcagagatacatttgtgattgttatacgattccattccaaattattacaacaaatggcgtcctacacttattccgccgccggttcgtcggcccgggcggacagcaaaaaggacattctcggcaatctcaagcgcgctttctccgcatggcctgacaaattgttggcattttttttgtttacccgaaatttatgccactaattgtgcctgtttagggagagccatgtgcgtgaccattttgcgcaaggtttacagcactttggcactgacagtgctttccgcaatctttggcattgtggtcaacgcggtgatggacttttcgtcgttgctgcccgtcttctcgctgatggaactcggcttcttgatcggtattccatttttcggttctatttacgtttctaaccaagttttacgcgtcgaataaatgactatccgcggttttttaggccatacattttttcttggttcgtaaatgccttagttcatggtatcaaattgaaagcttaaagtctagaagtttatgggattttctttagaaaaaaagtcatgccataagaaactgagtatggtcatttattggacaagtaaattgtgccttggtaaacttactaagatgtcaaactattattcattggaggtgttttgtgagggaaacagcacagcttcccccccccccccccgccccccatttgggccttatttttaaggctttccatattcgtgtggttgaacttgttgaaaaattgggataattaaaaaaaccactcttcgacgggggggggggggggaagcgttgtgcacccattaagatttgcttacggctggcaattttgctcatagaatgagaataacaacgcgtgttttgttggttcatttatttgcccatttcagcccttatggtcaccaatctgtcgccccaaaatgagaacaaacgtttgtgcttcatgtacgcttttgctttt

SEQ ID NO: 12143 - DNA, 1872 bp, Heterodera glycines
atgattgccgtaagaatggctaaacatggtactaaaaattgtttagaagaaaagaattacaattttttaacttttagtgaaaaagtaaaccgaaactaatttccgacattaatttactacaaattttacgaaaatataaattggtccaatattctaaaaaacgaataactaggtaaataaatatgaacctgcgaattttcactgactgcggttttatggcaaaaaacgatcgtttgctacgttttataaaacggcaaataaaaattgtgtataaatgttttttttactccatccaatcaaaaggtaattttgagaataatcacagctcaaaattcatatggtaatattaaaacaaacagcacagaatcaagaattaaaaacagatttagttttgagaagggatggaaggacgagaagaaaagaccaattggagaatacagcggattatttgatccaatactcagattcatagagtgtatggtaaagaggaaacatatataaaatatggtcgagtaattcgcaacattttcaatatactttcaaagtcttcagatagaatttctgaattttggggtcagttgaaaaaacaaattgtatttatccatttcatctaaacaaataaaatttatgttagaaaatgtatagtttctttttaatgcaattcgtaaggtcaatatggacaaaaactgtggtgtatgaaagaaaaagacaatacaaaaaaaaaggaaaataggtcaggggaattttcaaagtatgaggaaatctattgcaagaaattaacggaacgttgggtgttgtcttaccaagaaattttgattgttttctttttttatagataagataatctttaaaaagtcttcataattccttgctaaaaaccaacttttctttgtttcgggactgaatatacaatactgaattggaaggaatcgcagtttatcaaatgaaacataatatagtaaatagcttaatgtccttccattttaaatattctttttactgttacccgttttatcccatcaacatcgacattatccatccaatcatcatttacaatgtcaacaagaggtcgcgttcgacgttgtcgaggctgcagcagcagcagcagcgtaagcattgagcatgacggctgcttcggcagccatggcgctgcttcccgcaccgcctttgtccatgtcaacacggcacaccgggcattttttgttgtattgcaaccaccggtcaatgcattccgtatgaaacaaatgagtacagttcaacgctcgcaattcgtcgtcggtatcgaaatcgcatagacaaactgtgcatcggtcgcgttcttgctccctaagccaatgagtcgataggtttttttttattatggagggacttacggcacatcggggtccttcacatacgaaagtttttgtgagtgtttcttgatttgttcaagggagacgccaactgtcggaggagaaagtttgaacagaaaaaaccatttgccaagggactcacccggctgtggctcaggggccgtagcagtggccatcgcattggccacaatgtgatggggatttgccgcatgggcaagggcggaagtgacacttgaacccccgttcaaaaccaaagttgcggcatcgtcaacactttccgggttatgtagcaacaaaacattggcctacagtcaacgaattattagtaaggcaaaactaaaaccttaccaagtcgagttgagaggacaacctcggcaccattatgagcggtcgcaccagatggttctgttgaacagcccgttgttgttgctgttggtagaaattattgacagcctcgcgctcacgctcctgctgaactaatcgagtagccaaaatgttctgctgcatcgacgtaacattc

SEQ ID NO: 12144 - DNA, 1815 bp, Heterodera glycines
gcgtactcaaataaattaaaagaattaattatgcttaaattattatttgtaaaatgcctacttactcttcagcggcttctgttaatgacatttgaacaatttttatttcattttttgaaacattttccatcaaataattcagctgatattgctcatagtctcggtataatttaccagcgacaattaaaataattgcatctttgtcatcaaactttttcctttaatttgattaagaaattaaacaatcaataaatatataaactaataataagccttatataaccaaggaataattattgtatttaattttcattttaaattaattttaaatgtttaaaaaattaattaatccataacttttattttttccattttataaaattaattaatccataacttttattttttccattttatacaactctttttttgctaaataaaattaaatagatgctaatgccagattggacttaccatgccattattaatgcattgatcagcatggtatcgcacggattgtccggcattttctcttttgacgtgtcaaacccggccaaggccatcgtccgtctgtgcaattttgtgatatttgctgaattcacgaagccaccagcttggccaatgttcacttcaatcttaagattatattttatccctagccgaccacctcagaatcggaaaagtcagaaaagagttaccctcccccctattcccagaatttcctctccatggagtcgacttttcaacacaagcttttgcccgaaaaatcatataattaaaattatagtaatttttaattgactcttattaaatgatagataattttttcgttaattacctgtttgagtccgtattcggtctctccggtttgatcatttttgcccattcgctcatgtaatcctaaagaatatttcttatattttcatttttagaagatttttaatttgttggaagatgtattaattgaaaatgaaacccacaaaaaatgtaaatccattttttaaattgtttttatctaccaatttccaaaaccaaaattattaaattttctatctaaatacaagatttaagaattactgatcgcatcagaatgaaattgagtggttgcttaatgccttcctcattaacaatgttcataattttcagcaaatccgccacgagttcatttgtttcggtggttgactgaagattctcgcgcagaaattcaatgtcagacgaaacgcgaaagtacaaaagttgcatcagctaaatgcattaaaacaaatattatcactgataaacaacaaaattggacaaaaatattttgttttcaatataacccaaaaatttacttaaaaaaattaatataaattttgaaaaataaataaaataaaattaaattggaaagaaaacgtggaaaatattcaaacattagaaaaattttaaattgagaaaaagtgggtagccaattttgtaattagtgagtttattgtcttttacttttctaattaatgtttcaattttgcatccccggcaaaatgatacatagaaaagtaattatagaaatctccacctttaaaatactgctaatttcagttcctaccgtatgcactgactgcgcttgttcaaaaattacgcgtggaaaagccgttaggaacagtgaaaatggcttaaaagcggcaatgtcaggactaaagcaaaaagaaaaaaatgaaatcaaaatgccaaattacagagtttattttcaattagaatagtgaagtgggaagcaaatgccctttcgttaatttattcgattggaataaatatttttgcaattctgcccgtcttttgttg

SEQ ID NO: 12145 - DNA, 2242 bp, Heterodera glycines
cacattttatattaatttaatactatttttgtctgtctcatttgctgggcttgcatccgcaaattgtatcgtgagaaaggtgaagcattgtgcataaaaaagcaatttcgaaaaattctttgacattttaaaaattttaatataggtaatattctgactaatctataatcaattaataaattttatttattaaaattaatcttaaagaaagcataaaactcatttgagacttaatgtttgtttattttatttaagatttggacataattcacctaaatttctagcaaattattattagaattaaaaaattgaatgaaatacaatgaatctcgagacacgacccgcctcccccccccccccgcccctcacaaaaaagcgggcaaatgccgcgctttcaggattactactcgaaaaaaggaagtgatttaattaagagattatttatgagtatttatatatttttaaataacgaatttatattgaaaaaataaaatatgctataaaaccaaaagcgagcttaggcaaatgcacgtgaaatacattctcattcatttattgatgaatccaatttctgttcgattgtttgtttcttctcacaacatttccggcattggtcggaaatgtttagctaagaattttgccatttttggcgccggaaatttaataattttcaaatacgtgtagccaaagtgttatgccattttagcatcaagaattttcatttttcgaaggccaatgcttgtacccatttttaaaaaattacaattttcatttatttaccaaataaaaaaacaatttttaccaaaacacttaattctgccttatacaataaatttttaagcaattttttcatttcttcattgaatatattcatcattcggtttgctcttcttttttggtgatttgacgtgccggattcccaacaacggtggcaccctccggcacatcgcgcgttaccacggcatacgctctaaatattgaatgaacattttccttgcgctaagacctctcactcattgcatggattttcgagacgaatcgggattcaggacgagaaagatatcggggctaagattaaggattcgggacgtgccggaacatcgctgatttatagtagaggttggacgggttccggtacccggctttttcaagacccggaccggatttttaagcaattttacgattttatttttcatttctactctttggcggttaaacgaaacgcccagtggcgggtttttttgaacaataaattatcagtcagtcattgcttcttttttttgccaatttgtgtacccactcacccaatgattgcgccgtcgcccaccgtcacgcccggcaaaatgaccgcaccgcctccgacccacacaccgcgcccaatgctcaccggccttccgtattcccagccctggtcccgaactgctcggtcccgggggtggtcagccgcgtaaatttgcaccgcgggcccaaccatcgatttgtccccaatttccacccgacaaacgtccaacacgcaacagttgtaattgaggaacacatcctcgcctaggaaaatgttgcggccttaaagccaaaaaaaatgagaattttttggctaaaatttttatcggatttttaagctaagttttaaaaggaaagaaatatttaattgtatataatttttatttgtagcaagacttaaaagcaattaaattttaattgatgattaaaatagtagtttatttaaaaaaatttaataaaataaataaatttcttcagcttggggttcgaaccaaggcagaaattaaagaaagactgatgaagatttagccactatgtgttcgttatgttagaggaacttggttcacgaattagtgcaaagattaaaaattaaattatataaaatgtcaaaaccaaaaaaaaaccatggctttacgcagtttcccccccccccccgcccaaccgagtgattgggctttaggcttggtttttcttttactgtcctgtcgactaattgtccaattagatttgttctttcttcactttacccaccgtgatcacaaaagaacggtggcctaatcgaactcccttcgccgaggtggccaagccgttctctgagaattttgttgcgttccgtcaccggcaatgaaagcgcggcgttgaagcgagcaagccaaaactcgttctgctccaactcggtctaattgtatgtgtaatggaggtgaaacaaaaatggttggaagaaaaaaactagcccaggctg

SEQ ID NO: 12146 - DNA, 1446 bp, Heterodera glycines
attagtatgtaatttttaaaaatagcattctttctccgctgaaagaaaatgcgaggacaaataaaaaaggaactaatttcggaacagcagaaaaatgaaaaaaaatcggaattaaattttaaatcctcccttaagcaaacaatgaaaaagtgttaagtgctgcgtacttggagtgtatgtcgaaacaatcggagggaaaagagcgcaaaaggacagagagtgagagaggagagagagagagaagagagagtaagaaagaaagtgtcagttaataggcagtgaacaaagaaaaaaggaggatgagagaaaaaaagaaattttcttttgttgcactctctgacttttttttgttgttctatgatcattatctgctgctgttggcgctggaggcaattttacaatgttgcactctcgcataagaacaaaagtcacgagagagagaaaaaaatgcgatggcggggcgaacgctttccatcaaagagagacaaaaaaatgcagcgtaaaagaaaaagagaagaaatgcaagagaacgaagagagagtgagagagagagagagagagtaagaaagatagaaaagagagagagtgggcgggggcgggagggggagagagagggagtaatttttggaggcagtcagtctttaaaagcccgtgggaaaaagggagaaaagaaataaatttaattttcgtcctctctctctctcgttctctctctctctttctctccctctgtttcttgctctctctctctctctgtcctctcactcttttcacgtttcactttaaaagcaaaataaaataaattgaaaattgcgccccgccggtgttaagcgccgcgcgtgcgcatctcacgcgcggctattttcaattggggagaggagagaacaataaaaaatgggcagacactaaatcacgcgctagaaaagagagagaaacacacaaaaaattctgcgtctctacccccgcccgattcttttgtcgccgcagtcgcagtgaactgctgttgcctgtgtctgtctgtcacttttatgcaacaagaaagtgatcggagaggggcagagacgcatatttatatgtataatatatatgcatatgcgcaacatacacagttcatgatggatggctgctctattagtgcgcgcaaaaagggcgcaaaaggacctagcccttttatatgtgtgcaatttaaattatgcgcgcaaatattagggagaatttgatgtaaaagtgttaataattaaatttgaaaaggataaaattaatagccaaaaatacggttagccgacttttgcgccgcgccatttgcgccgcgacacttgcgccgctcagcaaaaaagactcttgcgccgcggacatttgcgccgtgccgatttgcgccgcgactcttgcgccgcctaacaaaaactacagtgcgccgcgacatttgcgccgtacagcgaaaaaaga

SEQ ID NO: 12147 - DNA, 2025 bp, Heterodera glycines
gccgcgacatttgcccgttccagggaaaaaaggcatttgcgcctctgattaaaattaaatttatgtgctttattggataagaattgatagatattcattattaattcctttttcgaagcctgtcatgtcaattccatatgaaggtgcacgtaatgattgatcaaatcttgatcattttggttttcattgggaccatatgcgataacaagccttcgtattgcctgatcattaatcggcggattttaagcgaaaaaaataggtaaataaataagggcataaaaattgcgaaaaatggtaaaataggagcgaaaatttgaaactcagtgcgttttttcaatgaaattaaattaaaatcgatgaaaataacttattgagaaaattaattacaaaggaattgaatttcattcttttttcgaagcaaaaaaataattggggtttctacagaaaattctttttttcagttttttgttagtttgtattcttaatcattttttcatatctttgatgaacctattcaatgttaagcttttaatggttaaaaaattgaatgtcaatctttgtgactagtaattttttcgaatttgtaattagttatttttgtcgatggcttatagttttagtaaaacttattgataatagtggaatttttatgaatataatatttttgacagcgcggcgcaaaagtccatttttgctgggcggtgcaaatgtcgcggcgcaaatggagcggcgcaaatatccgcggcgcaactgtctgcggcgcaaatggcgcggcgcaagtgtcgactttgctgagcggcgcaagtgtccacttttgctgtgcggcgcaaatggcgcggcgcaaatgtctcatcacgcaaaaatacatataaatatgtatgtaaataaattgtaagaaataataaatatggaaaatataatattggaagaaattaaataataaataaattaaatatagaaaatataaaaattggccaaaaatacctaaatagtaaatgtttaaatttataagaaataataaatacatatggaaaatataatgttggaagaaaaaataaataaagaaaataacttataataaaaatttaataggaaaatttcgaaattgtttaaaaattagcatttttttaatcaaattttgattaatttatttttacatgtcagtgtttattagagactgagccggaccggatccggtatcggattttctggatccggcaatccggtccggcgagaaaaacctggattgaccggattgaccggattatgagagaccggatccagaatccggtcttttgaaagtgccaatccggtccggtccggcgaatttttgccaggatccggtctggctcgttctctacaataatccttcattttgttcgttttcctttgaaaaatatctctttggcataatgtttttaactttaaatggtcaaaatttcgaatttcttccctcggcggcgcatatcggcaccgccgggcctccaaaacttattttttcttaaaaaattggctcaaaatcgcgaaaaattggtcatttttagtgaaaatctgttaacaaattgcctaaaattttcaaaatttttcccggcggcgcctactggcaccgccggcccctttcccaaaaagtttttttttctggaaaaagggcgccgcgaaaaaagattattattttttttttattaaaacataggttttcaaaaataaaaactttaaaattttttcttgagaaattgaaattttattttttttacggttatcttttcgaccgcgacatttctggtgcaccgaatctatacatataattgatgatattcatattttgcgggttttttcccaaactaacatgtgaaaattttaatttttaccaatccggaatccggttacggatccggcaatttgaaaatctggattgacgggattgtcggattgaccggattctgagataccggatccagaatccggtactttttgaaaataccagtccggtccgttccggcagatttggaaatctcggcctctagt

SEQ ID NO: 12148 - DNA, 1907 bp, Heterodera glycines
  unsure (1)..(1907): unsure at all n locations
ggggggggggttgtttatttttttttttttttttttttttttttttttttttcccccaccccccccccccccccccccccccccccccccccccccccggccgcggcacgaaaatgagatgatgatggagaaatgaatcatccattatcgcgtccgtcgtctatatnnnccgagggaggcccanccacgcgaangaggaggnngaatgaggaagtcgagaaaaggcatntagtggagaggagggaatggaatttgcccttnttatgtaaaatntagaaaatttctgtacggggaggggacattttatagggtcctcccctcaggcggtagcgcaaatggcacagggcaccgccgctgctttctggcaatttagtttcattcgagaaaataaaaattttctcctggtccggcatttttgaccatcactaaaaagcctccgaggctcggtcttgaaaattttttttttcaaatttgacactatttagagtttccggcattttttgccctttaaagctatgaatttccttgccctcccgctcatcgtcgaaagtctcgatgcttttgaatgggtaaaagtcaaaagtgctgagacgggggcgttggaagggtcattaaagtgggtgctattcgggattaaagagctctcgagagtggatattccaaaccatgtgtggtgacccccgacacacatccgttcgatgatccccagactttcacatactccgcttgttgggtgctctatttattcattaattaaaactaccaaaataaaaaacaaaaattttgctaaaatttaacatgctttacaacgttggatagtaccaaaatgccttactagagctccaaaaatatgcacacaaaatcgtaaaatatgtatcaaaaaagacaaaatatgcatataaatttttataaaccaaaggcaaaatttaccaaaattttaaattcgttaaattaagctaaaaatcgcaaaaatagcttgagtaaaaaattcgaaattcgaaattttcaattttaattttaatttttttggcataaatttcattttttaaattacatttttattaatattttcgaaaaaatacccaaaatcttagaggtcaaaagggccactttaaaagagggggacgtttgaatagaagtttttttgaagcgcaaatatgtaaacaaaaccccatcaaattgtggcatttataaagtgggccaatctttttccccgttttgaacaagccaaaaaaaatttttaaaaaaaacttttttttttgttccgtaaaaagtaatctaatacatgcataacactttccccgcatcttacatttattcatccccattttcattctttcaccagcagagcagaaacaggcaaattgatgggtgggagaggaagcgccgggggtaaagcgtaaaaaaagtaaaacaaaaaaaatcgtcattcattttcaacatttcacgtttatttgacgaaaagcattcacagagaggaagggagagagaaagagagggaaaaagagaggagagagagtgagaggagggagaaggagagggagagagatgagagagagaggagtggagggagaggagtgagagggagatggttagtgttagagagagagagagagagcgagagagagagagaaagagagagaaagggagagatttgtgtgagagagagagagagagagaaagggagagatagtgagggaaaaagcgcatacaaagcgatgtgcttcttctccttcttccttttcatctcattttggccgcttttcctactatctttttttgtccaaaaaaacctgtgtcctcttcccattcatccattcattctttcgttcaaccaaaggccataagcccctcgtccccccgggggatggagcctaaatgctaaagctaaaatgcatacacacgac

SEQ ID NO: 12149 - DNA, 2445 bp, Heterodera glycines
  unsure (1)..(2445): unsure at all n locations
ttttctagagtccggcgggatcgggactcccgcgggattttacgggagtcccgctcccgactcccgcttttttcggtgaacgggatttttaacgggagcgggatttttacgggattcccgttcgggactcccgtcccggaaaattttgaactcccgatcccgctcccgctcccggaaatttttacccaaaaacgggagtaaaaatgcactggtaagaattgatttttttggtaaaaataatgatttttcattgaaaatctgttaatatatagccaaaatttcaaaaaaatttcccggcgacgcatatcggaaccgccgggcctttaagagccttaattttctgacaaaacttgctcaagttgcaacaattggtcatttctgaccccaatcaaggaacgtattgaaatggaatgttggattctttgcccggcggttgcaatgggttcgagtccgggtgcctgctaacggtattttttgattctaaaaagactcgaactcagttttggaggtatgaattgtccgatttcatttgtcaaatgttcgcctctttgtagcattcattggtttgacttaatttggggcactttaaattaaaaaagtgccgacttttttttgttgttgtaaaaaaccttttgtcaatgcaacagaatgtcagccgttcctgcgtttggccattgtccacggcgaatggaacgtacgcaccgggcaaatgcatcgacaaacggatggcgaaactgacgggcgacgaggcgaacaaaaaggcctaaaatggcacaaaaaatgagggataaacttaccaataaaagttatttttcggcgtcttggacttgtttcggccgtccccttgcttattctgaggggtgactatcagagatttaaaaaaagaactttaaaagaggattcgaatccaaaaaaaaaaaaattgacgaaatcggctaacaaatttttttctttagaaatttctaaatttttcagcgcaccataaaacggaatgtttaaatcccttacgcctaacatctgtttaggcgatcagggattgaaaaaacttgactttgatcccgattttggacaaaggcgcaaatgtcgggacatggattcgatatatttcacccatatttaaaaagaaatccataattttcggggggtaaaattcattaattgataattttctttttttaaatgcaagtaaaatgatgccaaattgaccggcccactcatcatcactcacttctttgagtcgttcaatttgctcgtggaattggcccgtcatcgcctccacatttagcagtttcggcctgccgtccgcgcgcggcgtgtgcagccatttggccaacgcttgaccatccgacgcgtgcggatggtcgtcgggtgggcctgaaatggttggaccatttaaatccatagtatttcaatttcactttgggcaacggagtttaaaaagttttacttttggttcttcattaaacgatttaaaatattttaaatggttttttttttcaaaatttagcttttttatttgtttttcttccattttctgcaattttagatcttttcccctttaaattttaaaatcgaatagttttaaaaactaaaattcgaacgagtttttaaaaaatgaggaaaacaattgggggaaaggggatgaatttactttaaatttggataagatttttaaatccaatgccctcccccctccccttttgcatgccttcagggaacagtccgtccgactcaatttggcgaaggttggcacagtcgcggaggacggacggcgaaacgaactcacggagacgggagaacacataactgaaaaaaacgaatttattaaaaagggaaaataaaagcgttacggaccgatgtacccctttttctgacaagttttttagaaattaaaaaaattaaaattcaaaggcttgttttgggagatttctggatcgctgaatcataatatgccgaagttcgaacgtgaattcgaacaaaaagtcaaaaattcagtattaatcataacacgcacttgaataatattgcacaaaactgtctagagcctccgggaaaatataattttacgattggactatttttaggacttaaatttaacaaaaaaagaatgagtaccctcgacagtattactgtttttaaaaagaaaaataaaacaaaaaccaatcaacaattttgacattgggacgcccattttattgaattggaactgtgttaaaaaccggtcccaatcggacagacagacgcagtctcgaggagatgtgcgaaatggaattgccagaaagaaacggcttttttggaacaaacaaatcggggacaatttttgtgagattagaggtcatttgcaagagagtgagtggtcgaaagttgtnataaatctctgtttacttggattttcgactttgggggggttgtctctctctctctcactcccatttctctgctcat

SEQ ID NO: 12150 - DNA, 1947 bp, Heterodera glycines
  unsure (1)..(1947): unsure at all n locations
ctctccatttactacatgtctctctctctctctctcttcttactctctccatttactacatgtctctctctctctctctctttcttactctctccatttactacatgtctctctctctctctctcttcttactctctccatttactacatgtctctctctctctctctctctctttcttactctctccatttactacatgtctctctctctctctctcttcttactctctccatttactacatgtctctctctctcttgtatcattcgtgcccatgcccatctctttcttttcccatcattttgcttcttttttctctctttctctctctgtctcacactctcttatcctcactatgcaaaaaagaaaaaaaatgccaaaaactaaatttcgttttcaaaaattggtatggaaaaatgcatatgcttccagtgctgcggcgacggcactcgcttttccttcacttcgggcgctcacctgtccacgctcagctggcacacattggacgccgccaggggccaaatttgctgggccatgacgtgccatgcgcggacggactgtggccaaatgaccattttaagggcaatggccgagtgacggaagaggcgacgaatgcggtgcagaaaggccacgacagtatgatcaatgtacctgaaaagaaaccaattcaattaccatggcaaaattttttttttttaattaaattttggaaaatcgacctacgataaaaaaatttgtccccggcattttcaatcaaatgtttttccgaaaaattagacggcaaaaaatccaataattgtgccataaatagaaaaattcggtaaattctgtctccaactttgttcgagttcctatccgggtttaggcaatgtattcgtgatcagcggatcggaaaccctgggtaaaacatcccgtaattttaggattttaaaaattcgtgccaaatggggacccaacttcggcattacaataaaacaaagtcccaattctctctgtttgtaagcaaaaccttatgcaaatgcttttgaatgtgatgaaagcgtcgggcggcgccgtatggggaaatgccaactttttgtagaatccgtcctcaaatcggtcgatcagttcgggcccttcgcctttcaatgcccgccaaatttcgagccgaccaaccgaccgatttttgccaaagagatgggcatcgacaatcgcatcaaacacggcactgatcggtgccaacgaagtgccaaccgtgggacggtccaacaaatcgaacacattggacgagcaaaaatcactggaaatatttggaaaactaaatttggggctgaagagtcgagagaaagcaaaataaacccctttttaggtttgataaagtttatttttaataattagcagtagcagacaaaattttaggaatttttttcatttttcagaaaagttatgaccgaaaattggctttaccaagaccaaagctaattgacaaatttaaagcatcataactaatattcttgatatcatttgatagcccgaagagtcctcgattagtctacgaaggttgaaaaaattcatccaaaattcaaaaattatagtcgaaaacgttcaaaaatgaattttttaagttttctggtcatctttttttaatttggaattttaattaaaaggcatgaaatttnncggtacttgtgtgatctcaatctgttgggccatatttattctgaccaatatattactaataaggatgacattttatagtttttttagtgcattaaagagggtttttaagcgaaatttgccaggaaaattgctccaacggatttccaaaaaaatttaaatttctgataggaaaaattatatttttatctcaccgtttaaaggcgaacgcgtcggagaatcgcgagacgcagaacggcaaggcatgtgtgataaactatttgctgacaaagaactgtatcagcacaacgac

SEQ ID NO: 12151 - DNA, 3242 bp, Heterodera glycines
ataggcaaaaaataggcataatttagcaattattcgccaaaccattgaaccatggtttggtccaatttaagagaattgtatgtcattttcattacaaatttaacaaaaagttggcaatgtgtggcagacagaaacactcacacggtgagcgcattctcggcctgttcaaactcgaccaagaagccgtccacgaacgggacaaacacttccgcaatgtcgctgaccaccagcatttcggcccgaccgggctggctcaggttgtagaagtgcaccgtctggtcataggtggccagcccaatgcgcatggaggaggcgccggcgcggaaattttccctgaaatttttttttgaaaaaatcgctaaaaaaatctgtcagccccctcctcctctaacccatagagagcagctcgtttatccctccgaacagaactttttcccattaaaaacccaaaaaaaaaattctaaagaaaattttatttttgaaatttcagcgattttttggaaaattttttaaaaaagttaaaattcattataaatttttgaaaaacggtaaactttttcattttcttttcttgaaattttcgtatgaaaaacgtagtgcactgccgccacacacctcggcaactccctgagcgatgtctttgatgttgcggcagaacagctcgaccagcccggtgcgcaccgcgttgtaggacacgtccagcatgaaaatgtatgccggctgcttgggcggcgtgccattctgcaacaaacatttacaattatggttaaattgattggccccaaaaattgaattaaatgacaaaaatggtccaaattagcgtgaaatagccccccccccctccgtactcactttgcagtactgtttggtggccacaaactcgtaggagcccaggtacagctcgggccgatgctgaatgtcagtgcgtcgtccggtgtgatccaaatgcgcaaaataaccatcctccactttaaaagcatcacacaaaatattgaatcgttgggtgaacccttgtattaattaacatgcctggtgtgctggcacggcagaatggacaccgaaatttgcggcctccgtcaatgaactccatgaacgggcacatgtacgccttgcaacgctggcaccggaccggcccaatttcacccaaatcgatcaccggtggcggatactgcggaattttttttcaaaagaattatttttcgtcgaattgtctctgaattcctatcctcgaaacttttttgggtaaaaaaaatcgaatcggattgatttctgacaaattttttcatttaaacccgagaacgtggcgttaaaaaagtgaatgatttcgcggcgtacctcggactggtgcagcttggcaaacggacagatggccaacgacaggggcagttgggtggccttgaccatgtcctggctttgcggcacggcatacagtgttgagcgcatgaatttcggattggcattccctgaggggaagaaaaaggtagaaaaatgggaaagagcctgtttttttggtccaagatggacccatcaaaccgtgtggaaaacaatggaaatgtgttagacttttgggaaaattcaaaaaaaaaaatttatcaaaaattataccaaaatttttttttttaaatttgaaacgatcagtgtactatttttagcgcctccaataccacatcaatggacttaaaaaatcatttccatcccggcgtaaaattcaaaaatttgtaaaaaaataggcctagaaaatccgagggttccacaaaaaaaaccttggtcctgtgcgatgatttccgtgctgacaagcggtgggctttccgcttgcggaaagccggtcggaaacagtccggaacgcgtgctctggtcatcctcagccacttgaacctaaccaaaatgatcaatttaaaaaatggcggcctaaatttaagcgccaatttaaaaaaatttaaaccgggaaaatggcgacgacgcaaatttaagagccttgccccccctcgcaagaattttccaaaaaacgtggactaaatgaagcgcagcatttccaacacttacaaggcttggcatcatgtccgggtcaagacgctgtcgttgcggctgtggcggttggccaggtggaaaagcgctgccctgctttaaaaaaaacattttttttaaattcccatttattttgcggctcgatgtttgcggtccgtacatccaaaaagggctttttaggctctaattcagtttatgcatccaatcaatgacaaatcctcagtttcctaggccatgaattttcacaaagcaaaagtctcgggaacttagagaccggaatctgtttttagtcatagcaaacggaagccaaattacttggaccgtaaaatccaaccgaaaaagcctgaggctgttgcggcatggaaggaaaagcctggggctgttgcggcatgggagggaaaccctgttgttgttgttgttgcggcatgggagggaaaccctgttgttgttgttgcggcatgggaggaaaagcctgctgttgttgttgcggcatgggaggaaaagcctgctgttgttgttgcggcatgggaggaaaagcctgttgctgctgcgacacaggtggaaaagtgggcggttgttgcggcatttgagtaaaagcgtcttgttgcggcattggaggaaaattctgttgttgttgcggcacggcttgctgttgcggcatgggtggaaaagcctgttgttggtgttgcggcacggaaggaaaagtctgttgctgttgcggcacggattgctgatgcggcatgggaggaaaagcctggtgctgctgcggcacaggtggaaaagcctgttgctgttgttgcggcatggatggaaaggcggtttgttgttgcggcacgggaggaaaagcctggggctgttgcggcatgggagggaaaccctgttgttgttgttgttgttgttgcggcatggaaggaaaagcctggggctgttgcggcacaggtgggaaagtgggcggcgattgttgcgaaaacatttttattttctaaatttcagcaatatctctacataaaattgagttttggtcgataaaacattttggtacattactctttgagtcatggccaatttttcgtcaacaaagagagttatcaggtccgtttttgggtattaattagtgcactaattgacgtttcttttggcgtaaataagacctttttcacaccattcatttttgagaaaatccaattttctaaaaaaaaaaactttattgtgcacta

SEQ ID NO: 12152 - DNA, 1656 bp, Heterodera glycines
tcagattttgacaaggcacgcgcctaccagctggacaatatgcaattgccatttgttaacgacgcattcacttttacgacttattcggtgccgctttattctataaatttgagattattttactaaagttatctccaaaaaaacacaattttttgctctaacgcagcctaaaagtatgtattacgaaagatttaaattccccccccccttttatttttcaaaaaaaaatgcaataaaattgaaaaataggcccaaaaagatagaaacaattgtaggaatatctgagttgacaaatttgtattaatgcctacctttgtttagataatcattttgtgcactctgtacccatggatttggagttcgtgcgcacaaatggcctcatgggcttggccaggtggcgccgaggtccccccgaatttacgaattttctcaaatctttttcaatttccagatttggcactccatcgttttcatttgggtgtcttccgtcgtggagacgctcatttcgttgccattctcatattaccacacatttttcattgaacaaaagcacggatttaacaacgaagtgatccaacaattttttgcccactttttgccatgaaattcttttcagacagtgccatttttcttcaaagaccgtgccatgaaattgggtgtcagtcttgcgctcagctcaccggttgtggccctgttggtgtggatcattcgaaatgggggcccgaacttcccgatttatgcatggcttgccctttcgctcatcatttttgtgcgttttttcgaatttttttgtcagttttgatcccagacacgcaaaaattctccccgtaaatttgcataaaaatttggaggtcagagcacgcggagttctttcgttttttgaccctttccttccgttttctttaaattttgctataatctcccaactttgttcttttgaatttttttgctgtctttgtaaacatttgttcttctcactcgtaaattacggtgttttctcgaaaaacataataatttatcataaaattccaaaaaaaaaaaatcgcggaaaattttttaaattttttttctttaaattttgttgtgttcaggtgatgatgtttgtttaccctgaattcattgcgccccttttcgacaaatattcccctctgccggacagcgaattgaagcgcaaaattgaggcgttggccgaccgtgtgggctttccgttggccaaactttacgttgtcgaaagttgccatgaaaaattattggtttatccgcttttttgcattttcagattccaagcgttcctcgcacagcaatgcgtatatgtatggcttttggaacaacaaacgcatcgttctgtgggtttcttaaatgaataatatttttttttcgattttcttgataaaagttaaattctgtcaataaaaacttgttgaaatcttaggatcatgtgaaaaaataaataaattttgaaatgttcgacctttttgttcgagttaaggattaggaatttgtcaaacttgatgtcagattcgtaatcagcgacgccgaaaacccacgggaattggcatttaaagtggttggggtttctcgttcaaaaaaaaaagaaaattatgcaaaaacaaaaactgacaaaaaattgaactgttttgttcagtttcgacactt

SEQ ID NO: 12153 - DNA, 1835 bp, Heterodera glycines
cgcaattccatgcgttttgagtcgtggacggttcagtcccaaaggcatttggccatttcagtcccgggtctgtaactcttcagggattggtttccgcaaaaaaattctttcggattcttccattacagaccgagagctatcgattggtatatatttcgaccattttcggctctgggccatatgatcaatatttatcgctattttaaattaaatttttcttaaagcatgtattatgatgctaaaactgttggcagtaattttcatgaacatatattacacaaggattataacacatttatgaggcaacattgagaaaacttaggattggatatggaaaaaaaataatttgaatttaatttaaaattgtatccttattttcaaacacctgatttacacacaattattcaatcttgaccaactctttcccaactcatagtttttcaggtaaaactacaaactcaaaattttcgaacctttaccggttttgaaccggtttaaaactcgaaaagtgaagaaaattgaacacttcagatcttttaaaacggtcaaacccgaacaaatttggtaacactcgaaaggtttttaggtgagttaagtctaaaatcagtggatgaagtcgaatcaacggcatctaacgaataagcatagtgacaactgattcccattgaaatacacttcagtaccacaaaaataatggaatgaaaataagactttaaaagcaaaaattacgcaaaaaaaagcatgctcatagtcaattccccccgttgctgtttttgtagatatcttaagaacacacattcaaatgaattttatttttggtaaatggcaaatttcaaggagcgatggaaaagggagcaaatcgaatgcttttcggatgttttcaacccacttttcccaaagattttccaaattcttgggttgattttaccataataagcacaaccaaaatgctgacttcgaataaatttcggattttgaattccggccacaaaagtctgagaatttgtttcatttttttatttggtaaaaaaactaaaaaattaaaaaatgtcgcttctcacattcccatctttttagagcttctcattctcgcatttgtgcgacccgaaatgatctttctgaataccgatcggtgcttaacgtagtcagcaaccgatcggagtatcagaattttcaaaggtgggcaattcggacggaccttttgagcttttcttgaacattttcagtgttttccctcctgccaaagagacagcgtcaacactcagctgtatttccacgtttcagcaccaaaaggaaaattttgaaacgaaaaattcttttaatttcatttgaaggcttctatgagaattttcaggtgacagacgggttttttttgaatgaccgctgttcaggtttaatattacgaggaacagctgaccacaattgccctcggttggtctgccgactaatgccaaatgactgtctcttaagggttcatctctcagatcggtggtcagctcagcttctttctggggcctatttcaattcggatcatatctgcgatatgactctatgacacggtgtcatatcatacgcaaaatttctgtttcaattaaatcaccgcaaaaaaacgcccttaaattataaaagtttcatctaggttattgcaaaaaataattctcttgtttgaaaaattaactattttttcaaaaaatttgctcgatcaaagtatcacatcaatcacttctaatcgcttatttaaagttttttaagctgtcagggattgaaaaaattcaagttcgactccgattttggacataagcgcaaatgtccggggcgtaaatgtggggtaaccg

SEQ ID NO: 12154 - DNA, 1948 bp, Heterodera glycines
agcaagttagcaaaaaaaggcatatgcctaataatccgcgtctctagtgatcagcaccctcgaaaacccaccggatagtgtttttgagagagaggcagagagagggagagagagaaaaaaagaggaaggaggaaagagaaaaagagaaaggaaaaaacgagagagagagagaggaaagaggagagagagaaaaaaataggaaagagagaagaggagagagagagagaaacagagagagagagagagagaaaaaaagaggaaggaggaaagagaaaaagagaaaggaaaaaacgagagagagagagaggaaagaggagagagagaaaaaaataggaaagagagaagaggagagagagagagaaacagagagagagagagagagaaaaaaagaggaaggaggaaagagagaaagagagagagaaaggaaaaaatgagagagagagaggaatgaggagagaaagaaaaaaataggaaagagagaagaggagagagagacagagagatagagaaaggaaagagagtaagacattgatagagtggaatgagagagagagagaataactaaaaatttttaaaaattatgtctcagtgacgaaatgatcggccaccaaaaatacaccccctaagaattgaactagaaatttcaaaaaataaaccctattgttttttttgcctttcagttttcagcgataattaaataaacgtattgttgaccactgagtttcaagtgcctttttttgtcaagagatccagaaaaaaatttaaaaaacaaaacaaacagttaataaataataaatatatttatgaattcgaacgaaaaaaacaacaaaagacaatgatgagagatgtctgagagaaaataaatgagcatcaaatcaaatcaaattccaaacggtgagatcgatcattctcaatataattaattcacttccgcgcaattagactccatttccctcagtttcttccttttcctcctcccttttacgtttctgctcctgcttctctcatgtaatctgattcgtcccatttgctagaaattgaataagttgctaacgacaattcctgacttattttgtctgccaatgagcttgtcacgaatccccaattttgtccattttccgataaaaaaaattgcatttcgccaagaaatcgtcggttttacgccaaaaaatgatctgatcatatctattaattatacgctatttaagaaccattaaacgtgtttttgatttaccccttgaatgaaagtctagcacacgaattcccaaaattgtgctgttttcactaatgaaatctggggtttttaagttgtccgatgcgatgcagtttttctcattgccaatgcaacaattgggctcgagccaaaatttggccaatgccaaaaaaattaaattatgatttataaaaaaaaacatacacaatgctctccaacttcagaatggccttccggtcggaaccaatgtaagagacagtgcatgtgttttcctcaggcgaaatctgctcgattttggccgagtgccactgtccgtccacttcgtagagtgccatgcattgatcaccgactttccactgaaaaaataaatttataaaagtaatgaaaagaaagtcagacagaaggaaatgagataccaaccttctgaacctgttctttctgttggtttgactgtgcgttgtcattggctgaggaagtgttctgaataggatcaacaatttaagggagaagaaccaaggttttcgaagtgaaaaaattcggcgtcatccaaaacctggctatcactcccagaaaaaaatttgaccggtttttagcgaaaaattgctgatttttttataacccctactttgataattttggacccagtctattttttatacccaaaaacgcataaaaaggtatttttaataaatggaaccttattagcacttaaaaacccggaattttagaattcaa

SEQ ID NO: 12155 - DNA, 1352 bp, Heterodera glycines
  unsure (1)..(1352): unsure at all n locations
atcgcagtgcatttgttaacagcttttgtccgaaaatgaccgaattttgctatttttgccattttcacgaattttattaacagattttcagcaaaaaaaaaaaaagtatatttcgtaaaaaaatttacaatagagaaaaacgagattcaatttcgtaaaattttttaacgaaatgcaattcaaaatcgtaaaaattatgggttttttgcacaaaatttcgatttttttttcaatttcgtaaaaatttctcatctttaccagtgctttttcgtttttggtcgaaaattttacgaaattgcctcggacccccttacgatttacgaaattgacctcccccccccttgtccgcctatgtctggggtttttaagtcaatgcaacaattgggctcgagccaaaatttggccaatgccaaaaaaattaaattatgatttataaaaaaaaacatacacaatgctctccaacttcagaatggccttccggtcggaaccaatgtaagagacagtgcatgtgttttcctcaggcgaaatctgctcgattttggccgagtgccactgtccgtccacttcgtagagtgccatgcattgatcaccgactttccactgaaaaaataaatttataaaagtaatgaaaagaaagtcagacagaaggaaatgagataccaaccttctgaacctgttctttctgttggtttgactgtgcgttgtcattggctgaggaagtgttctgaataggaccattaaaatttaaaatcagcaatttaagggagaagtaccaatgttttcgaagtcgaccgatcatacattttaccaaactcggtgtcatccaaaacctggctacctaaaataattaattaaatatgtaatgttttgataatggccaattaaaatatttaatggaatttttcgtttatgccccgccgaaaaaatcatgatcccgaaaaaagaaagcatttttgcagcttcggtctttttaaattgtgccgagtaacctaaacccgacgtattttaagttaaattacctcttttccttctgcggcagagccagattatgacgaaaaccgccacaatgacaacaacgacgacggcggcgacgattccaaacaacagccaatttgttgccgtcgtcgttgctggtgccgtcgtcgtttcgtttgtcccgtccaggcatttcggcctttttcccgcctccttggcggcgtccttgacaactntanatttgtctgttgttgttagtgaacaattttgccacagngaaaatttcgccatgagaatgtagacgaacagcttagaaaattggtaattgtttaaattttaattttaaaatttgaaaatcggcaatttgcctagttgat

SEQ ID NO: 12156 - DNA, 1109 bp, Heterodera glycines
ttatcgtctccacaattttcttttattattggggggtgcagcggaggagagggggggggggaatttctatggtcaccaccagcaccaccatggctaacaaaggaggaggagaagcagtgaaaagcatcgtcttaatcaccacaataaagggatgttttgacttattgttttgtgggtggtggtggtggtggtggtggtggtggtggtgttggtgggggtgacgccggtggtcacacgacggagggcggcgcggcggcgagcccccgggggcacgcgccgcgggagaaagtcgcgcatttcactttcccctccgcctcggcgtctgtggttttgttgaaactggtttatttgctgctgactgatcgcattgtggcgctgatcaggctgctaagaaagtgatcagaaagaacaatggaccgtggaagagagaagaggagggggagaagcatgtgctttattaaaggaactgctaaggggtgattcattccaatttgtaaaaaaaataatcggcaggagacgagggtcaataaaaactgtttgtaagccttaatttttgggatttaatgtggattaccaagttagcatttggatttggagaaggatgaacgacaaaaggaacaccagcgaaagaattttaatcaaaaatttaaagggtccatattttggattttgttaaaaaattaaaaaaatatcaaaggcttttagggcgtttggttggggtggggagagtaacttatattcaaattaatttttagcaaacatttaacgggaagggggggacgggtaggtggaattttaaatttttttaggaatatcttggatttgtaaacaaaaataaagaaatttcagagacttttaagacgtttggttgggctggggagagcaaattttgctttttcaaatttaaattaaagaaaaaattaatttgtttaattatgcgagaacatttgtatggactaaaaatcgtcaaatattttaattattatcaaaaaaattaacatattttttgacttttaattttttcttgaaataattgttttaaaagtcagccccgagagcggaattttgtggtcgttggagtgggagagtttggcggggggggggggggg

SEQ ID NO: 12157 - DNA, 1750 bp, Heterodera glycines
cctaaatacggtaaattccatataaattttgaaaaatgctatataaaatcacctaaatacggtaaatgccatataaattttgaaaaatggtaaataaaatcacctaaatacggtaaatgccatataaattttgaaaaatggtaaataaaatcacctaaatacggtaaatgccatataaattttgaaaaattcatgctaaagcaaatttaaaaaaggtgcaacaaaaaattggaaaataagaaatgcacttgcgttcacaatgaatcagcaaaaaaagtgaattttgaaatgggaaagccgatggaattcacaaaatggaaaataattactgcttgttactgatggtccgtcgccaattcgtttaatggccacgtcacaattttttgacagatttttttttataattcattcaaatcgccgactttattcatttttaacttccgtagcttatcgtctgcaaaaggctgctaagctccggactaaaataaagggaagagcatcaaaaaaagtgaaaaattcaaaggcagatctcggcatcctgattttatacgctgtgagaattattcagttgtccttgaaaactttttgacagattttctcccgttggcctttgggaaatgcgttttctttttttataataaaataaaataaaatttacatttattatttgtccccaaatagaaggtcctctaaagtcaggtccttaaatccttaaatgtcgaccacggtcaagaagaacgggaaatttggtcgttgagatcgcagggcgaattttgggcaccagaaatttgggcaacgggaactttgggcacttctatattaatttaaaaatcagaagactaaaaattcgaatattacgctgtgatttcatcaataaagattcaaaatgatcttttaaaaaattgtttttgcttgaaaattaaaaagaaaaatctgttaaattaattagtagtcttggtattgtgttgagccaagctcagctcaacctcataattcttgggttagccgacatttgcggaccgacttttgcggataatttagtgaattaaaaaaataaatttaacaatatgaactacaatttaagtgaaacaaataaatgatttaaaaaaataaaaataaccaaaaatatacgagtaagtttaaaaaataaaatatatccaaatatataagggattaatatcaaaatattctacgataagtcagtcatcgcatttaaacaatttcaatttgccaaagttgtgtgatgcatacaaaagcaacagtgcaagttgcttttcttctttctgaattcgttttggcgacccatcaacacctaacaaaaataaataaaaaaagataataattatttaatttattaaccataaaaacaaatttggtcaaaagaagccgcaggcgattcaaacaaagcagcaattttggggaataaaatatcgtaacgaacagattctaagccatctcagagcaatacagtatcgcctcgcagctaataattttgacttttgggattgaacatttatttatgtgataattctaagcgaaaaactttttgtttggatacttttcattttttaactcactcatatatttggataattttcacttcaactcactcatatttttggttatttttatttttttaaaacatttatttgtttcacttaaattgtagttcatattgttaaatttatttttttaattcactaaattattttgaaagggtcggtccgcaaaagtcggtccgcaaatgtcg

SEQ ID NO: 12158 - DNA, 2462 bp, Heterodera glycines
  unsure (1)..(2462): unsure at all n locations
cgaaaacgaaaacgaaacgaaaattaaaaattttaaaactcgaaaacgaaaacgaaacgaaactttttcttggacagaaaacgaaacacgaaaacgaaaaaataaccgttttcgtacgaaacgaaacgaaaaacacgaaattttttgaacttatttaatccacaatttaaaacattaaattttaaattgtgtcctcaaactaagggaatgaagatcatagtaggtggaaaagctgatgtggctctaataagttaatttttataaagtcttaaagtaaaagagtcagggcgattcgataggtattgatggtgaattttttgacatttaaaagaatttcatacgcagatttgggttcttatcctttttgtcaccctcccccctgaaatttaaaaaaaattatatttaatgtgctttgtcccgccgatttttcgaaaaaaaattgaaaattcaaatttttttaaaatttttattcttattctaaaattgattaaaactaaataaaaaaaatagtcacaaatcattggaactccaaaaattgtcattctgtacagattctaatataaaagtaaatttttaaaaatttgaattttgcaccagaaaattataattattatttttttggtttttaactttattttgaaagttctaagaggattaacgtccggctgtgcacatagaggaggccgaaaaaaatcgaaattaattaaattcaaggttcccaactggaaatttaaaaaaatgagaatttggccgacaaaaacatgcgcttaaaaaatagtttatttttgtgattttgagcaaattttttgagaaaaataaggaaaatttagtttttgaccgtttttaacatattttcactgaaaattggcaattaagggcagactttgaaatttttaggggaattttgggggtcggtggtgccgacaggcgccgccgggaagaattttggaattttcaatgaattttgtaaagaaaaatgtagcatgtagcaaacgaaatgtcttattttttccaaaaaagtgattcttaagggtgtaaatattttcgtctttttcgtccaaattccgtctgacgaaaacgaaacgaaaatttaaaatttttaaatacgaaaacgaaacgaaaattttttgacggacgaaaacgaaacacgaaaacgaaactcaaaaagtgacgaaaaaagggacgacacgaaaacgacacgaaatttcgtacataaatcagtaccaaaagtacttattttataaataaataaaaataaattaatcaaaaaattatatgaataattaatcaattaactgacggacatgtaaaagaatgacaacatttactggatggcatgaatgaaaaatttaaaaaaaaataccaatacataaaagatgtctattttacaaatatgaaaagtgtaaataaattaaggcaatggtaaactttctgtttaaagaaaataaagataaaattatatgaataatatcatgaaatattaacattatatacataactaaaagttctaggatggttaatgcggaggttcttaaaaataattattataaaaaataaaagatagcacaaaaagtcgcttgtataaataaaatctaacaaatgattaaaaaatgtattataaaataatgcaaaaaaaaaatttctgtttttaatcttattacgttaaaaccaataaatgaaaatgaaagtatttaaaatatcttataaaacaaaaatcctatttttgaagtaaagtgtgtttaatcaataaaaaattatctaaataaaaacacttgataaataagggaataatatttatattggttcaaaaatttcaggtgaacctatcaattgaaaatataaattataaataaaaaattttaacaaatataaaaagagatgcacgaagagatattaacaaaaatttcattgttaagaatgatggaatatcaaaatgtcttaaaatgaagaaataattaattaaacaaaatatgaaacgagagcaccaaatgcatatttaaaacatagtaatgataatcaagtaaatgagagtttaaactacgagaatataaataaagacaaaaatttttttattgaaatttccctttagtaaattaaattatataatttcaataataagaattacaaaacaattctaaaaaaataaattatgcgtaaaatgatgaaaagacaaataagaaaagccgtatttccctcctaaataaggaggattttccccgagtcgattgaacccgacattcaaaaatcttcaacacttaatttaatgttttccaacaataataggtgatactgaattttgggttaaaacaatgccaaatggaataccataatgtctttacaataaatttaaaaaatgttttaaaattaattaaatttaagaagttattatcaaaattcaatgtaaataaattataaattaatattgaagtaaataacatcatttanataaaatatttatcacc

SEQ ID NO: 12159 - DNA, 1630 bp, Heterodera glycines
cgaaatttcgccacactcctggtccccatccatttccaaaaaattttttcaaaatttggaagggtttttgccagtttcaattttacaaataaagaaaattgtaaaaattattatatgccataaattcatttttttattcaaagataaaaataattttgcaaagaatggcaaaaaattgtaaagcaaaaaaccaaaagcataataatgtgaaaattttaaaaaactatattttagcagtgaaaattaaataagttatttataaaaatgaataaaatctctacaaaatgccatcgcaaacagcagaattccaaaatgccacttttgttgccaaaaatgataacaaatccagcgatttgtagtcggttggatagagaagaagtatcttatccgtgcgaagcctcattcataattttttcgagtctgatcattttttaagcgttggtgtcatttgtggacatatttttaaacaaatgagcatttttcattgtaaaagttaaaaataaaatcaaatatttgtaatcaaaaaatattaattaacccaaaatttgcaataattttttatatttttatagaaatgatttttattttaaatgccttgcatttggacaaagaaattgttttcatcaacggttttcaatttgttacaatttaagaaattaatttttatgactaaaaaaaatataaaaccaagttagcaatgaattaaattacttaaaaaagcaaattagttcgagttttaacattttttcaaatcaacaaatttaatttaaaatgacccaatttaaatcagaagacacaaagaaaacaaacagcttcataaataagaatgaatcatgctaataaatatggaaaatataaatcaaagtttcgaaattgtagcaaattcctttttccatcgaaaaaagttgtaattccaatttccaattcttgggcaattttttgttgctcatcttcttattttttcattcattttgaaatattgctttacttttcttaatttgtcctatcggaatatttatgtgatgcttgaataaaaataacagaattaaatgattaaatagttttcttacttttttggcattttggctccaattcttttttccattttataaacgtgtcataagaaatgcccaattccttcacaaattctttctgtttgcctttatataaacttttaaattcatcaaatcgtccaatgaattcgcgctttttctcctcataaagctctttttcattttctttttgtttaaatttaattcttttttccattttttaattttatagtattttgctcctaaaattcttccaattttcacatcaattttgtgtcggtctttccgttgatattttcctctttctctcaatttttctttaattgtttcaaactttcgaattatttctcttttttgttgatcatttgggtatgtcgccatttcttcacccatttgatcaactgctgcttgtgatttctcgtttgtctcattttgttcaattttaatcgccttttcttctctttcatttttattccattcttcgccaaatatttcgtcaaaatttggtcggattttcccggattcaattttaaaagcaatgaaaattattaaaaatattaaatagcacaaattcattt

SEQ ID NO: 12160 - DNA, 1210 bp, Heterodera glycines
tcaacaaccaattgtttgtcttcaaagcgcgaataaatctattctaataatctaatcacaaaaattttgattttgaattttgcaaacaaaatgaataatctctttttaataaatcattgtgatctcgaccagaaaattataaagcataacaattaaaatttaaaaaaaaaattctcgaaaaggaaaataaaaaaatgaagaaatttaaaaaaaaattaataaaatatagattatattttaaaaaactatacaaaagaagctgattcattaagctaagatcaatggcggaaatagaagatgtattatgaaaaaaaattctaagtactaatcgggtaatattttcatcaaagaaatctatgccaccaaccgaccaacaaaatcaatcttgtcgatttagatattgaaaataaaaaaagaatataaaaaataatataacttaattatcggacataaataagaaaggtggatttaaagcaaatattttgatgaattcgatttaaaacatttaacatttaaattaaatttttttaataaattcaaaattattaatgagaaaacattataatgtataacttaatttaaaattttgcataaattaaacaaaaacggaataaacagtaactgaaaattagtacaaaaccgaatgattgcaccagtgcaatatttggtccgtagttctactccagaagaaaacagcactaacataacttgaaaactttaacgaaaaaacattgataatgtaaaaaattattgatataaatttcataaatttaattcagaaaaatcagagcgaaaatatttccactttttaatgttaaaataactaaattatttattctgcagtattaaaaatgaaaaaaatattgcgactagaaaactttatttattaatgtggatatcatctatgcaaaaattaaaataacaatataaaataaaaaatcaagtttcttaaaaatttattctacaattaaaacataaaatttatgaattacgttaccttttgcaaaaaaagaaaatttaaataagaaaaaaatataaataaattaaattttataaaatttatatttgtattttataaaatgaaaattaagaaaagataaaaatgcaagtagtatcagtagcatttaagacatttattactttaaaattaataatcatataaaaaaaattattattcaatttgtaaattatcaaatacaagaacctcaag

SEQ ID NO: 12161 - DNA, 4459 bp, Heterodera glycines
tgcaggtcaaattggcctcccaaagaggaacgggccgcgtacgcgtcgtacagctctgcccttcgcgagtcgctggtcgtaatcgaaactgagtttcttcttgcgaacaacgcagtgctgaacacggacactgtttcacttacgcaaaagtcggaagaactcgtcaattatcttttgtgccgaaatgaaattgactgggcggaaagtgaatcaatttgtaagttttatctttaattacgcttcattcgacaccagcctttgtttatacgaacatttcacctttttagctcgatgtttcgatatcgtcgactcaatttcaaaaatacattctgtagatgttgagagggtgtttttggcgctgatcgatcgttgggtcatcgaaggccaagaacagtcggaccaagccgtttcacagatcacttccgaccccgactccaccatcgactttactggcccttcggttctgtccaactcagtcaacaccgatgattccgactttttcgttccggtcctttacgacgacattcaaagtcccatagaattaattgaattcttatcttttgagcaatttcatttcagcaactcggatcattgtccttttgcgacggattagggaaccgacgaagaaaatcttggaattttcacacaagtctgaaattgtgagttggctgttttctttgctaattgttcattatttgttggattaggatgtgtcggtgctccccggcggttatttaaccaaagttcgcattgcctgctgcattttgcgctttctgaccgatgaacagatgaggacaatgttcaacattagcatagaccaattttagtaagtcatcatcggcactgaattccattataatttacgtaactcttttagcggaaatttcgtcactatgctcaaccagcggctttactcattgtgccgcatcgattcgtcgccgaaggatctgaaggaggccgaaagggtggactttgtgcgaaccattctctcgccccaatcaattttccgccaaactcctgaagtctctcccctcattttgtttttaatttttgcttttatttcatcttttaaagatcgcccgtcttttggtttgtctgatcgtcgacaatgacattgatgacctgacaacacttggcaaagctgcccaacgtctcgtccaacttcgtctgtccgtccctctcttggaattgctgaaatatttgcgcaacatcaagggaaaggacatcagaaccatcccaaacatttcggcattttttgctaagacctttgaggcactctttgacaagatcggtccgctttattcgcttgtctaattatgacaattaattaataattagtcctcaatttttatcagatgcaccagcaactgatcggaaggaacttgcttcgctcgttttcttcttgatcaggtaggtactcgttgaaaaggctgtttaaaaggaatcttaaaattattttaacttcatttaatcgcaattttttctttttgcgtattttcagctgccccgttgagggcgatggtcatttcgctcgctccgtttctctgctggcgtcgagtggtgccaacttcgcctcttcgttggtggccatttccgataattcaacgggggtaccgttcgtaatttaatttttctcgtattagttaattacttttttcacaggaagtaaatttggccaatgaaagtggaaagatgactgatttgtgtggtggaaattgaaaagataatgaaagaggacaactattgatgtacacatttattgaaatgcgggtgtgttggcgaattgatattttagtgcaatatttatttaataatattttttggtattttaatcatgtatttttgactctcaataaaataatcaatatataagcaaatgcaatgtgttcattagactaagggttttagtgcagaatacgcgtcccatgaatttcatcaatagcaaaatttttagaccggaattttgaaatgaccgggccgggagttggaaaatagaacgggatcccgggtccggaactccaggtttttcgagactcccgttcccaatttttgggccggggccccgccgtgactgggattttttcaaaatttttggaattttattaaaaattcgaaaaaaattttataatctttcttttagcttagaattatatcaagcctgcaaatcgaccttttttgcttttcaaaacccttttttactgcgcattgtctttttaccagttgaaattgctccaaattttcaaaaaatccaaagttctatcttgaaaatttgaattaaagttttgaggttaaatcattggtaaaaatccaactcgtactttttcaaaactcgtatatactgtgaaaacagaaatttgtctcaaatcgaagtcgagtcgggtttctgcttttaatttgtaatttcccaaaatttagctccccatttttgtttggctctaatgcagtttacgcgtccaatcaatgactatgtatcctaggtttcttaagtcataacttttttctttcttgcacaaaactcacattcttggtatcaatcgggagcttaaagtccacagttgtttttgtataaaaaaaattctcggacaaaggcaacaatcaaaaaattattgttgaatatacacgaaaaattatgaatttcaggttttttcattgcaatttttttcttaatgcaagtatttgctcttttcttgtatttataaattcccgggactttaagctttaaattgatacgaaggatgtatggatttgtcaagtaagaaaaaagttatcaaatgaaacatgaatcaaaatctttaaaaaactaacattttttgttcataatcagtaggtgggcggcacccaccaaaactttacaataattccatcaatgagaagggaaataaatgaaaaagtattgtggaatacagtatttaaatcacggtagccagattaaaattttcaaaagcctcatttggcaggcaaaaaagcctcatttttgcaaaattattcaaaacacgtttaaaatgctcaaatgttatatttttattttttccatgatcaatcaatttgagcaattttttgttagaaataagcatttgggaaattctgagcacgaaaaatcgaagatttttttgcggcacttttcaaaaactttcggggaataaggggccggcggtgccgataggcgccgccgggaaaatttttgtaatttttaatgcgatttgttaacagatttgtccacaaaaatggccaaatttgtgatttttgcaaattttttcgaaattgcattttgtggcaaattttgtgctctttctgtccgtcatattcgtcttatacgaaaaattttatccaacctcctaggaatttttttaaataaagtttacccgatttcaagcattttagggttttcagatcaccctgaaggagtgatctgattactagggctgggaatttaagtcaaatgactttttttgctgactcgaagatttttatgattctttggtttaattttttacctttttggataaaatttgtcattttacatccctaaatttgaaagtttttagcaactatttaccgatttttagcaactagagtgccacgggaccgggaattttgggcaaacccgggaccgggaccttttcgagttgaaaaaccgggaatttttggctgggaaaaccgggaaaaaaccgggactagtcccggtcccggtcaaaaccgggaccttggtactcagttgtccgctaccaggtcccggtcccgtggcactctattagcaactattttgtgggtttttttagaacctaaaaactaactattttggcagtttttagcaactataaatatcatccctatagggttataaattatatggattaacatattttttctgcgcatatgctatgaagaaaggggctcaaaaatagcatttctatgttaaaattttttgatttagtgaaagtttctagtccatataaatccatattttgggggttttcgagaataaatccatatttcgccatttttgcgtttttagtccatatttcggccatttttggcaaattttcataagaaaaatgcaaaaaagcgaaaaatacaccccctaaagaccgacttttttggaaatttttaaaaaatacagccctaaaaagagaattttttcgaaatttctgaaattttttagttatttttccacttctgaaaattttcgctgaaacagaatgaggttattacaaaaattttgggttgtatttgatttgcaattgtgaagctagaatttaataaaaaaaattgccattttttaactgttaaatcaatttttggcagattttagcgtatttttaagtctgttttacaaatattgaatataaatatatttcgtaattttttatggtttaaaagatatattttggcaagttttagtccatattttggtccctattgggtcatgagctttttagtccatatttcggtctttttt

SEQ ID NO: 12162 - DNA, 2481 bp, Heterodera glycines
  unsure (1)..(2481): unsure at all n locations
aatatggtaatgtgtctgatctcagtggggcggtcgctgatcattctgtgcccgatcagcccgaatttgtcttttacttgaaattattttatttatctttcatttntagttgaaaaacagtggaagagtttaatataaattcacttcaatcaattttaattttcattattttacaatttaaaataaaaattcaaccaaatcgattatgattaaaatcccgaaaaaactgactttctcggctagattttatttataattgtaatttttgaatttttctttttatcagggctccgaactgaaaatggccgacaaaaaaccagcatttggggtcaaaaataattattttgcaaaatactccaaataaaatcaaaaaaatgttcgttttttgcgattttgagccagtttttaagaaaaaaaaaagttttggtgtccggcggtgccgataggcgaaaaatggccccttttggcaaaggtgcagaattgtggtcccgatgggaattgggagccctgctttttatgatgaataactggtgatttgtattgattttatcgagcaaatttttgaagaaaaaaataacatgctttaaatgaatgaaatcattattggatttttattctctgaaaaataaaaattgatgtcctatttcaacacttttacagcatgttttatcatcggtaaaatagaaaaaataaataaatttttagtttttaattaattaattaagaagcatttttcgcgcaaaactcaaccgctacagcgaacaatgaaaaagagaaaagtggcgaaaattgcgctgacggaccgaaagttgcgacaacaattgaaagagaagaagcagagacaccaaaaagtgacgatgaaaaagaaacgaaatatttaacaaaataaataatatttaaaatttagttcaaattagaaaaacggaaacgccaagaaaatcgaaaagaataattcaaataaatgaaaaaaacaaaattgaacactgtgcagaggaagcaaaaaaatgcattgagaaacggagaaaaagtgacaatttataaaataattatgaagtggaattaattattcattcagaaagcagccaaatggaactgctgctgctgacaaacacagcagttttgcgtgaaattgtccaatgcaatttttatttcgttggcattccgtcggtcgacgaaagtgacgcgattaaatcggcaaaaattttgtctgagaaaattgaccaattcgccgaaaagtcgacggagcatttggtgatgaaacggattcgactgaacctagcatttatcacaatgtctttggaaaagtatttccaaaattattccacctttttcgaagcgttgaaagaaaaaacgactaaggaaattgatgaactttttcgcgattttggaaaaatggcacaaaaatttaacgccgatggcacggcaaacattctgaacttggaaagcgttaagccaaagctgctttattacttctttttcagctgcttttaccgcaacttgatgctaagaacaaatctggtgattgtttctagagccaggacgggattgggtcccgacgaaattggaattaatccccgggtcgggaggtaatcctatcccggtcttatttcaatactgagtcttggttcggcgaattagagtggttgggatcctgacctgatctctacatttgatctggaactgtcaattttttagtcagatacaatggccaacaaacaattgctgagttggctgtactcaatggaaaaggcaatggacggtcgaatgagtgaaatcattggccatcaaaacccatcgcattccgttccaaaaaaggcaacaaatgaatgaggagagaattgaaaccgtccactttatacctttttaaggacttagtttaaattcattttgtagaaagttttgctctcttagaattttcattgtctgttaggtttttgaagggacaacggaaacgaattttatgtatcttttgtattttacggtattattagagataaagcgtagcaaacaattttaatattcgaagatgaaaaaagtgattatggggctaaaaaagaacgcattgaaagcaaaaacagtacttgaaaaggaagaaagagcaaattaaaacccaaaattcaaggacaaaagacttttgcactttcaatcacacagcttgagattcaagaattgtcgttgcaagataattaaaaaaacataaagcatgtttaagatgatttccgcattgggacttcgaattccacggcaatttccgactcttgaagaaattttaacaagaaatgccacgctttttcttgtggggccggaaattaaaataaattattcgatttcccagctcaatcaatggcagaaatgtttatgtcgcatgaatataaataaataaatgtgaacgaaaggggaaatatttcgaaggaagtcacaaatatttaattaatagcatttgtttttattagctcatcatttttcactaacatattaaga

SEQ ID NO: 12163 - DNA, 2843 bp, Heterodera glycines
  unsure (1)..(2843): unsure at all n locations
tttcgctttttgtcgtgattttttattttnccttttgttttccgccaaaaatgcaaaaattgtgctggcaaaatcgtcaattggaagatcaattacccaaaaaaatacgnnacatagttgttaaatttgaatttttgatcaaattcgcaacggttaccgatcagacaaaaaactttaaattgccattttcggatgaagaattggcgaaggaatgtgaaaattgcgaattcgatgtgcaaaatgaaatcggagaagaattactcagaccgaaaagtgttcattttactatccaagtgaccacaatttaccaaaataatggtaaaagaaaagaatttaaatgaaatttacaatataaaaaatatttcggcttttcctcatcagatgctgcaaatgataatctttccttcgtccgtttcatcgaactcattttgcactacccaaactttgaaaagctttacacaatcaatctgcaaaatttggaccattttggccacattcagaaaagagtgaattttgatccttcgcaaatgccaaaccgaacaaattttgccattttatttgcagagggatccggacagcgaggaaacgaacaaagcgacgaggaaaggggcgccgatttcatcggatattccccgataatcccaggcgtatgtgaacattttgtattaaaataattaacttaatcacgaaaattctataaaactctaaaatattttagcaacgaattgtcgatgtgaaaatggcggttgacttccgaaggcaaataacaaagtacgccttcacatacaaaatggtaatggaactgtttgagtttgaatatgtgagcaaaaatgaattggaaaatgcggacgaatgcgccgtttgtttaaatgaatttgaggaagaagaaaagttcgtcatgatacataagaatgagcggcaacagacaaagccagtaaagaattgaaattaaaattgaataattaaataagcattgattaagcatgtgtttcatgaaagctgcatctttaaatggtttgtgttgataataaagtaatgagctcataattatgcattgataggtttgagaaacaccgaatatgtccaatgtgcagaaatgaaataaaagcaaaaaaagtaaaaagaaaaataattttttaaattataaacttctttgattagtgatgtaaattaacaagtttcttttaccatattggcaaactaaattttaattttcattaacaaatgagagtgttaaggtgatggtggattttcaatgaaattttgtaggtgggtagacagaccatccctgggttatattacaaaacaaattttcctaactgcggaataaatttaaatcataatttcaaaattagttattttcaagtgtagaaactaaacattttttttgtattttttgactttaatttgtctaaagacataaataaaaaaactaaaaattaattggaatgcaacggattagaacctcaaacctaaaaaaccaggggtggtggtcccctcccacaaatttcatttggaaattgcaccatcacctgaacactttctttgtaaattcagcagataaccttgttgccgctgttgcaagctgaagatgagcagcagtaccaaactgagtgtgaaaatgcctttgcctgtctcatcgaaatggcggaaggcaacgatcaaaacgaaaattccttcaaaagaagccaagcaaaaatcgcattagatgaaatgacaaaatttgtggacaatatgaatagggaagcgatcattttattcggcatggaacgagaagaaatatcctacggagagcgaatgatcggaatggaaaatggtcaaattgtgctgattagccggcaaataccgatcaaagagtcgcttgagataattgtgcgcaatgctccacttcaagcactgatggagatgaagaaggaaagtgccatcaaactgcttaatgaaataaattgtgccgatttgaagtttcggaatttggcactgcaaacgatgcaaacaattgaaataatgacagaaaacgaaactgaagctgaggaggaaataatggccaagagattgcgattgatttattagaattaatagtattttgttctataaaaatcttttcaatctattagtattcgtggtgaaacggtagcgagtggtgtccgtaggaataaaagccaaggcgtggctgcgtccctttcctagtgcttagtgatggactagcgagtggtgtccgtaggaataaaagccaaagcgtggctgcgtcccgtccaacaatttcctagtgcttagtgatggactagcgagtggtgtccgtaggaataaaagccaaggcgtggctgcgtcccgtccaacaatttcctagtgcttagtgatggactagcgagaggtgtccgtagtaataaaagccaaggcgtggctgcgtcccgtccaacaatttcctagtgcttagtgatggactagcgagtggtgtccgtaggaataaaagccaacgcgtggctgcgtcccgtccaacaatttcctagtgcttagtgatggactagcgagaggtgtccgtagtaataaaagccaaggcgtggctgcgtcccgtccaactattccctagtgcttagtgatggactagcgagtggtgtccgtaggaataaaagccaaggcgtggctgcgtcccgtccaacaatttcctagtgcttagtggtggactagcgagtggtgtccgtaggaataaaagccaaggcgtggctgcgtcccgtccaacaatttcctaatgcttagtgatggactagcgagtgatgtccgtaggaataaaagccaaggcgtggatgggtcccatccaacaatttcctagtgcttagtgatggact

SEQ ID NO: 12164 - DNA, 2452 bp, Heterodera glycines
  unsure (1)..(2452): unsure at all n locations
tcaaattttcaaatttttccccggcggcgcctgtcggcaccgccggaccccccccccccctcctctgtcccacaaaatttttggaaaaagcgcgccacaaaaaaagcgtttttaaagcagaaaaaagtcgtcgtaaatgaggaaaatgatcagcggaaataaaaaaatattggaaaaaatccattccggtgaaaaatacaagccatttgaataaatattaaccatttttcattgcatataataaaaattttaaatgtccttgaatttcatgaattttccccactatgtccttgcaaatcggcatacccgtccttggaagccgaccttggacgatggcagccctgatttgcataattgttgttggagaattaagtcataaaaaaatcgccaaacagttagaaaaggcgctaaaaagaagagccaggaaattttatcgtggaccaaaaaaaatcttttttacaattttggtcataacttttctgaaaaaacaataaaattttcggtaatagttcagcttgataacattttggagttgggtctaaggctgaacatcgatgaccaaccgaagggccagcgatggtttattctcggggtccaatcgacggaagaggacgaaatgtgccaattggcaatggcacagctgaagcaaagtccgatcagtttggccatgcattgccattcctcaattccccgttcatagatgccattccattggaaggcgacgaagtccaactcatcaccggcgaactttccgaaaaaagcgtcactaaatctgccggtgccggtcttctcaacattcgaagattggccaacggcaccagtgccgaatcggaggtgcagtcgaacaacggcacgaagcgcacagagtgttctgccaacgaacactttgacgtctgtcccgagacgggccgcgagtgcgagccctcctgcgattggacagcgttccccgactcaattccgagctgtgccccgcggggagaacagtgtgggctcccgcggtgtgtgtgcgccgagggcttcgtgcggttgagcaaccagcacgacgagtgcaagccgttcagcttttgccaggcgcccgaggtcgacgcggcgacggtgccaattccagcagcagtcactgctcacatccgacagccctcacaatcggcatcacccagtggnaccaccgcttgcagggccattnanatgtgcggccaacgaaacngtggaaaagtgcgggagggcgtgcgaaccgtcgtgcgacacatgtacagcgaagagccgtgtggcgaggcatgcgaagtgagcggaaagcgaaacgagagcggcgagggggcgggggggggggaaccgaaaggggaacgatttgccaatgctcgagagtgaactctcgggacaatgactaagaaaaggggaattcaatctcggcactttttttgccaaggcccctgggtgcacttgcgacgacaatttcgtccgtttgtcagcgcgcggtgggccgtgtgtcgcgtggacggactgtccgagtgagtgccgtttccccaccctctccccgcgatgtttttttcgaatgtccacggccgtttcagacttaaaagagatggctgcgccgactctgcccggcttctcctcccattcgcctttttcctcctcctccgatgcttcttcttctcccgcggccgccaacatttcctcaacgttaacaaccgaagaagaaaccaccgaattggagctgttcacggcgactgaaaatgcagcagaaccgccggaagttggacaatgcgactcaaatgaaacgtcagttggaaacaatgggtaattaattcattaattgcctaattagtgttaacgagtgtggccgggtttgtgaaacggactgtgtgtccattttcgaacgcgaagaatgccacgggtgtgcagcaccggcatgctcatgcagacaaggtgagacacgtgaaaaggatgagtgattggaaaaatgatcaatttccaggatttgcacggagcaatggaaaatgcgtttattggggcgattgtccgacaggtgagcagaacaaagccatcgggataaagtgatcagcagagggtagttgtttctgctgatccatcggtgatcaaccgttaaaaactatccgtcccaaattcagtggcaatcgccgcttcctccgatcagtccaaagggttgaacaacctcgaatccaccattttcccatcgggagaaagagcgttgtcctcgccaacgaagggcacagcaaatggtgccaaatcggtggagacatcggcggaagaaacgccgttggatttgtgcggcggcgaatgggcgtggcctatcggatgcgcgggggaaaagtgcgcttatcgcctcagatgggactatgacgagaaaatggtggccaattggggacattggactcactcattggttacatcactctcagaattcggtcgtgtttttgcttgacacgcgaccgat

SEQ ID NO: 12165 - DNA, 1700 bp, Heterodera glycines
aaattaaagatgtttggatacctttttttttaaatttggtcgtgtgtgggtagtagatcgccttctgtcctcctttctgtggaacaatgtggaagaagtcccgattttcgagtcaattgcatttttgtctctgtctctctgttctgcgttttttcgcccagttcagcgtacagggcgcgtatgtgctttcttaattcatacccgtactttgaagtatttgttgttgacgccgatgatccagaagatgaagggatgcgctaaattagtttggtttttatcggggcctcagaactgtgtgttaatccaaattcggtggtcttttgagtctttgatgttttttaaaaatgaggatttgagtatttttgtgggtggaggagtctgaagtcatttttaggggtgtatttttctttttctttttttattcggtttttaggggtatatttttggttttttgaaatcacgaattgggcgtgtattttaaaaaatcaacaataaaagcgcacaaattcaacacaaccgatgcattttttacatcttttcgttgctttttttctacccgaattttttagttcggtttcaatgactataaaaataatacagaaagaaaatgttgcttattgtttagagaaagacaattattattcagcatttttgtgacatcgatcagttgtaaaacggcaaattgttgtgctaattgaaccgcaaaaaatgaacagacggtgaggaattttttgaaaaaaaaaaaaaaattttcttataactttgctctaaagcaaccaaatttttcattcttaatatcattcgataggcctaaaggttctctattgcctgaaaaattcaaaaaaaaaaattttttgttaactcaaaaaagttatggccaaaaataaataatgactccgcccccgttaatttgtttgactcgcagtgggacattttcggacggacatttgcggacggacatttgcggacggacatttgcggacggacatttgcggacggacatttgcggacggacatttgcggacggacatttgcggacaattcctgagaaaaaattaaatgaaaaaaattttttttgttataaaaatttctaatggaagagtgggcctcgtcagtgcggtgctcttccaaaagaaaacaaaaaataagaaaaaaagtgtgtttcggccctaccgcagacacacaaaactaaagaagcacacatcaacaaattaaaaaatacaagccaaaatatttttttaaaagccaaaacaaattaattcgtaattatttaaattttttattaggcttgctgaaggccccaacaacagcctatttttacaattctacaaaataattggcatgaactaaatgctaatatggcaaagagcataggatgttgcacttaaaaacagttcttctgtttgctgtgatagcatttgcacgtactacatccattgaatttgttctcagaagcatcataattgcaccgtcttcgtcttcaaaggcgcgagggtggaggaagggaggacggaagcggccagagcagatggagaggaggagagacctgagaggacggaagcggccagagcagatggagaggaggagagacctgagaggacggaaggcgcgagggtggaggaaaggaggacggaagttgtgagaacggatgaaggggaggtggtagttcagagaatggaatgtgtgggggtggatgaagg

SEQ ID NO: 12166 - DNA, 970 bp, Heterodera glycines
  unsure (1)..(970): unsure at all n locations
ctatacgaccaaagtggcgaatttttgccccacgttcggctggccaaagatttggtggagaagtacgaccaccgtgtccgacccgtgatgaatcattcgatgccgacgcgggtcaatttcacgatgaggcgagcaattggggaacagagtgaaattaatgcaaatttaagcctttatcaagtattggcgatcaatgaaaaggtgcaaagtgtggatttaaacttgtggatcatccaaaagtggaaggacgaattcctcggatgggacccgcacaaatacggtaaaataccgaaataaaacggcatatctgatcattaatactgctgtttccaagaccaatttaattaatttattcttttctactgcaccttaattatttattactttttgagagggacggaagggagggggtaattaaattaataaatatccaattaccctgcttgggatgagttgccctttctcggctacgtgtgccattttcccgactgtatcattcaggtggtatcaatgccaccatccttccctatcaccgaatttggctgcccgacacgtatttgtacaattcgatggtgatgaaccgcgacgaagtgagcaaaaaaacagcagagaaacagtgcatttttaaaacatttttagagcgaacgttacataaatgtgatcgtgagcacaggtgggccaaacagagaaagacattagcccatttaattggtcattgaacagattattggaacgatcgacgcggggccgaggtgaattttggaatggaaagtgacaaaaagaaacacataatcagcagtaatcacaaataaattacgaaattatcagttttattgagaaaagcaattaatcaatgatcaaaccaaattggacaagttttcattaattgattttgattgacaattgcaaaaaacgttgactaatttgtgtnncncntttgccaggtgatgttcatgtttccggtattgta

SEQ ID NO: 12167 - DNA, 2585 bp, Heterodera glycines
  unsure (1)..(2585): unsure at all n locations
ttttttttgtccattagtccattcatacaatgatcatttttccatttgtgcacttatccctttggtcattcgtccatttgatcatatgtccatttgagtttgtccgttagtccattcatacaaacagatcatttatacgttttggtcatttgtcgtattgattntttgtcagttttggtcatttgtcagtttgatcatcccattgtctgttagtccattcattcaaactgatcatttatacgttttggtcatttgtacgttttgatcatttgtcagtttgatcacccttcccctccctttctcattaagagccgtgggtccttttgcacgcttctttggtcgttcgacgaaagcccctctattacattgtacacactttcgtttaacatttccattttcttttcaccaaaaggtgaatctcgttctgcccacttcggtgatcactttggtggcggtcaccggctttttcacgcccgcctccaccagcaatgaacgccgcgaaaagctcagtttgggcatcgattcggtcggctaaaatgccaaaaaaaacattcggtaaattgcattgcttttcagttattggcaatgtccattctgatgatgatggtcagttggatgcttttttgtttaatcaattcctttttctctttaggtcagcgaacaaatgccaacgtaacattttattttgtcccattcccattcaaatccaatcaccccccccccccctctgatcagcacttccgaatatgtgccattgttcggtcagtttgtctttggaatagagtcgcagccggggaatgacaaaaccggggatccccccccccatacggggaatgtataatcttttttcggtgactttaaaaatattcaacgagatatactaaaaaaaggatttttataacgtttctcccatttttttctttttttttgctcaaattcttctcctagttcgtcaaaaagttgtttgattcttgggcgtcgagcgcattttttgatccccgtccccggcgaggatacggtgcggggatcactgtttccgtgggtgggaaggggagtggggatgataattccggggattccccccccccggctgcgattggagccaccaaagttcgtttgtttgaccatcggttgccccttgaaggtctcttctacctgtccatcattgtcattattttttctggcactttgatcaccgccctcgtcctcaatgttcaccttcagaagacctataatcgtccgattccgcctttgatcacgtgctttccccgctttccccatttgctcgatcgcaaatcgccttttccctttcagcttcatctttttccataaaatcgccccttggcttggcatccgtccttcaacaattcttttggaactttggcaagaaactggtataacattcgctaatttggtctgatcgtgtaaattaatgttcattattaaggagtgcgcattcgaggattgaatgacgagccacgacggtcaagaagcgattttcgaagacgagtaacgaaaacgcgatcatcgtcacatgggaaaccgccggtcctccaacggcatttggctaccagtgaagcgacagaaacaatggcaaaaggacaaattggcattgaccaatcatcagatgaaaagtcagaaataaataaaaaaaagtcaccccgaaagagaagaggaacagttaaataatcaaaaaattcagaaaaatggtgccgaaaagaaatttgacggctggaaatttgctgcaaaagaggcggattagcagcggtggcggaggaaatagcaaaaaatggaaaaagccatggacagcaaagggaattgacgaagaaatggcagagccaaatttgggagagtcggcgggcgaatgggcgatgttggaacggtcaattgaggaggaggacgaggagagcgaagcggcgacggaatggcgaagtgccaacccaaacagcggactgaacgaggaaagggcggcgaacgcgcgacagaattggcgacgcatagcgcagaaagcgtgcgcacaacgtaagaggaaaggaaaaacctcgtaaagccgatcgaaaggattatcggacaagcaaaagccgaccaaaaaagattggcaagattagctatgccattaatcagaaaatgatcagcagatcaacaaacggacgaattaccatttaagtgatcagatcgaataattttgggctaaccgacttggaaaaaccggcaaatcctactcgtttatagtgaccgaagaactgattggttgatgaaatgcttccctcgagattcagaccgagatgctcttgagcgggctcagcccaccaattctgccggaggccgaattcccgaaagagagtcggaagagattccattcgcggatttgtcaccgggccggctttccttggcatcccccgcccgtcacttcagcccctcctcaccccacggcatttcctcgtccgttctgtcgccgcggctccttccgtcgcttcccaatgcttcatcatcattaactgctgcagcttctgcgactgatcgtcctcgtcatcctcccaatgcttcatcatcctcagtaccaaaagcacccgtaaagaagcctc

SEQ ID NO: 12168 - DNA, 523 bp, Heterodera glycines
tcctcctcctccaacacaacgacgacgcatttggtggcgtcgactggaaattcgcaaaaaaattaggcaaaaattttaaaaaatttcaggaagaatgaaacaatttttataatttttttttttttgtacagcgcgccgcaaaaaaaggtggttttaatagcaaaaaaaaaaggtcaaaaaaaaagtgtagcaaaaaaaaggtggccaccggagaaaaatgtggaccatcgtatgaaaaatcggtccagagacatgcccccccccccgggtttaccccaaaatttcgccgcccggaatttcgccgggacataatttggcgccaaagaaattttttttaaaattctaaaattcctaaaaaaggttagaaattttttctagtaattttttcgaaaaatttttgaaaaatttactaatttatcataaatttcattaaaaaatcgctgaaaaatttttctatttttttttactgagacaccccgtgcacatgtatgtttccgaccttacatgaaaaaagggggggggg

SEQ ID NO: 12169 - DNA, 1846 bp, Heterodera glycines
ggtaggggacctgctacggcgggaaagagggggggggggggggaggagggaatgtagtgcaaacccggtaatttgattttcagcaaatttttttaaaataacaattattcaaacaacagaaaaaaatgtccgtgttttttgggtacacacaaaaagtcgccgagataaaacagtcgaaaaaaaaataatataaaattcaaaatattataagaaaaaccttaagaatggtttaaagcatttctttgatctatttcgaatttactaggtaactaaaaaaaattgcggcgagttttaaatgctttttttaatggaaataaagtgcaaaaaaattttggggaataaaattttctgagcgggtattatataaaaaaaagacccaagaccaattggaaactgagatttaagtgcaacaaatgtttcaaatccacctcaatgacaatgtccgcattttcgatggtccgtcgaacttcggtcgcaaatgaacgcaccgatttggcattggcaccgccctttttggccattttctgacgtgcctttctctcctgttccattttctaaaaattataaaaaattcaagggaaattaaattaatcgaaaaattccgactctgtttgcatatgggaaaatttgcataatttgaggcttttattcgaaacaatgttaaactcacaggtataaaaaatgttgaaaactaaaaaaaaatttctattttttgtgcaatgttttttaaaaaattccagcgcctgggagcaaaaagcaggaatttatagccatttttttgccgaaaatgatcattttgccattttaaaaaaaattttttttactaacgtagaaatttttgaagaaaaaaaatctagaaaaattttcaccgatttgttcgaaatttttttttttttgaaacagtaattgccattaaattttttttaatttcaggggtcactttgggccatgcccgacatttgcggctatgtccaaaatcgggttcaaaattaagttttttttttaattcctgatccactaaacagccataaataagtgatttaaagtgcttttatccgatcatttgatcgttaatggatttttcaaaaaataaaaaaaatttaaaacaacaaattattgattataatgaaccacaagaccgaattttcttaattttaatgctgtttaatctgacagggcttgaaaaaattcaactttgagtccgattttggacataggcacaaatgtctgggccgcaaaagtcggggctccctttgggctacctataaatatttaatttggatgcttctataaaacgttatggtgcattaaggttgctagattatttaccgcaacaatttttgataggattaagctattcagaaataattccgacttttagggtcaatcgcgcgcatccagtcaaatttgaaatttaagcggagttagaaaaatgcatttttcttaatttttagcttgaatgagaggctctataacattttcactggcaacaaaaaagggatggcaatccgagtatggcattaatgaaaaaatcaaaaattttgcacaatttacggcactaatgaatttttttgggaaacctttgcctccgtccgtttctgttccgcctccatcaaaatttcctctttgaatggacatttgctgggcacggaaatttgcttttccgtcttctttttccgctcggattctaaagtttaaaatttttattagggttaaggtaggtactgaaatttccgaaaaatccaaggggttttcgttttaattttttacctttggacattttcttaagttttcgcgagtgttccctgaaatgtgcgctgaattttgaacttcttcttacaagtca

SEQ ID NO: 12170 - DNA, 1005 bp, Heterodera glycines
cgggcaacaacggcggcgccatcgcagcggggacctgttgaagaaaaataagaatgctaattgcaagaaaagtaagaaattatggaccggaaactgtatgaaaatttgcttttgttttacgcataatttaaatttgcacattgctataaatgccacaagtcatcaaaaacggaactgccttaggaggaggcaacggcgggggaaaccccgaattttatgggcgccagggtttttggtccaataaaattgcgcattttgagattttacaaaaaaaaaaaaaaattttttttttttgatagattttatttaaacaatgtccatttgatttttgaataaaattttaaagcttcaaatggtcgccggtgaatttttgtttatgattttttaatgaacgccgaaaacattaagaaaattgatggtccaccaatgttggaagcaaattttccatcgaaaaataggcgcgcatcataaaattttcaatgcctaaaaaaagcggcgccgccgggaccaaccatcaaaattgggccaaaaaaaaatttaccgtcgtcgccatatccatttcgttggcatttgcttcttcgctttcctcgacgggctttgtggacgcaacgacaacaacagtgccgcttttttggcattgtgccgccttttgaagtgcggccgacgaatccgacgccgcgtcgtacagcgtgtccaccgccatcacattttgtggcatttctgaacggtttgttttttgtatatagagacagtctctcaaatatgtgttagataatgggggggggggtaactctttaaaaaaaaaaaaagttttttcaccacaacaaaatttggctaaaaaatggatgcgcagtttgtttcacccagaaaatgaaaaaaaaaatctcaaagttagaagagttttccaagaaatttttacaattagtcttttttataagaacatttaaagaaaagaaaagaaaagtcctgaataattttttaaaagaccgaaattcatcattaaac

SEQ ID NO: 12171 - DNA, 4967 bp, Heterodera glycines
attttaacagtgaaattacagtgcagcaaattgggactcatcacggaatgaacagcagcagttgtgattgctttggacatttaattggccgatcactttttcgtcaacaacaataaattcgtcaaagatttccattttgatggcttgcaaataacaaaaccattttcaagaaaagtattaaagtttattaaaattgaattttaatgaattggtctttattttttcggataagggggacaaaaattgaaagaattttataatatgcaaatgctgcgacttatgatcaatatttttaagatcataaatcgttgtttattcatataaatgaacttgtttacatgtgtaaagaacaaaagacatgaaggaaaaggaaaaggaaaatagaaaaatagaaaattaataaatttatttatttttataaaaggctaaaatatttacagaatattatccatcattttagaaaagataatgagtttaaatttatgaatataaaattaaggaacgaaaatatgaaatttatttccataaaaaatgcacaaatattttattgaaaatttatttaacaaaaaagcgaaaatattttgtaaattttattcattttcgaaattaatttttttttaaattatttaatatatatgtaaaccccacagccttgttaccaactttaccagtagggctgtcaaatatgtaaatacatattttttctgttatttgccctgtcccaaaaattcaaaaattttgttgaaaaaaataatttgttaccaaattgtcaacatggttttcgtaaagcacattctgttaccactcaactttttgaagtggtggtggatgagttcagttttgctttagaaaatagaaaatcaattgatgtaatttattttgatttggctaaagcattcgacacggttccacataaccggctaatatctaagctaaaaagcattggtataaataattccttattaaaatggattcaaaattacttagaaaatcgaaagtttttcgtcaaaagcgggtctgatttctctgatgaatatccctgtctcagtggtgtgccgcaaggctcaatattgggaccactgttatttcttatttacatttacgatttaccaaaattctgcgaaactgaaaatgttaaaattaaactatttgccgatgatcttaaggcctatcatgttctttcaaatatttccttttctccactccaaaattttattaacaaatttaatcaatactgtaaatttaacggccttaaaatcgcttcaaataaatgtttaactttacatttaggacacaaaaatcaaaaaataaattattttattgatgactttcaaattcctaaaaatcccggaaacgaaccagtcagagagaccttggcatttattttactaatgatttgaaatgggcacaacatattgacattatctcgaaaaaagcattacgatctgctttcgctatactaaagtcaatcaaaactcgtgatacgaaaatacttgtaaatttgtttaatatttattgcagaccaattttagaattcggatctccaattttcaatccttatttaaaaaaggatatagaaaaatcggagaatgttcaaaaacttttttgagagtaatatttagacgtaacaattatactgttgatttacctaattatgctgaattgttaaacatttatgatcaaaagtcgcttgagagtcgtaggttaaaaatagacttaaaactttttcatgaaacaatttttggtaaaataaatttacaaaataacgaatccttttctttttccaaaaaccctgtaaaaaatgaattcattataagaacagcttattgctcaaccaatgttagatacaactcgttctttattcgaacctctcgtctctatagacttttacctaaagagacgagattactaaatccaaatgagtttgccaaacttcttgaaagatctgatcttaatttgttgatttctttgccaccccaactccaaaagtgaccaattgattgttttgatattattatttcattatttctttatttttcggcgtcacgcttttgcgtataaatgattgattgattgaaaatgtattaaaatattatatttttagtctcccattattggttttaacaattttggggagcaaataagcaagtcataaatttgagtgcattcaaaaaatcagatttttacgaaatttttttgcggtacattttttcaaacactttttagggaacaagcggggcggaaggcggcagtgccgataggtgccgccgggaaaatttttgaaaatttgagtataatttgttaacagattttgaccaaaaattgtccaaattttgggattctgagccaatttttaagaaaaaaaaagtatttttggggttaggcggtcccgttcggcaccggaacgggccaactccgtctggccaactccgtctgagctaacttttagtcaatataactcttgaagttattgaccgaatcaaacaatcttgatatcattcgaaagctcttcacaggctctattagcctactaaaaattacagaaaatttcgaactataaaaaaagatagaaataaaaaactttgaaaattctgccttttttgcggttttcaactgacaacttttttgagagctgattaatcactgataaatagcttataaatatctctaaacatctagggctttcgaatgatactatgattgtgaagtttggccaacaaagaaaaaagttatagctttttgaacattgctgagacggagttggccagacggagttgacccctaaccggttcggcaccgccgtggaaaattttgaaaatctaagtgacattacgccataaaattacaaattttctgaagaattttaagaaataagaacaaaattagaacaatagcccgaaatcagaatatttcttataaaaaaagaacagatccgagccctggtgtaaaatgacaatattaagataaatatttttaaaatcttaaatttttaaaggcgagcaatgccaaaatcggcggaactgaagcaaatgaaaagtggcaacaaatcggaaaaaatgtgttaaattaattacccaaaatttttttaaccaaaaatcaaaaaataaagtgaaatttataaaaccaacaaaagcaaaggaaaagtggagacagaaggaatatcaatgaaaaataaaaagaataagaaaaaacacttacagaagccgatggattaccatggaaaatgcgttttttaaataaaaatgttgacaattaaatactagtgctgctcgagagtttcggtctcgagacttgcgatattttgacattctgtccgttcagattcgacaaatttttgatcaattttgtcacattgccaattgtttttcatataatacaaaatcccaagatgcgcttcacatttctgctttgaatattcactcaattgcgtttcttggtgacctttcataaatgccgttagcattttgtcatcgacctaattaaaaatgattagacaaattaattaccattattaattaactcactgatgaaattgcatttgaaatgtgaattaaaatatgatgaataataataaattgaaaagggattagagaaaaaaaacattatgtttcactaattattgtttcaatttaataatttttaaaatactaaaaagtgattctaagccaatttaggtaatttttatgtgcattttgtgcctgtttcaccctttactaggaattttttccaaaaaaataagcattaaaaaaaattttatttacatccctaataataatatttgatacatttttgaacgattaaattgtaacaaaataataatcgatctgaaacaatttggcaaaatgttctgattcccaaaattttttatttatttttttaagccccaatgttttgattttgaaaaattttcttcgatagaagaagccctggtcaagaaaaattcaaaaaaaaataaaataaatttaaaaaacaaatcaacaataaacaaacaaaacaacaaatggatggatggacagaaaaaagagagaggatgaagattttaattatagtaattaattaattaattgctttttgcatcatcggctctttttcctctaacggcgggcggtggtgttttgatggtggtggccaacaatgcccagtgcaaactgtacacaaccagctcatacgtgccgatggtgaacgccgtgttgggcaccgatcgaatcaactttgggagaaaaaattgaataaaatttaaaagaaaaaattgcactccaaattaaattaaatttttgttgttttgcgagtgcatctggggtgcacccaaaaatttcgccgggacataatttcgccaaacaaatttttttttttaaattttcaaatttcaagaaaaaatcttagatatttgtttagcgattttttgaaaaaattttcgaaaaatttactaattcatcgtaaatttcaataaaaaatcgctgaaaattttcctaaatttttttgaaattttcttaaaaaattctaaaaattttttcttaaaaaatttctaagtttgttttttaaatttttttgctgcgaaaaaattgtattactaattaaatggaaatgttttcacggggaacaggaccaaacatcgccgggacatataacaccgcaattttttttttttttggttttaaaaaacaaagaaaaaaatcaagtaaaaaaacaaaaaattagtgagaaaacgtcgctgaccttaacttacgtaaacagattttaaagaatttccagttaaaattataattttttctcaaaaaacagaatgaaatagctagaaaacccactcttaaatttgttttgctaattttttagagttttcgaatattgaaaactcattgttttttgagaaaaaattctaagttatagtccaaacactcttgcctgagaaattttgacttggcaccgttttagggcacaatcgtaatcggttttagggaagacgaatt

SEQ ID NO: 12172 - DNA, 1134 bp, Heterodera glycines
  unsure (1)..(1134): unsure at all n locations
ttgtctaacataaacagaatttaatttcattcttcccacatttaaagctatccatcttctgttangaggaccctttgctccttacctgtacgaatggctgcacaaatttgagtgtgtcgaaagggttctcttcaatctgtttgcgtgttgcctgctgcccgacgatttcactgccatttaattcaaaagtatgcaaagaagaacagaaggttgcggctgctgcgtcctccgacatcgaagggacctgaaaatggatggcgcaagaatatcttcgcttggatttaccattgcttcgattttctgcggcaattccatgcgttgagtaatgttaaaatcgtcttcggccgagaatttgtcggccaatctcagtgggaccattgcacgaagaccttccaaagactttgcccaaaacatctgtggagacggtttttggtatgaacgtctccagcccgccctcccacctgtcggcccttctccgccttttcgatgctctcctctttggccgtgttgttcgtctgcttccgctccggtgccttgtgacttcgtcttgacgtggtgtgcacgagggtgacgggttgtctaaacgctgttgcagttttgcgcatcggcgcctcagaacgtccatcgaagcccgtctttgtctgctgagtttgttggacacctcgcgcgtctttggtgcccctgccgccttttccggagccacgaaggaccaatgacgattcgacacactttgtacgacccatttcaatggctttttaagtcttcaacgttagatgtattttgtttaatgtaatttaaatggttattataatctaactggtaaaccacccatttttgtttgacataaattaaaatgagtttatgttttatttcgttttctcgagaattgttgcaatttaaaaagaaaatcaaagaagattttcacgagattattanggaagagatgtttatatcaaaatgaatttgtccacatcgtataatatgcgaaaacaaattttcgaatanatggttttaantgagttttttgttttgtgcgagacaaataacaataagatcagaaatggacagagaaaaacgcagacgaacgaaccaccgaaacctagactttcttaggaaacattttattattcatct

SEQ ID NO: 12173 - DNA, 3042 bp, Heterodera glycines
acaaaatgatagcgcaagaccaatccgtagcactttcttttcccccgctcactgcgcctgcttcgttcccggctcaccatcggccgcctcgccattgtcgctgagtttacgcttcttaagcaaatcgttttgaagtgaactggaattttccagtccaaatgtacaactcactctgttatcgccagaatttttgttggcattggctttctgttccccgttcgttgcctctttcgcagtgtcatttggtttcttccgttgttccacatagtcctctgattcgtcctcatcctagtaaaaaatcaaatactttggaaaaacaaaatattaaacattgagagctttcgatgagttcaaataggcaagcgccgcctcgtcgtccgtgtccactccctcctcctcttcctctgagtcgtcttcatcttcgagcgcgtcctcagctccctcctcctcttcctcatccgaaatttctgcctcgactaaagcgaaaaatgcaaaagtaattttagtgacaaactaaaccatcgtttatgtcaaatccgtccaagtatttcagctgtgggatcatagcaaacactttgctacgatattccggtccctccttgagaaaaattgcaataatttactttgaatcaaaacgattttttaataaattcttacggtaatagcacagtcgaacaggtcaagtgccgccaattcctccaacttgctcaagggagcaagtgcctccatggactaaaagaaacaatcaaaaaaaagagaaaaattcccaccgtaattttgtttgcgcataaattgatgtggtagagacgagggcaacattcgaccaatttatcaagaccaccgctgagtttgttgtcactgaggtcgatagttcgcaaagtcggcaactaagaaatgttaaaattctgccaatgaaataaaaggaattataattaaataccttcggaagaccatccaatgtagtcaatccaacatttatcagcgaaagtgttgtgagacttgtgaattgttctgtcagcccgctaattgtgttcgctttgcagctgtcgagcagaaggtcttggacttcagaaggttgtctaccttaaaaagcgaaggaattataagacaaaaaaggaaaacaaaaataatcaaaacaacataccacgcaattcagttttgattcgctcttccattttgcagaaaataacaaagtgctaattagatacttatgtcaatataacaaatatgaaacctaaaagcaaataaattcaaccaaagtcgactgtcatattttttctttaagcaagggaaagtagcgaacctcgtaaataatggataaaacgaattcgcattgggaaagagtggacagaggacggccattcgaatctcacgaaaatgaaggtccagcagagcggacacaactattaggacaaaaatggctgaatcgctctcctcccctcactgtacaacgctctctttgctctcccccccccccgcccacgccgaggcagcaaagcaacagaaaggacgaaggaagaagacgccttcgctccctctctctctccctctcttctgttgccatcccttccttcagctgctgttcatcccaaaatcccttgacgccctccgcccccttctgctttcagaaatccaccataatttcccttcccgaaggcattgtttgttctctgcgacctttttctgtctgcaagaatttatttttctcactctctactctctctctctctcgcttcagagaaaatgccaaaatacatacaaaccaaaaatttttattttttatttttgggtttctttcgatgagttagcgtttttgatttttcattccattctcaatttccatgtacatgcacatgtatgtaaatgccaagaatatgaaattcactatacaaaaatttacaaaaaattacacataaaacaacaatggtttaggttgaactttataaaaatgtcgcgaagtcgctcgagatcgagaagcccaattcgacgcggtggcgataggtttcgctctgatcgaggaggaggaggtaccatgtttttctaatttagcaaattactttcggctccttcatttataactaacaagcattggctttatacactcaaaacaaagaaatttgattttatttgatgggaatttttagtttggtctgacctttgctgggaatcattaaaataaaaacacggactgttggccagagatttgtcttcttggacatcgattggatcgaaaacaaaatttatttgtttgtagttaaccacagaaataagttcttttctgcgttctcctcgcactattcagcgaatgtccgactatattcgaaaatctgacgcttggaatcctccataaactcaaacccttcgcaaattgtggtcgatggtgaaacttgtaatgttttcagaccgcggaggcggaaatagaattgatcataaaagcgatagaatggtttatttaaccaatctgccatgggaactcagttggatggagctgaaggacataattcgagaaaaggccggcgaggtgtgttttttctttattcagtttttctgacagaattacaatggtttttggtttattcggttgacccttgttgtaatttggccccggctttggtgttccatccttttaatgttggactacagaaccaatttcccttttgtaactgatggacaggacgtgacggttctgaaaatcaatctctgctgaatacctttgtcttggtagataatgagtcgtttgtacaccttgactcgactgatggtaactcgcattgaccttacaatttacaaatcattgccggggtcaatctcatttttgcctgtgcatgttggtttaaaacattttgcaggtgaatttcgttgaggtcctcgagggtcgtgacggtcggtcaaaaggttgcgcggttgttgaatttaaacgtcgtgatggtgcgatcaaatgtgttgaaagtatgcacagaactgaactcaaagaccgacttatcatcgctaaggaaatccgagtaatatttgatttattcgtattttggaaaaccgagcctg

SEQ ID NO: 12174 - DNA, 2206 bp, Heterodera glycines
  unsure (1)..(2206): unsure at all n locations
aagggcatggctgtctgcgagtattcgcatccgatgnaggcggttcaggcagtttcgatgctcaacaatcagcgcctgttcgatcgtacgatctccgtccgcatggaccgttatccgaaggaagtggaacgccgcgagggaggactgcctgttggtttttgctttccgaaattgcattttacaatgaaaataatttgatatcgaacgagtcttggtaaaaaattgttttgaggtatttgtaacaattaattgtaattattcgatcacaattaaagtaaatgtcatatccgtttccattttcagtttggtctgcgtgctgttggaatgggtttgggggcgaatggcgcgcctctaaccgatgtggccagcgtgatctccagtattagcccttcgcagacacaacccgggatgaatggcacagctggcgcaccgatcactccattccaatcgcccccaaatgttgcccaatttggccctgtagctgctcaacctgtggcagcggggcctccaagcggatttcaacagggcttgcctgatcatggcatcagtggacatttccaggttttgatatctgccgttaccggctagttaattattaatgtcttaattgggtcttttgcccaatagtttccaattgctcccttttcagtctcctcaacccacctaccaaccacaagctaccagtggcttcttcaacccccctcagccctctccacagaaccgtccatccggcggaatggccttcggcggtggaggcgcaacgccacaatacgcaccgacaaagcaaatgggcgttgtcggaggagggacggcgagcgctgcagtttatggacacccaccacaacaacaaactcagaaggtgcgcgcagaatacaataccacaataataagacaaaatttaagtacgagcacaaagtggagccgaagtttgaaatgggcgcgtacccggggtacggaagtggcgcggcacagccagcgatgagcagtggggcaacggacaattaccaaccgtcgcgtgtcattttgatcaaaaatgtaaaatttggtcgtataattgaaatttttttgtccgttcagcttcccgttgattacacatggcaaattgtcagtgaccgcgtgcaacagtttggcgatttggagtcagtggaaatgataacgcccggtgtggcaaaagtgcgttttgtgaagctgcgagatgccgaacatgcgaaggccgcgttgcagggaaccacagtagaagggagggctattggcatcgaatacctttgaaatgcgacaagcggaggcgcgacgtaaaaactcaacgctttttcatcttacttccctgtttggtcacaactatccttcttttcggtataaattttcaattgggaactgaatactcatgaaatttataaatgtttcctcgcaaagtagaatgtcataatgtttatctagaatttttccaattatttacaaatataagatcgggagggggagatgctgatgcaatctgtcccatttcccgtaaaaacaattaattcctcgaaggcgagtaaaaagctaagcatttcatgagtgtttaagccacatgaaataaaacaattgtcacatcgtcgggtttcccccctggcgcattaattccatggagttttgccctccttgcgaacggcgaatcataatgttcatccgctgccaaatggcgtgcgatcagtgcgagtgtgttgcagcgcgcttgcagtgacgcttctgtgggttcgacgccgtcgagaagttccgcgattttttcttcagaaacgttgtcccagagaccatcgcttgcttaaataatttggtttttggttaaatatccaattaaaatgcgattaatggcttacctatgagcagcaaatcgccaggtttcagcttatgctcccgcaagtcggtgctttcgggggtgtcaccaatataattcgccttccctttgtatgttggagaatcttaagaaattatgaatggaaaattaaagaataatggaaacgtacagaaacggtctggcagcagagagagttgataaggcgcgttgaaatctgaaacggcggcagccgaattttatctaaaaacccaacaaatgcgaaaactcacagtgagtctgctcgggtgaacggaacaccacttttccctctcgataaatcatatagccagcacggtggggaaagggagagaagaagtttcatcatatgttatc

SEQ ID NO: 12175 - DNA, 3065 bp, Heterodera glycines
tttcttttctttgaaaattataaaaaaataaatgaccattttttttttttttctaagaaaaaaagcagacgaaaaaattttgtgtttaaaagttttacggggaaatttttttattaaaaaagtcgaaaattgatgaccgagtcgtgaaaattctagccctttgtattatttgccaagaaaaaagtgaagtgagaaccaagtgattggtcgaattttggcttccacttcaatcactggcatcatgcgaatggcattgtaaatggtctgtccgtcggcatggcacaatgcgcccagctccttggcatccatgtcgaacagggcgaaaaagttgaggccacggttctcaattttttgcaccgtactgaagctgagcacatcaatgtcggccaaatgcctgcaaaaacgttgagacacaaaaatttccaaaaaaattttttttgtgtgccttaagggagagttgaatggccacaggcgtttttcaatgcatttggccatcgtcaggcatgcttctgttgtttgagcccagcagcggcgcaacgcaatttcaaacagcgcacgcgcgatgcgtgtcgcgttctgcgagatgtagtagagctccgagatcagcgcaaagttggtgaccatagcgcgcgaaatgtgactctgttgaaagaaagcagtcacattaagaagccgcatcaatttcccaacaggcgcacaattctccctattcccgacgtttccccggatttcaaaacttaattcaaaaaaaacctggaattttttaatcaaggattttttttttaataattttccagcgggaaacaaactgttgttcccatatttttcaattaacaaacgcctcagaaatagcatttgtggcacacacttgcagaagacagttgactttgcccgccgttgtcgcaagtccaccgcgtattttcagcgccgcaccaaatgaggccaactcgtccagatcggtcatctcactgtcccgattctgatcaaattattccatttttattgatcaaaatattttggtcaacaagcacattgtgtttttactttgatttgcgcaaattcgcttgatgctgcgatcagtgagatgatcatttcgtcggtcatcagttcagtgaaacggaccggccccgactcggcgttgatcagttccaccgtttcgaaagtgatgtagaaatgctggaatatttttttcgttagaggtttattttagggaatgggtgtgtcctgatctgctgatgtgaaatgccacaaaaaataataatttagatgaaaaagttgaaagtcaaacctttcgacatgaccttttattcgaattcgggtcagggattcggatatgtgtcaaggactaacattctcacaaacgttgcccgtaaactgccgatttaaaaatatgacaaataaatttatagaaatatttaaaaatatttgtataaattcacacaaaatttttttccccgaaattggtaggtagttctcattaagtaaatgatagttttgtcattcaaaaaagataatgacacttactgaagcaattcggcccaaatcggtggcagaaacaaattcatttctatgcaagaaataaataataaatagccaaaaaatatatatttgtttacactggatcataacggatcatccgattcaaatccaagcgacgtgccgcggagtgacaaaaatcgtttaaaaacgaaaccagcgttggttcacggcgcaactctctccattcaacaccgtactaaaataattttcttttatgaaaaaatggaaatttgcaaaattttaccattaggggattcttgcggagccgaatgtaaaagtaactgaatcgtatccattcaaccgcctctttaatattcgaaatggcaccttaaacgcgaaaaaaacataattaaagtcgaaaatttttgaaatcgatttttggaactttctattttttgaaaaataaaaaaaacgcaccccgtgcaatttcggcgttcaaattgttcagtatacgcctttggaattggctttcaattggcgcctgccggtggaacatttccacgtattgtgccattttttgtgccgtcgtgatgatcacaccatgccctattttttttaacaaactttacattaaaaatgccaaaactctgtgtccattcaaacccaagaccacctttgtcctcgtattgaggacgtccagcacggccaaaaatttgttgcacatccaaaatgccaatgtcgctgaacacgcccttttgcgggtcgaatatttcggtgcccttaaaaaaaccttgccagttaaaaatggaatgtaattgcggttagtgtatttgttccaccaaattcgatttttagccaattggtaaaaaccatccggtattatcgttagagagttattttttcgaaaattgactggccccaataaattttaaaatttaccgcgattaattttagcgttccgaaccctttaagtgtggtgacaaagaaactagacgaacccgaatgatcacagcataggcgggcaaattgacgccccaggcaagcgtcgcggtgcagaccatcacgcgaattgcgccctcggcaaacattttttccatcaaatgccgatcatgacgaactgaaattgaatatttggtgtcattagggagatgaaggccattatgatcattaattaaatgaaattgcaaaaaatgcctaatccggcgtggtgaatgccgagaccgcattgaaagagttgctgcagctcctgactttgcacgtttcgcatctaacaaagaaataattcatttataattactgcgaattaaatataaatactcctcaaaaatgcccacacatttttttgcaaaaaattaggaaattttttccataaaaataggatttttgaaaaattcccaagcatgggagtttgataattaggccaaacaaatgagtcaaagaatcttgaaaaacagttagttaggcaacataccgccttttttgcccttcaaaaagagctggggggggtcggggcgggtgaaccccgaaaaaattttgtggatttggattctgtgtaaaatatagtaaatatacaaaaacattttttt

SEQ ID NO: 12176 - DNA, 1571 bp, Heterodera glycines
cttaaaaagcatcaatttttttggggagcagggcgccacctttgtgccaatggacggggacgaaagcgagcgtcaaaatggaacagtccacgggtcgggtccacccgcaagaattgggccacatcctcataatttggcaatgtggcggacaagccaacaatgcgcaagttctgatggtacagctccacctgtgagagaaaaaaaatgaatttgaaattttcgtttaaaaatttttttttgtaaggatttttaaaaattttccccgggcgtttctcaaaaatttggtgttttcgaaaaaaagacaacgcacctgtcgaagtgtcctggccacaatagactcaatgacggggcctcgctcgtcgtgcaacaaatgcacctcgtcaatgatcatcagacggaccagttggcttagctcttcgtcgtccgccttgcgcgtgatcacgtcccatttctccggcgtcagcaccaacatctgacagaaaataggaaaattagtcgagaattaatttttaaaaaattgaagccaaataaacacataattcatatttatttcaaaatttggctccattggtcatttttaaatactataattcgcaaaaatgaaatagaatttacaatgacccagcatcaaattacacaaaaaaaaaataattttttttttttgagggtgttcgaagagtgaacgtgtttgcgttttacgcccgcacattacgtttccaagcaaaattttaaaaaatcggtcaaagatttttctaaaaatttctttcattattaaaaaaatttaaaattcaagtttttcaaaaaaaaattaattttttttatttaaacaaaaaagaatcttgtttatagatttttcggtgagggagatgagctgctcccattggggaagtaatattttgtggctttcaattaacgtcataattagttaattattacaataaattgcttgggccacctgcgtttcactgatttcgcgtcggctcaactgcgagtcaccggtcaattcgcgcactttgagtcccaatttggccagacgatttgcaaaatttgtggtcatttcgctggccaacgctttcataggtgccaaataaattatcttaatttttttttttacattttttaaattagtttaatttatttatttcgacactttaaatgcatttatgttaatccgtccacttttgctgtccaaattgtctttgatggttttggctgcgcacatcatggcaatgttcgtttttcctgacaaatgaggcgaatacaaaaatgttttcaaaagattatgtttgggaaacgagggtccaattaaacacaaaataaattgggtttgaattttttttttttaagtactataagccgaaccccaatagaaaaattctaaaatttccgaattttcaatgttatttgaataacctgcccccgttggtgcacaaatcagcaaattgtccagtgaattgtatgctctgtcgtacacttgggattggatcacattcaatgactcaattccatcaaaaaagcgttgccctaactgaaaaatttaattaaaaaccattttttttttttaaaatttg

SEQ ID NO: 12177 - DNA, 1578 bp, Heterodera glycines
tttgtaaaatgattttgggtttgagcgggtaaattcctcctcttatagtgggcggagtcctaaatcccaggtatataaatgatgccgagtttaaataaattaacattttatgaatctgaaatggtactcgtcaatgtgttttgtgctcagctattagactgtcccgtcaagtcactgcgcgaccgacttaaccaccccgaagatcgtgtaaatgcgatgaacggattgatggggaagaaagttcgaacaacctacaaagatcgcaatgggatgcacaagacctattttgtcggcggtatcacggagcgcggtgcagctttcgttccggcttatggcaatctacgggcaccatacaacgtaaatgtggcagcttatttttatgcacggcatcgcataaagctccatttcccttacgtgccttgcgtaattgaacgcttttccgggagagctgaggaccgtttctacccaatggagttactgggaattgtggatgacgaaaacaaagggagattgtttggacgaatgtttatggaaattggtgaagaagcagatgatgatgataatgacgaggatgtttcaacatcctttgactcaacactacgatttgatatgggacgagacgagtgttcccaattatggcgatgatcaatatttgcaatattcatcttctattactaaactatgcacttttctacctaaaaattacattttaacactcttaattatttaatcaatatatatttttcactctattaattcggcatttttctacccaaaacagacaacttctttttttcatttattcaaattcacaaaataaataagaaaatgtttacaaggtgtgaccaaagtttaaaacattaaaatctgacttaacaattccctttccaacgtagggcctataacatttctgcattgggccactggtcacttttcctccttctctgatgctagggcgcaggaagtttgggtaggtaactatgatcggctcatagtcaccagtagcggcgaagtccaacacttgttgcttgaaagtttcataccgtaggtgttgattattgatgacatcgtagttgagtgtcatcccgcgcaccttcagcacatactctaacaccgcagcagcaggtgcatttaagcgcctcaacttcaatccgtactaaataaaaatatattagcatattgattagcattttaaaaattaattacttgttttgcaccaccgctgcagtactccacagcggatactcatcggtaaactgacccaaatgtgggccagttttgagtggacaggcgttctttgggtgcacaaagatcaatgaatccgtgtctaaattgttgatcaatatgttatttttacctagaaatgataataaatttaccagtgtataaaagcacgcaaccaggtgttcgtgccaccttttgcatcgcctttaggaggaggagccgcgcagccgaggtcgtccaaagagaaatcactgcaattttcatattttttatatttgattgtaatctttttcccatacctatgttggagcagtcgtgctcctctacccactccttcttattttcatagctaag

SEQ ID NO: 12178 - DNA, 2477 bp, Heterodera glycines
tgacgcggtagccctcttcaagcgctgcgttgagctcaattgaagtgctggtgctgacccatccgcgttgttggtcattatgtctgcagtgatattcgtcgtcaactcctccagtagggtagtctttcgcgcacttcatgcacaatggaaaacataaacgttcaccaactttcacaggcagaaccggaatggtgcactttcgtggcggaatcacccaacatttaatcagtgccaaaggaaagttgttgtcagctgggctcgtccaattcacatcctcgttcaacacgtgaaccttcgggtggcccactggataacgggttgtgaaactgaaaattaaaaattgtaataaaatttatgtaaatgacaaactttatgtatgggtagagtgaagtaaagtcaaagtaggagattttttggtcgacggctgcctttgtgaagagctttagtggtcccgtccgcccggccggtggacgcgtcacggatcaccaacggtccaccatccacatatttctgcaaatttttccgcattccctgcttctgtccaacattcgtgaattctcgcactcccagaagacatcaactcgtgtcactgagtcctcaagaactgtaaccgcttggcatcgcgctccctttgttctccagcagttttcccgttgggcagcatcatgttgtcagagggagagcattttctacaaccgtgccaaacacaacctgcaaacaacttttttttaattgcttaaaaatatagaaaaattaccattaatttcaattacacgcccttctgcctcaatccaaccgttcacagtgtagtttgcaatctttttttctccatcaggtgagtaggctgtctgcacttgtacgttgttttcctcagcataccagaaaagaaagcggagagccagcttgctctggttctgggtgttgtcatagcccttttcagggacaatggcaaggtgctccgccggcagatggttcaacctgaagtgcttcatgcacgcaccggcaacagtcatgcattcccgtagaacatcaatgccatcgtggttttcccggtggtcgattccgtcgacatattcgttccgcttcgacacatcaaaaaactcgcggcggaatgcgacgagagctgccattagaatttcaacgtcattcgtacaataactgaaaaagtccaaaataaatattttaatttaaaaatgttttacctcgctagtgcttcatcgagttgaaaaggctcttcgcggtgctgctcgtaccaatgatcgaattgtcgtcgcttctctggcatcattccgttggccaaatagtcgtcaggggttgggtagatgtgtttaccgtagttctccggacggttggccaaatgcgggaaaaagggtttgtcttcgacgtccaatccgtaggatggcaccagctgagccaatgcgcagggcatcaagttgaatgagtcgtggaacacaatgtttgggttccggttcttttgcttcttcactttcatctcgtacatcttattccccttaaaattatggtttaactttgattaactaattaatgtatgtttaaaaaacacctgacgaatcatttcagggttgaaacccatcttgaacagttcacgaaaaacaaggaccatgtcgaaacggcctccaaagtgcgagaatgcgtaggaatcgcatttcttcggaagatcattgatgatccaaccgacaaacgtctctaacgggttgtcagtgacaacttgtttgtcgacagctgtgtttacaaatcgacgttggcaaaaggcgactgtgcggtgagggccacacactttgcatcctgcggttccattccgccatctaccgttgtcaatacatccgggacaaatcactttggctgagatgaagttaggctgatgctgtctcttctctggctcacgacgacttacaggctgatgttgcattgtctccaagtcaaaagcaacaattcgatatgggtccaattctctaggctcgagcggtttgatgaagcagccacgttcagggttgtggaagtttttacacaggttgcagtagcgttcaccacacacatgaccttttcttccgttcctgttgttgtccgtaacgtcccaaacaacaccacaatcgctgcacttctttgaccgtttgcaaaaaccggattggagatggtgttggaagcaatcattgttgttaaaattcttattgcataaggcgcaatttctgaagaagccaccagtcgcttcacaagggaatgccggaccacaacgagcgcaaagaatgcaacgtgctttacatgatttgctgtgttttgatgctcttccatatggctgttcgcactccaaacagtaaggctttccgaacaggccaccctgcttctgcaccccatcaaagtgattgtcgttgaaatataggagaagaggagtgttgtagctgttgttcacgtatttgtagatgggtttgtagtgcccagttgcccaaagatgaagacag

SEQ ID NO: 12179 - DNA, 1962 bp, Heterodera glycines
  unsure (1)..(1962): unsure at all n locations
tggaagagttgtgcacggacacgagctatctctggaaaataagcaatntaaatgcgtataaaaataaatctgaccaagatcgatgagacggtcaacatgtttgaagtaatttggaaaggcagcaactgtgcctttttcttggatcagctcggcaaggtaatccattgtcattaaatgaacgtgagtcgaaagcttaacctgtctttgaaaaggtacatttttattagtaacacttcttattatattgtaaagtgaaacaattcttttttcaaaattggtaagttttttccggtaatatagtgtcgcggaaccggtaaattggataccggaaaagtggacactaaatttctttattgtataaaaatcagatatggttacctaattgaatggactcataagtcatttggacttatatacacagcgttcggaaactgacaagggaacattccgaactctgactgctcagatcactttaaaactacttttatcctgtagagcatggtcgagctaaatttcggattttggctactgacaagggaacctcgcgaactgttagtcaaaaatttggtataaatatggtatcattggatagagaggatcgtcttctattatgaatttttaggcgctatttaaaaagagtaaccgtttgaaattttttttcacttttttttggtcaattttttttttgtttaaaaagtcctgaaaccaagtacccgggtgttttaaaggtcgctgatcacgaatatgacaattatttgggcctattaagcaaatttggcgctagttataaagtgatagattttgaattttatcaaaaaccataggggggacccttttgttttgtaaatttttttttggataaaaatcgtgaatatacattttattcaccataattgtgctgttaatacttaatattcatcattatgtgtaaaaaaaacaaaaaaaaaatttgaccaaaaaaaagttgaaaaaattttcaaaatagtgctctttgtaaatagtgccttaatgttcttcaattcattaactaaaaaagccaaaatcttaaaatttttgaaggtgtgggattggcggttcgggcacgccaattgatggaattgacatgtaaatgttaaattaaacgaacttagtttgcttctcatttgcaccgtcataaggtgttgtaagcttcatgaccaatgctatgatttggccgtggatcggggcctttgttatgacacttacgtcgaatacgctgacccttattcttggacttgtcagcagggggagccgaactgttcacaaaagcagttcgggtgcaaagcagcgctgtgcgagtgcgataagtgagaaatattaggggattcatttgatttgcaaaaaaaaaaattgtcataaaaagtgggaagaatattcccggagtttttcggacgcactggtcaaaatcagctaccttgactaattcggatccttactcgaataaaaatgcaaattttaaatcttaagaattttgcttgagttttgttcggaattagtcaaatgcatgttcagccgttttcacgactaacaccatttttttaaattgctaacgaaaaaggtcttcccttattttttttaaataactcaaaaacgaattttttttaaatagcccgaatttccccctcgtggggttgagcacttttttgtttgccattgccattttctctgtttttaagaaatgttgtcaattgttggtcgaaattcaaagtgccttctaaacgggaaaaatgcacaaaaacaaaagtgaacagaacatatgaaacggtttcttattcgtctgctgacccatctttcctcttacaattaaatatttttacattgtttttgttttctccgttagttttttcttttatgcttctttttgagcttttttgattacccccccccccccttcgctcgctttttggcctttatttttgtgctaatcatgtatttatgattaaa

SEQ ID NO: 12180 - DNA, 996 bp, Heterodera glycines
ccgttaaatgttcagaacggaaatgctattaatctgctgctagtttggggaggggggatatcggattaccaaatgaatgaaatggagggggggggggcgaggatgggatgaatgcgattggagaatgttcaaaagggataaacacgaaatggtggataatgaaatgagtgggtcggcaaatataatgacgcaaaatctcaaaatagttaactaatagtggagaaataatgccaaaatggtttcaaaagttgccaaaaatttggtttcagcgaaataataaacaaaaaacaagcgagttgaaaaattttttgcaatttgctgaaatgaagattttttttatataattaagggaatttttgtctgaaatttcctacatgcaattaatgaaataaaatatgaaaaagccgcaaaaatagctaaatcactaaaaatgccggccgtagtaatgagagagaaggtgggcagaattcgaatgtgaaaatatgatggaaattgattaattgtgaggaaaattctgatgaggttttcattaaaaatatgattttttttaccgaggaccaattttttatgttaggtaatattcggaatttcatctgccgacgagtcacgaaattctaaagaagaaattcaattgatcaataattggggcagaagacttggggacgatcaatgaataattgggatttaattgtatttgtttgatcctgcaaatttcaatttgcaaaattaggagttattaaatttgctttcacccctggttagatagattttttctgattaatttttgatcaaaacaaattctaatcaaaatttatttttgttcaaaattcaggcagttcacgagccaatcgtcgatgatgaatcatcctcctccgacatgtccgatcatccccagcggctgccgtcccctccgccggtgccatcctttgactataattgtcatgatcaccatcgccatccgctttctgccccgtccacagcagcacattgcttcat

SEQ ID NO: 12181 - DNA, 3212 bp, Heterodera glycines
tggaggtccacattgcttcatcaccatcaaaatggcattatcctgctatgactcaaattttggtaacacgaaaatcagagcgaactccggaaccaggggtgccacggacatctccctttagggatcggaacctaaaaattcggtttcggcatcaatccccgtaattaaatatttgaatttcgtcccactttcattatcataagtatcgatcaccttttaatttggatcgaaaatcggaatttggatcaatctcatagtgtgggagtttaatcagtgattagtgtgttttatatgaagaaatgcggtaaataatatagaataagttgcagtaattagctttgttccgacccttggaggggtgggggatgataataaagaaataagcatgtttttgccccattaaaagaaagcctcaattatcttgctcaacaacaccaatttggctgtttccatcatccgccaccggcgccatttgatggcggtggtgccgtgccgttggtcacggacaaccaaatgaacgattattgttggcacacggcggcagccacctgctgttggccatggcaaattgacgatcacaatgcgctggcggtgatcaatccgacaacaatttcattgctttggatgaacagtgtcaataacatcaatactaacaaattgttggccagcgaattggagacggatcagcaacaaatgttgatgaacaacaaccacagcagccagcaagggtgggattgaaatattaaaaaaataacatgaaaaataatgcggcttaatctctgcgaatcattggttttttagtgaaaaattttttgaaattagaaatttgattaaatttcccattttttgggagtttatgtcaccgaacttaagtttcgtaatcgtataaatctaaatgttccaatcgaaatttttttgcattaccggttttttgatttttcaaaagaataacaaataaggtacaaaattaaatccaagaatgaattacctacactcgcggcccgataaagatatattttcttgtaaaatgccttttttgaaaaattcgggatacggtatgccattaagcaactgctgaattttgcttatcatagtttgttaaaaaaaccaatatgaagatttagttaagaatttaaaactaaaggtgaatcagttatcataaccattctcacgccatgaaaatttttgaaatttttaaaatgtgcgatgcgatttaagcaacgaatggtcacattcaaatggaagggagcatctccaaatacagcttcaatatcctccactcacttacacaatgatggacgatgagcagcagacatcactggagggcggctgcttttcatccttttacggcacaattggaacgggttggttttgaaaatggagaaaatttaaatacactgggaattgtcccaaataggactcgagaattggggcatttgtcatcattttcgggataagatgaacattttgagactgatgagtagggcatagaattatatgcatattgcatattttttttcctggactgtgggaggcctgaaacgcatgaaaaacatgtttttagcctggtttgaagcttctaggatggatttccatatgcatattttgcatatttgtgcatatttcgcgatttatgtgcatatttgtgcatatttcggcatttcatgcatattttatgtgcatatttgggcattttttcaataaatcctctattaaaacgaccccctctattaaagcggccatttgtgctctaatgaccaaaaatttttcaaaaatatcagatttttgggtatattttctgataaaaaagtaactttttaaaaaattggaactttatgccaaaaatagtcagaaaaatagaaaattctccattttttgctcaattttcttcaaaataaataaatattacttttttggttctaaaataatcattcatactatttttagctattttcgggatttttatgcttaaatttaacaaacttgaagagatttgaaaatttgccctcaatttggaaaaatttatgtgcatatttttcactttttatgtgcatattttcatttttggtgcatattttatgcgcatattttgcgattttatgtgcatataattctatgccctactgatgagagttgccttttctaggctttgtcttgcaaaaaatccaatgacgaattcgcaactgttgagttgaaacaaaatttttatcacgggagtcgagagtcaagaaggttgagaattttctcaagaggaaatataattttaaaatttctaatacacctgaatttcttaatattttcgtaatagaaaacatttttggtttcctaatcctttttttgctctattttcaaaaaatccttgtaaaaataagtgcgtttgttagagtttgcagaaaatcactcagtgatcaagatgatccgggaacggccttttcgataacaaaaaggaccctaggagtcctgaatttcgatcttttccatactcttgaaaagcaatgaaatattttttaaatgtcaaaaaatttagtgccattgttgtaatggttggctccctctcaacgcagttgtgcctgcttctgatcagcttcattgcatgtcacttgcttctgatttgcctgtctccccgttctcatccgccactgatcagcccttttttatccatccgaccaaaggcgcctatggcacttcaattttgttcaacaaccattccgatcaaatggcaccaattcccgatcactctacgatgcttgatccgtcggaggctacatcattcattaatcaaccattgtgatggcagatggataaatggataagcataaatgacaaatatactacaatacagtgcaaattgatataattaatctcgagactcacggaacttgactcaattacgaattacggaaaatacggcattgctcagaattttttaaatggcccctgaaacttagggcatggtttcgaaaaccgagaaatttttcttgccaatttactcattcaaaaatcggctttaaattgagtataaaaaaatcgccggaattccacgaaattgtcggataaaaattaattaccgagtctcgagcatcaaatatttcatttattaatttaatttttgttgtttagataagaaagagctggtcattcattcaaaatgccttttgaaaaaaattttcaataaaataaaataaaattttgataacattttatggcctttg

SEQ ID NO: 12182 - DNA, 1575 bp, Heterodera glycines
aaaatttcctttttaatttatttacgagaaaaaattgcaataaataaataaaaatgtacaataaaatgagtgacaatggtcccatattttttgaggggaaaaaccacataaacattaatgatatttgcagttaaatttcattttttatttgtttaagaaaaattattatttaaaaaataatattataaataaaaaaaaaaggtaataatttgtggactaaatttgtttgaaaaatagtaatttaagattaattgcaacattttatttcaataaaaggtacaaagtttggtgaaaaaataaaatcttagaaaatagaataaataattatttaaaatttacaacaacaaaaattatgcataattttaagagaatttaacaaaaactaatgggaaaaaataaataaaatcttgaaaattaaaataacgaattccattaggaaaaaaggatactttttatttataagaggaaaaaaaataattaaagtaaaataacattataaaaaataataaaattaaaaccgttgttcccatttaaaaattggcttttttggaggctttaaagcggcggacgacaaaaatattttacgattatgggccaaaagacggaagagagagaaggaaagaaaatgatgacggatcaatttggcgacgattgcatcatcctttttttgccctccgcttcttcttcttccttttccctttgtttcgcccccaaattcatccgccgtccgtcacagcttttatcatttttaaaaagacaaaatttaaatttgaaatgcccgccaaaaattgaattagcattctgctgcagcagccgaacggaaaggggcgaaacaaacggcggatgaatgggtggtcattgtttgggcccagaattgaaaaacaaaaaaaaattcaaaaggcaagaggggcgggcgatggggatgatttcagtcgggcgcactttaatgctttattatttctcatagaaaggaccaaatttttacttattttgacgtttttttaatattgaaatatgcggccccaaaacggaaaagtaccgaaaatttatgtgatataatttggacaactttaggcaattttatgattttgttttaacaatttactgcatggaaaatttttcgaaaaacctattaaaaacagtagcgaatttacgaaacgacctagcatgtactagctcaaccaccccaccccccccccaaaaaaaaaaaacctgttggaccatttttggttaaagacttttttaattttcttttttttaaatttactggctaatgtaaagaaaaatggaaaaaaaaatcttggaaggtcataattttgaagattttgccaaaattttctaagctatattgaagcgaccaaaattgttttccctataaaaaattaaaattttgagtttttctttaaaaaattgattttaaaggaaataattttacgatgggaaattgtgacaaaatttgcaacagaatgtgtaaatgtaaataatacaacagagaagaggtacaaaagtgatgaagaagaaaaacggggcaaacaaacgctgagaaattggaaatccataaaattaatgagaaaa

SEQ ID NO: 12183 - DNA, 1955 bp, Heterodera glycines
  unsure (1)..(1955): unsure at all n locations
tgaaaatacaaaaaataaaataaatctagaaatatttttaaaatggaaattatggaagaatttcatgaaaaattgtttaattaaaatgagttttgaaaagtggattagcaattaaaaattaataaaacaaagtgcaaaagtgaaaaaaaagagacgaaactatggtaaaaaaattggcttttttattaaggatgaacacatttggaaagggatgtaagaatttctattttagcttaccagagttttttttgactcaaatgaggtctataaaattttcggaaaccacaaattttcaacttgtctgaaatactttaaaaaaaagtcaaacttcaaaaaaaaaatcgaaacgatgccttttccattctcaaaatttgtttttaaacctttgaaaaaagtttcctttaagggttaaaattgtaaaaaatggaaaaatttcagtcagaaatcaaatgagaataagctgatagcttatagccaactgatacataacagcagcgacaagcaaataaatgatgacgacattacaatgaggtgtgatggaatggccattttttgcagctttatctgtgaaatatgtagataaatggggcaggcatttgaaagggttgggttggcaacgagtttggcattttgccaaaaatggaaaattgattaagtaatagcatcatcattcactaatgaatgggaaattagcagcaaccagcaactaattaattaacaattagtaaaaaatgggatttgcaaaaaaaataggcggggcttaaagtgtttaggtttaaaaaaatttaaaatggcaagagatggagaggaaaaatgacttgtggctctctcatacatagcaatggcaacgtttgggtgacagcctgtggacaaaaaaatgtttggcaatgccattttgctaggggatcaaagagagagaaagagaaaagcaagaaatacaacagagaaagatgagagatgacaggaagagtattatccaaaaaaatgttagagaaaaaaaggaagcgagagtaagagaaaagtgagggagaaggaagagaaagaataaaagatagaagcggagataaagaaaaataaaggtttccgaagaaaaacattaatagacagagaagcagagaaaaagacatagaacactaagctatgtcagctgccgccgccaaataagcaaaatatttatggccgaaagtggaaggattatggactggcatgaattataaattcatgaaggaagagaagcagaggaacaaaaagagtgtgatgtaagaaagagagcaaggagagagagagagaaactgagagagagagaataagggttaaagaaaattaagaatgagcaattatagaataccagcagcaggagcagaagagaaagaaacaaacagagaaaaacgaaagatcacactaatcagagagggaggacaccatgaataaactgagagagtttattgaatgaggagacacatagagaaaaaggggaaaccaatttcggtgccaaacggagcacataattgatgagcatatccggtccagattaatgcacataaatcgagaccaaagtacattaaataatatattacacagcttgagctttaattgagccaagaaaattagcaatggatgccaagagaataataaattattttattaatttcaaatttaaaattggctttagattttaaaacgcatagaattgcattgaatgatcaaaaaaatgccgaaaatttaagaaaaaatgatgaaaattttgaatgagctatgatcaaaacgggaaagtgatcaaggggattagggtaaaattttttatcaatactcagtaaaaatgccatatttatcctggtaattaaccgttaccgcaccaattaaaaaacagtgataaattagtaacactaaaaaaaattggtnnattaccgcttctggttttttcgtaaaactgaagcgatattacttttacagga

SEQ ID NO: 12184 - DNA, 1035 bp, Heterodera glycines
aaaaaattgttattttccgcttctggtttttcggtaaaactgaagcgatattacttttacaggaatggattaaggcagtgcattgtggtatttttccccaatttggtttagcccaattaattaattgcaaattattgactctcgacagccgtcgagagcgaaatgattttacccccagcgccacattaagcgattgtttatttttgtggtcgccgcgaaccatttaatccgccaattaatctgatcaatggcttttctcgtctgttataagagagtgaagagaaagataaaaatgtgtgtggaattattctgaaggcttacatgcaattttgattaaaaaaattaactaataatttcaatttttccaaaaatttaattaaaattgttaaattaaaatccatttttgtgagaaaaataattaaataatttttttaatgagcaaataaaacatttttgagcaaataaacaatttttttttctttgatgcttattccaatgaattatttataaatttaaaagtttactaatcatataaaaaaataaaaaggctgaaattcatataaaaaatccaaaattttagataaatttcaaatgaaatttaaattaaaatgaaacaagagaaaacaattattttaggcggcatttttttttttggatttccatgtgaataacaatggaacaatttttatgatgacacttaattgcaataggattactgtgcttttttttgcgcttcgcatccctttgaacttttagagagaagtaattaaaaaatgaattgggactgatcaaattagaagaaattatttggacgccgtatatataaaaacggaaaaattattaattcatgaaaatgaggcagggtttacagtaaattttttaaaaaattaaatttaattctatatttattgtttcaatcatatttggcatttataataaagtctaaatttgattatattatttacttaagtcttttacaaattagtttaaatttaaaaggcttattaaaatataaattaatggaaatttaaataa

SEQ ID NO: 12185 - DNA, 4967 bp, Heterodera glycines
  unsure (1)..(4967): unsure at all n locations
tcaaaactttcaaaatttntgtgaaaagtttttgtcatctaaaaactaaagcttaattttaaaaaagaagaaaatttttcatttatattaaaatgaaaatatgatagaaaattttttatgtgtattaactaaccacaataatctttttatataaattttaatagaatttggcataaaattgagcaaaagtaaatttttggctgaaattttgtcactactttggcatttttctaaccttttagttaactatttctagattttttgtaactaaaattcgcggacttagtaattatctttgtcaaaaaaacaaaaaaatcttttttttaatatttccttcatttgattaccaacccaaactctatagatttggaaataatttaattctttttttttgtttttcgattgttttcgaatttaaaatttttaaagggcagtaaagttttatgcaaaatagaattacattaaaaaaatttggataaatgaaaacccatcaaatttaaaaaacccaacaattgttgtccaaatgctcagccgatctctagtggattagacgttcgatgaaaatttgaaccaacaaaaagacagatagccaagattaatgaaccaatgaaaagaaagacagataagcccaaaaaagggtttttgaatcgatcaaaaagggcggctgatcagtgatcaacgggaaacattttcgctaatcttccgttgttgtttttttcttgttttctctgtgcgcacttcaatgttgattccaagagaatgtttgtgaatttttgaatgccataatccttcaatgttttttcgtccgtaagttctttttggaagcctctaattgttccaatttgtccgggctcaatttcaatcactttcccgattttttgcctcaatatttccacattgtccgtggccttcacttgaacggcatatgttattccacaatacgttatgaacactgaaaattcttcatcttttttagcgacggatgaggagggcatcatcaaaagcattgccattattagcccagcagaagcgatgccaacggcggagaacagagaaaagccaaaatgattggttttcattggggcaaatttgatggcaattggagggaatggaaagggataattgggaatgaatgaatgaatacccacaactgtcaatatcataagaaaattggcatgggttatgaatatgctataaatgtaaattgaattgatcaataaaagtaataaatggcaataaaaataaaatgaaatatttttttttataatacaaatgcataattatcctgaaccactaggtgaacggggttttctcctaatttgaacgagttaaaacacgtaaaaaacccttttaaaatttaaaagatcattaggtccagcgatgctgggatttattcaatggaattttttagaattttgtcttctgtagcatttaaattagagaccggcacggaacgggattctgcgcgggattttgctggatcccagtccgcaatctcactttttttggaaaatgagggattgcgggatttgcgagattaatcccgcgggatcctgtcccgcaaagaatttgagttccaatcccgcagcgggatcctaaaatttgattttttttgtgcgggattctgcgggatttcattgattttttgaaaatttaaaagaacagaatgccaaatattttgaatgaatttataatttcactcaaattaaatccattttttttatcacaaatttcatctagaattttcaaaaaatttcccggcggcgcctatcgacaccgcctgaatcggcttttacttattaatcatgtaaaaattgagtcaaaaagtgcgacatttggtcattattagaaaaaatctgttaacaaatcacattaattttcaaaatatttctccggatggtgcatatcggcgggcccctctgttcctagttttttgaaaaaattgcagtagtgactcctgtacgattgtcgccccttttggcgctaaattcaaatttgaattttcgtggtgatactctgtgggagggaggacgcgagcgttgggagttccgctccaacagttcgggagctatctttttatatgctttcctgatgcaatcgcgcgagttcggcggcaacgagttggaggagcacggctgctgatgagggtcagcgatcgccttattatcatcattttacaattttaaatatactcccccccccctattgtactacccctacatcccgcaatgccaaaattggggccgcctgaaaattttttggattttcttggaaaatatcaaaacaaattgcacattttgctggtgagccgccggggcatcatcgagcgggacaatttggagtgccggtgccggaggaggtgcaaatgcatgctgatggccgaattgaagagggggaagttccaagacgcccggaagccgaggaaacggtgggttgacgaaaaatggtgaagcggccagctgattgttaacgacatgttgggcgaccagcaaagggacaaattgtgccaattgttgctgctgctgctgctgctgctcctcctcatcaacaatggctgcgccgtcgacgacaacctcctccggtgatgggacccgggggaaaacctggtcctaaatcaaaaattttgactgtagccgtcccaagggcgtcattaccaagggcatcctttcttcgccaatcagcccaaacaaagcaaaatcctctgcgtgcacgcccacacgggcgatgacgctaaaatttttttgtgtattatttgttcattatcgccaaattccccaaattttgcgggccctctcgatgtcgatgacaccaccaaccgccgcatgggtgtacacggcagacatcagtctcgcaagactgaatccaatctacaaaaacgtttcaattttaaatttccgttctcagctatttttacgtggtcgagcagctcctcatccttgaggaacgtctcatcgcatgattggtatccaattagataccaatacctcacagcaccgcagacgaggcatggcgccttgtcgtacagggccagtgatgtgacctcatactcagttgtgccatcgtcgtcctccgcgatgtcggcagcattttgatcggagtgccgatgccgacactaataaacaaatcaaattatctaagtcaactaaaaatgacgcagtcacgaatgtttatgacccattttgcactcaaaattatgaaaatattttggtggagccaattatcagttttgcctataatctataaattttaactaattttaggatgactcaatacataaaaattatcctgaccgtcccctcgtttaatcataatttcaccagtttttataacgcacatttttaataaaacaagaacatcatctccaacaaattttgcagaaaaaaccaaaatgccctgaggttaggaattaggaagtgtcaaatttgtgatcagccacacaaaaaaacaaaaaataacattgaaaaatttttgatgctcttaacagcaaaaacacttctccatttccccacctcgtcctcctcgaccggcgccctccctccgcccttgccgccaccgcctctaccggcaccgcctctgccggcaccgcctcccctgcgctggagggcaccacggctgccgccttgtcctcgtcctccgcgttggccgccaccgcctttgttcacccgtacggggtctgcattccgtcgtccgccgccacttgcttcgccgcttttccgcccacacatccaaatcgagaagagaatgagcaactgaaaacgtttttgtaaaatttcgaacaaaagcaattggacgacaccaaactcgttttcggccaacttgtttttgccccagctcgttttttgtctatataattatgtaggaatgcagacagcgtgaagtcagacagtttatatacacgtaaaaaatgagttggggtaaaaacgagttgggttttaccaagcaattaatggggggggggcaatccttcataaattcaaaattaattgaagacgcatcgcgcaacaccaatttgttctcggagcagatgaacccattggggtggttgaactgctcactttttttggtgaattccaaagtgatgttccttaaattataccattgaccaaaaattaaataaagaattcaaatattacaatttttgcccttttctgtggcaattccctcaatgagaggcgcaaattggatggaaattcgctgaatggaagcatcacaactgctggcatttttgtcaaccgaagccgagctgtttgaaagcgaaaaagtggtctagttagatgaaacagtctaaaaaagaagcaaatacaaaatttgacaaaaaaaaaacaaaaaaaaccttttatggtaacgaattgcgccagtgatttgtggagagtcgagaaagaagccatatttgcccttgacagcaaatttcatggcattgacaccaagcgaacaaagggcgatgaaaaaagccagtcgacaaaaggaggagtcgggagatgagaagacactgcgattcattgtgcgaagtaaatgtaattttccaaccttttaaataaaaaaaacaattaaaggaaatttaaaataaaaataattaaataacataataaagcaatcgtattaaattgatttacaaccatcccctacggcaaacccttccccaaggctcgcgtccctcccccagagtatcaccacggaaattcaaatttgaatttagcgccaaaaggggcgacaatcgtacaggggtcactattttcctcaatttctttcgcattgtcgggcagcacaggcaaatcgccatagtattgtgatggtgctggtagagcgaatccattctctagcatatactcatcatcatcatcatcactttcgggcagtggcgccgcagctgcttccgcggggaggtcccgcaccactagcggcggcggctgccgctgctgttgtatatcgtatcgccttttccgccagacgatagctgatgctgtaag

SEQ ID NO: 12186 - DNA, 781 bp, Heterodera glycines
ttgttcatgggattgctttgtcacataaatggcaccgtttgcggcacactttggccatttcctcgtaatagggctgaaatgtgcaaattcgaattttgaatcaattgtgattaaatctgaacaaatcacacacattcacttccaagtgatcgggcggtggcggttcgcacgaactttcatcggcgatctgacaatcgttggtcagatcagcacattttgctgtggggaagagtgatcactcacttcaatcatttccaaattaaaaattaaatatttatttcctacgtgtgcagaatttgcaagtgcgtgcgcacttttgcatgtcctcctcgaactccttctggtcgcacatgtgccttagtccgatgcatccgtcctgagtgtccgcgcacgcgcccgtcgcgcacagaccgcacgtggacgcacaagtcgtagacatcggaaagaaactgatcagaaaagagagagtgtgatcggaaatccaccggcgggggttagctccgcacgaccaacaccgactctcacagcgattagcccccccccccccccccccgacgttttcgattcgatcagtccaataaaaaaagcaaagttactttaccaatcacttaccattgccgtcatatttttacataaatgtctttgcgcagcacagttgatctgataacctaagtaatataactgaattgtcgtcctccctccgtttcaaatccttggccaattcgtaaatttggcttccttccacttccccctctccctccctctctcccaaaatgccaat

SEQ ID NO: 12187 - DNA, 1406 bp, Heterodera glycines
tcacccgtaaaccgcttccttcaacccgggcaagtcgcctttgagcggccgcccgtgcgaatttgtgtcgcgcgaggggcatactctctcgcagaaatctttcgtctctctgttctggcaaactgtcgcaatgggcagaaaattgccgtttttgtcctgcaaagcatttttcatttaccttgcttcgcctcattttcttctaacctgacagcgcagaagttccaatgtgctttcgttgcctctttggcgtttccgttgcccctctccctcttcttcttccccctcctcttcttcatcttcttcctccccttcctctttccttttgcgcttccgttgtccctttccctcttcttcctcctcctcttcttccccctcatcctctccctcctcctcatcctttctctcctcctctccctcctcctcatcctccgcattgtttccgtcttccgtttcatcccctccctcatcctcttccacctgatcattttcctcctccccctccgtttcagtctcttcgtctgccccctcgtcttcgtccccctctgcttctgtgccttcatcgtccgtcgcttggtcatcttcgtcccctccgccgtcgtcctccgttgccccgtccccctcctccccttgctgatcatccccattttcattcccgtcagtgtcttctcctcccgggtcagtctcttcttcgtcttgctgatcatcctgtgcttgtacagcccatctcttttgaatgccggccaaaaaaagtgccaatgacagggcaataatttgccataattttactctgagcattttcaaagtaattgaaataaattgaagagaaaaattggaaataaaattaacggttaaaagctgaacaattcgacaaaaatcccatcaattattacgcaagcaaatgaattaatggcagaaagtttccaaatgtttgaacagattttatgggtgaaaaattagaaataaaagataaatttgaaattacagagaattattcaaattttcattgtccaattttttttttttgctaatgtgtgttttcggcactttgtcccttccgcttgttgccatttgtcttttttctgctgaatggagatggggacaagggggtgcccaaaaggtctaagtgccaatgtcttactcttccaatgaccaacagcacagtctttattctggtgtccaatgttcaggatacaatgggcgaccccccaacccgattcggtctcgggaacagagactgatgagcgggagccccgggcaagactgagagagagacaagaggcggatgaacacttataaagagtctcgattagtgaaaagaaggaccgcccccgggatgacattgatggacgaacaatgatcagaggatgagagagagaaaaagagaaataagaaattaagtatatcac

SEQ ID NO: 12188 - DNA, 1534 bp, Heterodera glycines
caaaaaatgagtctttagcactaatgcctgaccaattaatgctaattaagctgcgacggccccatttgtttgtgcttcaactcgtcgtccttttgctcatcgttttttctttcttgaccattttttcggtttccgctacaataaggtgtgctgatatgtgtgttcattcgttgtcagtgatttgattaatcatcttatcgtatgatcaatcactccagttactaattaactcctaattatgtctttatttggctttgctttccctttccaatttctttttttctttagtgttgtcagtgatgactcaatgttggtctcgtgcgttctttcacttttcctctttctcttttacgggttaattagcaattaatgaattagtttgttcattcactgccttttcagtctgtttttggccatttccgtcgtctgtttccaatttcttttgtccgaatatgaggagatccaacggattttggccaagtcaaagtcagtgcattttaaggagaaaaggcggaaaaagtaagcaaattcaaacaaaaaatattataaacataaaatgccattgatcagtttgttttatacattaattctctgataaattgtctttttgatttgatcataaacaaaacaacttcgtcgtaaaccaatagccagaagatggttggctcccaatcttatgtcatgccttttattccttcggtcgtttttcggcactttctcccgattccgtcgattttcggcactttctccattctcttcgattccgtcgtatttcggcactttcttccgtctcctctttctctctttgtcattgcctcgctccctcctcctcattcgattccatgcttctcattcttcgtccaatgcttgccatgttcgtcctcctcatttccctccaccgttcgtttagtgccgaaagtgattcggtccgtttgaacaagggaatggccgagaagcgtctccgtctggccaagtgccggtggtgcagcggaacggtgcctaacggaggcgacacgctcgagggagaggtgcaattggccgacgcggtcctcttccgcttggcattgtgcgtgtggtcgctctgctgcaagttcgggtttgacccatgcgcgggcgaggaatgcgccgtcatcgacaaaggtcgcagttcagtggcggctggatcagtgatcaaaatcagcggggtggtgggcaacgacggatcgttctcattcgcatcgttctgccgacagacggcattcagccgctggtgatcccttttcatcggaggggatgacggcgtggaatggcattttgatcggggccgtgatttccttggtagcgagtgaacacgcactaaacatatatcaatattgttttaattgttttcaattatatttgccagttgcttcccccgagcgtttgtcctatccccactgattatgaccccctttccccccccccccatttccccccgaggggtgccatttcccactgaccttccccaagggcttcgacggcagccgctcctcccccgcctgcttctgatgaggtt

SEQ ID NO: 12189 - DNA, 887 bp, Heterodera glycines
gttttaaaatttttataaaaaattttttatgggaccttctatgcacaagtaccacaaaatcttttatcaaataaaaactatagggcttgcatgactggaacaccttcacaaatttttttaaaaagttagaaaatttgagcttttaagtgcgcgattcgcgaccgcgggatttttctgtccgcgccccactcactgctgtataaccgaaaaggaattcatgctttttaaccgcaaaatatcatttttatgtttggtagtcgaatgatcattttgatttttttcatctgcgagcgaactgatttagacttttcaacaaaaaattctaccaaaatttcttagatttaaatttcggagttcgcttttcaaaaatgtcgtcgtcctcaaagccgaggaattcgatgggtcggatgaagcatttgctgagctcggctgaggacgcggatgtgcactttttggttgggcagaaaaaggaggcgagatttcaatatccaattttgattttctaatttttttaagttttcagcttctacatgctcacaaattgattttgaagcacgcttccgaagtatttgaggcaatgtttcggtttgacgcacagaaagtaaaaacagaaaatggtgagaaaaaagaaacaaattttttattaattttttttgaaattcagcctctgccgaaggtgtcgtggaagtgcccgacgttgaagcagcggcgttcagagtgatgctcgccttcatttacgcggacgatctgagcgaattgaacggcgaaaatgctatggctgtgctttatgccggtgaaaattttttgtgttttaatggccacttaaaaatttttttgaaattttcatggttatttttacaaaatccgggttatgtgggggggggggg

SEQ ID NO: 12190 - DNA, 2004 bp, Heterodera glycines
ctttttaggactttgcccgccaatgtttgctttacatttgtcaaaatgcgacaacattgttcgacactgagcagtttttgcaaatcgatcagaatttgctgggtgaaatattcggccgtgatcagttggtggtcagcaacgaattcgaaatttggaaagctgtaatttaacttttaatgttttggtattttaattgattggtttgttttccgtttaggcactccgttgggccgatgaaaagtgccgtcaaaagggcactttgtgttcctccaaaaaccgtcgtgctgcgcttggcccggcactgttccgaattcgttttcctctcatgccaacggaggagttcaccaaatacatcggtagcagcaatcgttgaaagggaacagctcgtccctcaaccagatcaaatattccacccgagaattaaaaaactacaagcttctaatttccaataaaaaataagaaattttgcataagaaaaattaaaaaaaatttctctggggagacggtgtgaggggaactgatccgggacggagcaggtcgtttccctcccgaaatttttttttttaattttcaaatttagaaattttccaaaaaattcttaggaaattttttatttagaaatttcaagaaaaaaatttcttgatttttttttgatgcaataataagttttttcaaatttttccaaaaaaatcattgactatttcttaataagaaagtccctaagaattttttttgtagaatttccaagtttgaatttttcgggggggggggggcgaaatttgaaaagaaaagaacgacatttgttttatttttgcagttacttctggtcttctgaccattgaagagtttgtcgccgtttaccaattccattgccatccgaattgtctccctgggctttacccgttgaaatttccgtgccatggacgcatttctgactggaacaagcccaagaaaaacagagggactttggcaatggaaattgacaaattttctgaatttgcgcgggaaacaaagggcaaaagccgattcagcaaagccgtgacaataaagggcattcagtggaaaattgaggcggaagtgatgctgaaagaaaattgcaacgaaaagtgtttggccgtttacctttggtgcacttcaccgagaaacggtcggttcactccaaaatctcgcccaagaatttaaaaaaatttataaaaaattccaagaaaacgagaaaattgtaatttatcataaaatccaaaaaaaattgtgaaattttctaggtttttttctttaaaaatttttgcggcgaggatttgtctcgtcgagacttcgagcgacaagattccggcggataataaacaataaattggcattaagataaaagttggagttgcaaatgctcggccacccttcgaattgtcgcacaaaagggcgaggcggagaatttcacggggcagttcaatggccgtgtttttaaccacaaactgaacaatttgggcttcccaaatttgattactgttgcggtgagcggaaatttaaaccacaattaatcaataaaagcaggcctaattaagcaattaatggactcggacaagggattgtatgacaaattagaggacagaatttcaattgtcattgacgtcactgtggaggagcaaaagggagcgaagcgtaaattatcggatgaataagcccaaatcactcaattttttcttttcttttttttgcaagtctttcctctgaattgatgtattgtctttcacatattttcaaaaattgtcagaaattttaattttcaaataaatttattttcaatcaaaactaggcatgcatttattgctcaaaaaaggcttaaaaatgggaaaatggcagcaaaaattcgcagtttttagagcgaaaaaatgcatcattaggaggtgtttttgatatgttggaatgtattaatagaacgccttacataataaattattatatacactttactctatatttccagcatattaatttacatacataagaatt

SEQ ID NO: 12191 - DNA, 1645 bp, Heterodera glycines
  unsure (1)..(1645): unsure at all n locations
gggaaaattgttaatttttaatgcgatttttaacagatttttgtccaaaaatgaccaaattttgccacaaattttatattttgtaaaacagtgacattatgcccaaaaatttcaaaattatgcgtagatttaggaaatcagaacaaaatttggtcactagcttcaaatcaaacatttctgataaatcagaacagatccgagccctggattaaaccccaaagtctcgaacaatttacaaaaaaaaagttcgatttgatcaaccttaaataccaacagttctgctgatcagtcctctttgggctgatcaacgcgatcttcaccggtgtgaaaagttttcacaaaggtttatttatttataaaaaatattaaatgttgctattttttgcaccttccctagaaaaggcgcagttccaaaaatttgtaacacaaggttctttgaaagaacgaataagcaggcgaaatggntaaatatatttcaattaaaaaactnttttatnatnnntcnaaaatnanaaaanncanananaaacattcctttntatttctccttttntatttcttcttttctctcatccttctcttncatanctcacttttagtgggtgggagggaaaggcacacaaaaaacaattcaaaactaaatttaaatttaattaatattttgcctttaagcacctgccatttttacgccagaaacaataatggaaatgcaacagaacgagtcgctggtcattgtgaacagtgacggggaggaggaggaggagttcaccgatgtggtaagttttgccaactaattttttgagttatttcaaaaggtattaggtcactacaaaaaacatacttagctttttcacgaattttgtctcgaatttaactaagtaaacaaattttgagattgagaaattacatgtatttttatccgaggcgtgaaatatttcttttaacggattgccatccttttgccggtgtgaaaagttttaataacgttattttgttatgagcaatattattataaatctaaatatttttaacgccctcccgagagaaggcgcagttccaaaaattagtccacactgttccttacaggaacgaaaaagtgttacaaaataggcaaatatatgttaatttaaaaactaatttatgatgggtttaaaattgaggaaggggagagagaactgatcctttatatttctctttttgtacgccttcttttccccctcgcccgtctcttgctcttagttcactttctctctttttcctcttcttgtcaaaattgaggaagagagtgagacgcaagggaagagagagaaatgggtcgcggtcgttttcgtacgagcacaagtttttggctataacttttttctttgccaaccaaatccaacattgttcatatccttcgatagccctatgtgtcctctattagcctgcaaaatttctaaaaatctcattaaggtccgaaaaaagttatggccagaagaattcatacaaccagattttccaacttttttggcccgaacttttttaaaacttaacgaaattttttgaaagtttgcagactaatagagcatctgaagggctctcgaatgatatcaagatccttggatttggttgacaaagaaaaaagttatagtcaaaaaacatgtgt

SEQ ID NO: 12192 - DNA, 3710 bp, Heterodera glycines
ccttattgacaaaaaatcttatggatgattttttttcaaaaattcaaactaattttcaataaatttttttgaccatattttcgtatttcttgtccatattttagcgtttttcccagatggccaaagtaaatgtttgaaatccctgcagaccaatcaagaatatttaaaatttgactaagaatttttggtttggttgaattctcaaaataaagttacgatgatttttttttttttgctcgaatacaataaggtatttatattttatttatttttccaggaattagagcccatttttctggattaaatcttagggcgaagctctaccaaaaaacatatctattttcctaaaattcattgataaattttggaaaatttcttaaaatttcattgaaattcgatttttttcccgttgacaacaaatcctttagaaaagacggtactcccagtaattgcaatggaaaagatactgtaagatctacggtaaaaagatttttttatactaataaaaaaatagataaaaaaatgctaaatgaacgtaggtaaaatctccaaaatcaatgaaaatttgtgtagaatgttgcgcagggttaattaattaaagtgttgcccgtccgtcatagcccatctgttttctgttcatctaccagccgaatttaagcaattctcagcaggctacctttccttgttcatctaatgacctgaaaataataagcattttgagaaattttcgaataatttttaaagaaatttttaaaattaatttttttttaccagttttgcaaattgtttctctgctgctgaagcgattggcaccaaaaatatgatgtgttgtcggagaaattaactgcaaatattttacatgtttaaaggtggatgtgaattaatttgatgccaaaatcattgtcaaaaaataatacacaaattttgaagaaaatagtattaacgaaatccaaaataatcttaccaatttgaataattacttatttgaattaacgctcacatgtaatttattaatagattaataattaattgatccaccttcattgaagtccagctccaattcgtcataaaaccgatcagcaaaacggttcggaattgtgcgaaacgatgtcaattgcatgccccagcggtccgcaaaactgacacgcctctcgtaagcatgcttctcagctgttggactcctcttggcacttgttgacctgtgccaatattcaacaggtaattagaggaacaattttcttttaaattcggctaatcctgatccctccctcgtgatcattccttgataaatgttcaccgataaatcctgatcactttttgtggcaaaattattctgactcagcctagtagggcatgttttcttaaatccggtcagagcagccggacaaaaattctacaaatcctgatcattcatgaaacctgatcagtgatcactccctgatgaaatatttaataaactccccgatcaatttcaggccacaaatcttattaattagttaataattgctcacaaaatggatttcagtttgaacgtcgtcgttgacccgtcaatggatgatgaggttgttttgctgctgtcctcctcactgtcactctgctggctgttgtactcctccgagtcctcctcctcagttgctgctgatgataatgacagcgatgagtcactgtcatggcaaaaattgtcggcaatttttgtggcatcgaatgatcggaaaaaattgtcttcgcatgattgtaaaaagttgtaattcgaaaggttcgttttggtccgcagcagatgatgattgtcatgatgatgattatgatgctcgtcatcctcactttcatcagaagagtcgggcgagaaaactgaaacaatatttaaaaaatatatattttaaaattttaattgttgttattattaccgtattttctctaatagagccccctctccctcatttaattattttaattgccgtgtgtttcttctaattagccccccgccccctcttgattagagcccacctccccctccaataaagccacccctgccccctctcgattatggccaaaaatgaagccccccagtggatcttaattgaaaaaaatatggtaattaatttttgcaccagtaaattaaatgattttgtgttgtcattaaaaattattcaaaatttaattgcatctattccttttgacagcgatttaaataataaaattatttttaaaaaatcatttaaaattattttaatatttataaaatgtatttaattttttacatttcacatttttgttccgtgagaattgctgctcctccgttttcagcttatcctttgctgtgtatgtttgtttgctgggacaacattgttgatcgcattgaaatcaacacattattaattgattatgtattattgctataattttaataggcaattataaattataagaatttaattaattaagaatgagaaaataaaaaataattattatataaattgattttattaattgcaggctttatgtttaatttatttccattaaaaccatgagttttcccattcaatttacatatgttaaaaaataatatttattaatttatttgaattatgaaaataaactaaaaaattttcttcagttgcaatttttgttttgcacgcactgataatgaaacaaaaataattacttaacattaccggttaaaaacaataataatataataataatattttgtgtgatcttttaaaaacggtagaagtgattgattatgtacacattagaaaatgacgaaaaatgaaacaaaatatttcaaaatatatttattgtacatatattaatgaaaaaaaagtaatttgaaaaaacaaaacaaaaataggtattttggatgggtttaaaatgttaatttgccagaaaaatatatttgtgaaattgaaaatgcctattaaaaaaaaaaaattcttttcaaaaatattaaaatttaattgacggtaatttttcgcaactaaaatttgtattaaaatttaattaattaattaattaattaactcccaaaaatatcacacaatttaattggccatggctatgcccgcggtatatcaaaaagcctaacatcagcagaaggtgcccattaaaaagataaataaatatcactactttttcgtacacacacacacacaaacagcagcagcagcagatgagagttaagagatggagaaaatgagcggggaaaataatgaatgtttgctactcgtgatggttttagtgtggcggtggttgctgctgttggttggacaactgactgctgacaaaatgagagaatgaatgaatgaatgagtgcaatgggagggggtaaaaattggaaaatacaacaaaaaattgaggaaatggaggaggggaaatgtggggaaaactgagctgggggtggggcaaggatgatggaaaaaaatgaaaactcggggaaaatggggggagagggtaaacgggggtaatgggtgaaaaaggcgtaaatagtgggggaaatggagagggagaaagtgcggaaaactgaggcgggaggggggggggggggtaaaaaaaggggaaattcaatgaaaaattggggaaaatgcaggaggggaaaaattgcagaaaactgaggaatgagggggagggatggtggaaaaattttttaggggaaatgaggaggggggggggggaggtgaggcatggaacaagtttacccgtctcctctcctc

SEQ ID NO: 12193 - DNA, 2247 bp, Heterodera glycines
  unsure (1)..(2247): unsure at all n locations
cccccccccccccccccccccncggggttagtagtgttttggcgaggcgagccgaggcgacgcttttgggctccaatgtttggagtattctttgcccatcgtcatcatcacatcagcagcagcagcagcagagagtggtggaaatttccagaacgtcccattcacattgaccacgtggctttacagcagcagcagagagtggtggaaatttccagaacgtcccattcacattgaccacgtggctttacagcagcagcagagagtggtggaaatttccagaacgtcccattcacattgaccacgtggctttacagcagcagcagagagtggtggaaatttccagaacgtcccattcacattgaccacgtggctttacagcagcagcagcagcagcagatgatggacgggaaaaatgcggaaatttaaaaaaaaatccaatttgtttaaggacatactgatatgggaagaatatttcctggtgtataaaaatgggggtactgattttcaaggacaccctttgagtataaagccgcaggtctgttcctcaaggacaaggcaatcgttggaaaataaaaccatgtcatattgaaccacgaaggatggaaaataaagcccttaatttgtttattccctaaggacagttctggtaaaacaaaaagcgtcatcatgatttacaagtatctttttgcaaaataaatcccaggctctgatttccaactgaatcgtggtctttgttctcaagattgatgtaatatataaagccgcacttcattaatgttaagccataacctaacttgtcaaggacaatagtgaaattttcagaccaattaagaaaaggcaaaacaaacaaaaaattgattttaaacgtttgaagtcgaatgagcatttctagaaacgaacaaaaaagtcatgattttcaaggacatatccaataaaatataatattttgaggaaaaaaggaggaaatttacaccattttaaaatgaattttaatataatgaaagaaagatacatttgcttgctgcccgttcattcatttaaagcccccttaaacagaaagccaaaaatatcccgcataaaaaaggaaaactgaaattttatagggcagcaaagcaatctatcaaaatcagtgccaaatgtcatgacggtagccttagagaagaattaatgttgattcaaacgacaaactcttactgcatttatgtgtagaaacaggtgaccttccccgccctcccccctccggcggtgtccctccccgtccccggttttagtgtcgggatcagttgcggggtttcggggtttttttgtgtcgcatcgtttggagtgttctttgctcatcactaattactttggtgaaaatttccagcagcgaaacaccgcagaagagcggttattgacacaaaacacgtggtttttatattatagataaaggtaggaggatagacaaggtggattaactgtgcaaaaattatgtataagaagaaaaaattagaaatttccggaaaattttttgtttattagcgctttttaaatttttcatccgttcatttaaatccaaaattcaatgaagaaattatgtatacaaattaataaagaaaatttagtgaaaaaatatataaaaattacaatttttgtctcaagaaaacttcatcgaacactcaaggacaaaaaaaagaacattaaaaaattttctgattcttgatgacaataaacatttaaggacaaaaaaataaaaattccaaattagattccaagcataattcatgggatacctaacaaagagcctgagcctttcgaaaattaaaaaatttctgatttttaaggacaaaaaacattcaaggacaaagagagaaaggagccgttgctgttcacgaaaaataaattcagtttaaacgaagaataatactgcgcctaaataggaaaattgcatgcatatcaaattaattagaaaaacaggtttttatcatggacggcggtggttaaaaatgaaaaatgtgatcatttttatgtaaaaaaacatttggttggagcgtactttgttgataattttgtgggaatttgctggcaattagtagttcaaaaaacggattgagcaccaaaaaaaaattggaatattctttgaattaatttggtcaagactaattgggaaatttgggttgataagcgaacgaagaagggctcccatcaaatttaaaaaactaattatataggattgatgataatgaagataaaaaagataaatttgag

SEQ ID NO: 12194 - DNA, 4757 bp, Heterodera glycines
  unsure (1)..(4757): unsure at all n locations
cttgcatgggcctgcannggtcggaaaaaaggcagcaaaaattgaaaaaagggatgaaatgcacgaaaatccagaaaagacatgaaaaaaggcatttaaaaattttttattaaggattttagggagcaaataaaaaaagcccatatttggataggttcaaacaaataaataaatatttaattaaaaattgtttaaatttttttagcggagaaagatatcaaagcaactgaagtagcgttagtcacattaatggcaaatattcacaaacaaatttgtatacaatttgacaaaaatgcattccctgttgaagaaattgcaaaaattactgttgaaaaagtcaatgatatgttggtgggttaaatttttataattaatttctttgccagctattttttgggcaaaaattttacatttttaacgggaatgggggccgttcgtcacagacgtttttggcacagacgattcggcgccagcccaagttttttcattataccgaacttttttctttgtcgaccaattcgaaccattttggtatcattcaaaagcttttcacaagctttattaggcttacaaaaagcataaaaattttctagaaatagaaaagttattaagaaaaaacttcaaaattttgagtttttcgcaattttcatattagaacttttgtggtaattgtccactcacaaaatttaataaaacatcactatttttagtaattaattacgtaattacatatttaatttttcaactcaaacttcgtttgattttttttcatatttagcagttttgttgggcttaaaagccattttttattattatttataaatcaattttgaattttattcaattttttgcattttttttgttgtttaaatccattttctggcaatggcctttttatgacattttttttggcattttgcaactctttttgccacttttggaggcttcattgaaaatttctttaaaaatttacatattttttaaaaaaatttttaggaaaaatgtcatcaaattgtcaacattcgtcgtgagaaagcagaaaacacacaggcacaggcacaaaacacaagcaaaaagagcaaaatgtcagggattagcaaaatatttggcggaaattcaaaaattaaaaaaaaattggcaaatttaaccgatgaattaaaatcattggaacaaaaagagcagcaactgtttcgagaaattaaaagtgcagcggaaacaacacaatttgattggaggcatctcgaattgccatgcacaaaagtgacgacgaaaatttagggaaaaattaaaaaaaaatttttttttaattttttggagtggagaaaaatgaaaattggcgcgattccattaaataataattatttaaatagtgatgccatgcaggtatggcacggaattccgacttccaaaaatttttggctttggaattctgactcccgaattttttggggcctcggaatgccatccctgatgccaagtccttgaattcaatgccgtccttgggaattacttgtggaattttaaaaaaatccttttttaacatgggtgtacttgagaagaaatgttccttcccaataatgtcctttaaaaaggacatttacaagttaccaacttgcttctccataccaaatgtgcgtccttcaattcaagggcgctccattatggcattttgtgtgctaaaaactatatggtttagtgctaaattttgatgaaaacaataaaaaatatatattttaatgccgtccttaaatttaaggacggtccacctccattaggattttgtttcaaggacggtccatctctgttagtgattctgtgggtcaaaaaaaagtgctaaaattattttttataattttttattttttaaataatttttcatttattttttttctgttacagaaactcttcgatcagatcaaaacactatcaataacaattactttgaaaaagaatgcaagtacaagaaaatattaattgaagttttatttttgtgtatgattttttccttattaatttttttaaagtatgaaaattggtgatttaaatgataaatttttgatcgattgtacttattttaattgttgataaaaacacgaaaacggcgattttatgtgattattatattttattaattattgaaatttaaaaattagtaaattattaaaaaaaattcatgggacaatgcagttacgaattttgctcaaatttttccccggattttttttttaatttaaggacgaaattttaaatgatctattaatatcatcaacatggtgaaataagtaattttgaaggatttaattaaaatttaccaagtgactattggcaattctacaaaaaattatgaaatatacttagtaaataacaaaaaaaaaattgtgtttggtgaccaacccaccttaatagtcaagtctgaactagtattagaaaaattttaaaaaaaatccatttttttctttaaattcacaaatttttttgaaataattttatagtaaattcttaatttttaaaacatttttcatcgcaaatttcatataaaaaatttctattggcaacgccggcctaaaacctaatcattattttaattttgaattgcaaggagttctggaagcgactttttggtcatttttaggccaaaatctgctaaaaaaaatcggaacaaaatttcagtcatacttttgttttttgtaaaaattttttaggcaaaaataaaattttcacaactcaaaaaagccagcaatcccgcgcaggttccctcaaatttgaaatttccaggcactaataataaattggaagtagagttgagcggaaccagaaatttttggaaaaaccgggaccgggacctgaaaagcgggacctaggttttcgaaagggtccgcgttttcggcatttttataatagcaaaaaatgttttttcattcattttataatcacgcaatttactcgtataattattctttcttttaaaaattattattttaatttttttttaattattatttttattctactagtgttattgaattatttgattctacttgttattagaattattttatttcatattcgacatagcttttttattggtgctgattaatgatttcatttaatttttctacttggcagggttttcctataaaaccaaataaatccaaaaattaaatttaaatatccaaaattattatttcatttttacagaatctaatacaattctttacgtttaaaatcatttaattgctttatttccacaagaatatgaaaattggcatcttattactaccatgtctattgatgatcaaaaacactgttgatcagactgtttctgtgaaaataaaacaatcgaaaggatttgatcaaatatttggcgaaggatgggagaaaaatgttgaggtaaatggaatgggtcaaactgatcaaaatgggacaattggacaaagacaaaatgacgacaaaaataggacaaaaaatggcaaaaaaagtgagtcaaaaatattggcaggacaatttgatcaaaatttggaggtgaaagaagaatcggcaagcgaatgtgatcaaatggaacaaatgtcagaagacagtggacaaatttctgatcatttttcaagtgaaattgaacaaatcaaaaggaaatttacaaatggaagagagaatttcgattaattaaaataaatatacattcggttgaagaaaaattaaaatattaaagcaatttgatcaaatatatggcaaattaaaaacgaaattaaatgaaaaattggaaggaaaagggacaaaatgccaaaaataatagctaaaaatttgggcataaatattagaagtatttataattggaagaaagaaataaaaagtggaacatttataaaatttcaaaaaattgatgatgaaaaaagagaaattgtggaaaaatatttaaaaataaaaaaagaattcatgcaaaatggaaaacattcacagaaggaatgggaagaatttaatgcaaaaattaaacaaatgtttggagtgattcttcagacaattgaaaaatgggccaagaaattaggcaataaacaaaatgctaaaaaaggttaaatttgagtaatttcactcgattttaaaactttaaaatttttttcaagtttgaaattatttttagagcaaaaaattttgacaattgctgaaaaaagggaaatgatgaagcaatatcatcagatgaaaaaacaaaatccaaagctcaccgaacgacaaattgtggcaaacttggaaatttcaccgagctcattctacaaatacaaatccgaattaatgggcgaagcaaaaaaattttgatagggatatattggatttaaaaattatcaaaaaatagagaattctgaattttaagccgataattttctttagtgtttttttatcgttgataatttaaaaaggtttttttttctttttttttaattggcatttaatccacaaatattttgcattcaccttctaattttatttttaatgtgctttaaactaaacattttgctgacgggatgtccactgacagaatatccattagtgatcgaatgtctgggaaccaatcgaatgccaattttacgcacattttataccaatgcctcatccaaatttgttttttacactccatataatttttaaggcattccttcgtttagccaaataaattaaaatttcaatcccaatttgtgagtgctaaccttgtatttttaatgatgctacaacctttctcaaaacccataaaaatgggcgtcctcgaaaaa

SEQ ID NO: 12195 - DNA, 1907 bp, Heterodera glycines
acccttttgacatcattttgatcatttcttttaaatttaaattatatttatacatttcgccaattttatatattgttattttgttttgtctttccattttgtcacacatttttttacaacttcgtctttgatcttttaaaaataattttatatttgtcttctcttctcggcaataaatttataaaaatctatcgcttcggacccttttggttaaattgtttcagtctgcttttcccaaaagagcagtactaatgaaccttccttggtatagcttagaacatgagttgggacatttggacaatggacatttgggcagccaggagtggacaattggaaagcggtcattatgcagtgaatgaaatcttcctattcatagcatgctcacaaataatcagcaatacaaaaatgttatactaccgaaaataatttattcaggacagaaatatagaaaaataaatagacaaatattactaaacagaaatcaaattcagtaaacgattgtatcatcgcctgagtcattgagctacggtcccttagacaaggtacggtgaatcgtacacactgtttccgcgccatactccgccctcgtccacattgtccattttggatttcatcatatggccaattcgggaaaagaagaacacttggccagttttcatgttgcctaccaggcagccaaaaatgccaagctcaggattggcattaacgttgagcattggtttggcatttggacggacaaagtgattctacaagaaaatttaaaaaattaaatttaaaaataactgaatcgagtattttgattataaaattttttttgaaaatttaacggttttttgagtcgaaaatatggcaattgtcgtacttggttgcatttttttaaaaactcgtttcgattccatgaattttgagccaagctcacacccatgagattatttttttacaagaaaataactaatcctctggtttttttgctgctcaccttaacggtcgttgggcgcagcttttccgtgaggtagtaaaaatcgcgctcagcgggcgccatacttttcaatttctttaccatgtcctcattaaaatacattcctgttgggccacaatcattggccttcagcacataatcttgtggattttccatagctttctgcaatattttaattaagaaatatttaattaatagtgttccaaaaacataatcaaaataaataaatgacgcaaaatatcaaaaaggtgcaaaaaatgtgcaataaatgataggacaaatatatgataaaaaataaataatgttaaaatctttttttgtggagcgtctttttatttaaatttgaataaaaatttaaaaaatgtattgttcattttatttgtgaatttaaaaaattactaagaaaatcatttcgtgtaaaaacattttttctaaatataaacaagcagtttataaaaaaatcttcaaattttcaatttcaattttactttactttttaatttttaatattaaattaatattttttatttaattatgttttgcctgtcgtatgccttcctcaatgttttcgtcggcaccgattggccagccttttatttgcacttttcgaattgcttgggccatcccttcttccccgggtcccgtaaagaaacgctcaacaatgccaggcgttgaaagcaccttaaaaagcatttttagttgttaaatctatttgaactatatttgctcaaaattttaaaatggaacaaaattttagtaaaattttaaatccgatttaataacattttggtcacttccaggcatttttcagtgtcaagaaaaaagttatgtgccgttattgagacgaaaaatagccgggatcgggagccaaaagattgcagcattacgggtacggtgtttcgaggtgtgaaaatatatgtctcgatct

SEQ ID NO: 12196 - DNA, 2737 bp, Heterodera glycines
tgaaaaatgtatgtctccaatctccagaagtggatacttgcactcagaactggagagacttttctctagagtcgagattctccagccgcactaaaactaattgttgacttcttacctgttgcattctcttcgccatgagacacaaagaatgacatcggccgacttttcgtaaaaataatgatagtaattaaaaaatataaatgcccattttcacaatggctgttgaacgctcaaattcaacacaaagtgccaattctgcgtcggaaatttctcgaccaatgcgatcaaccagaacagccaccacatatttatcatcaaaaatcagtgatttgtcaacggggtcaatttttaaactaaattactaataaatttatatttgaaaaatggtgccattttaatgtggcttttttttggcttcgttaccgaccgactgaaagcctcttttagggtaatgaagcggtttttgatttttcttgatgttatttcctctaatgtgttcacaatttgtcgagactcaagcatcaaatgactgtatagacttccatgtacaaaaaggatcactgcttgatcatttccaaattgttgcctaaaattcgtattacagcataaaaccccgcactgtaatgaaaatttccttaaaaaggttcaattattcaaaaacacaacctatatattcgaacaaggccgtagccaaaagcaggaatttatagccgtttttggccaaaaatgtgaccagtttttaataataataattattattattttgtttgtttaattttcttaccacgaatagtacagtgtctcggcatacattttgtccgattggtccaccggtgtcaccgtctcggatgcgtcaaggcccgcatttgcgatcattcgccgatgaagttgcgagaagcgtgggcttgtcgcgaagctgccaactgcgcccgtgttcacttcaacctaaaaagaatattgtacaacattttatgtgtttcttaactaatccaagggaataaaatggaaaattaattaaagttttttagaaatactcaaaaaaatatacattttttttatgtttcaagtgcagaagatttcaaatttgaaaaatttaaaatcaaaaattttggaaaggaaaaaaattaaaaatttactttctagattgacaattttaaaatttcattttttttgatgtctcaaaaacatagatcgctttttaggttagttttttgatttttataaattttttaaaattttttatgcttatattacttttatattgaaaatttcctttacaaatattaataaatcatttaaatttaaaattctaaaatattaatattcaaaaataactaaatagaaaaaattgattcttagcagaatttcggaacccaaaagcacatttttatacaaaaatacttatttataataatcacctgcttaagcacaatttgtccgttgtcatcttcgcttgccatataatccttaattatatttgaaaaaaaaacattttgaattttacaaaatgccaaccgcgcgttggcaaaacattgtcacgggctgttgaaagccattattgtacaaatcgtcaagtcttctgataagactctggattatacttttacgctcactgttcagcacttcgcgatgtgcatctttcaaaaatgcgtaatcacttgaaatgcggaaatacagcaaaagcattgcctgaaattttaacaatgtatttcgataaaatttttttgagttttaagcaaaacaattttctgatttgccggtgtcctatcggaaccagggatggacgaaatttcgtttcgttttcgtttcgtcctacattttcggcactttttgagtttcgttttcgtgtttcgttttcgtctaccaaagttttttcgtttcgtgtttcgttttcgtcagagcaaaattggacgaaaaagacgaaatatttacacccgtaagaatgacttttttggtaagaaaaaataagatatttattgaagtattgtattaaatctgctaagaaattgtgtgtaaagtttttaaaattttcccggcggagcctatcggcgccaccggaccagggctggagcgcgaccgcgattcgcggcgtttttttttgcgcgatccgcggccgcggcaatttgaatgtgcggtgcgcggccgcggttttttttttgttgcgcggtgcgccgcgcattttttggttgtaaaatttttataaagaaaattttttgaaacgatgtcttttttgaatattcaaaatttaaatgaaattttttttgaaaacttgtattattttctcaaaaattcattttaaaattccaatttccccgtcagagctgacaaaaccttaatttttctttaaaaaaattggctctaaatcacaaaataggtcattttttacaaaactttaaccaaattgcactgaaattttcaaaatttttcccggcgtcgcctatcggcaccgccggatccaccccctcccatcagttcccaaaagtttttagaaaaatcgcgccgaaaaaagctgtctgaaaaacaaaaaatcatagggtttccatgaatggaactcctttgcaaatttaaacactgactcaccccctcccccattcagtcccttcccgaattttatatgcatcgggattttaattctgtaattttctataagaaaatttgctctaaatcacaaaatagttcattttttggtgaaaatctgtatcgctcaatggacaactccccgaaccctggtatggac

SEQ ID NO: 12197 - DNA, 1520 bp, Heterodera glycines
  unsure (1)..(1520): unsure at all n locations
ccgttggataggggtacaaaaatttgaaaaatcataaatgatttagaaaaaaaaaacaaaaaaatatattnaaagattttcagagaaactataaagntgagtctcatgtctggtactcaattacatgcagagatggcgcggattccgatttccgatttatggggttggaattccgattctcaaaagactggggccttggaacaccatccctgcttacatgcataggccaaaattaaattataaaatcatttcatataattatttatttttcaatgactttttttttttttgattaccgtctcgtccaaaattaacaaatttaatgcaattgccaccattcgctgctgcttctgctccgcccaccagcagattttgcagctgtacgcctttaaaaccacgtcaaatcgaatgtttttgtcctcggcccacactttttcgggaattattgcacataaatcgtccgtataagagcgtcattagcaccaatgtttttacttttacgtaaatgacccgtcaaatgaaacaatacaatatttgcaaaatttaatgcatttggtgcgctttttatgcgaaatttgacccgatagtccttgagttcgcattggccaccatcggcaactaaacaattaattaatactgcctttggtgctgggtcgttacttaaaaaccataataatgggcgttacttaaaaaaccatcataataagaaatcaatattcctttaattaattatatgattacaatttgaaattacatgagttaattgcaatttgatatttatcccttttatattttattgctttcctcaaattcacacatttttatttggaataaaatttatcgattgttttagctttatttttaaaaaactgcgatctgtgcagcttttgtgtgtcgttttcggctgccgtttttatctgacccaaaaaattttaaattgataaatttttattttttataccaaaaaaacaaatgctttcaaggtttgcgattgaccaacgctggccaatctgttgaaacatatactcattattaaaattttctagggtgatcgagatgtcttgatcgcccaacgtgagtgtttcattttttaatgacgtatttccggcaattaaatctaatgcatattttaatgacgtatttcaggcaattaaatcatgtaattagttgcgcaaatattgattatgatggctttttaagtaacgacatagcaccctgcctttgattaattacccattaattatttgacaatttattatttcaattaacatattaaatgaaataataattaaagaattggcagattataatctgaacccggcaatgggatgagctcgcgtttaaaaacagaagcagggtgccgttccaacatggtatattcagcagatttgtccgcatccaaaccaacaaaacaatttggccaaatctcgaatataaaaatttcaatcaaaaatcttttttcatcaaaaaattgtaactaatttacctttttatttggacattttccatcaaataaagcg

SEQ ID NO: 12198 - DNA, 1625 bp, Heterodera glycines
ttttttttgtttttcccattccaatttggcgtttaatctccgcattttcctttagcagttgcggatcccgtagctgttcgctacggttcggcgctgactcctccaacaattggcgctgcgtgctttgctgttgctcctccttggtaaattgggggccagtggtaaatgaacagcaatttgggcacgataactaagcccaaactggcgaaaaggcaagtgagcactgacaaattgtattgtattacaaaaattataatttatattttagatgaaaattcatttttgacgggaattcttttctgttaattggttaacaaataaacaaaaataatcggaaataaacaattaagggttgattataatacagggcttgcaagtgtgcttatttctaagatttgtgcttatttcagcgttacgtgcttattttgtacttatttttggatttgaaaataaaaaaaaatgcaaaatttgaatgacctatttgactatttttattgaagcgaatatttgaattaattcgttttttaaaagaattaagagattatttcattcttgagtgtaaaataaccaaaatttcagagaaaatctgttaaaaaatagtcaaaatgtctatttttcctcaaaattggctcaaaatctcaaaaattggtcatttttggtgaaaatattttaacaaattgcattcaagttttcgaaaattttcccgtcggcatctatcggcaccgccggacacccccccccccccccattcaccaaaagttttttggaaaaagcgcgccgtaaaaaaattttttcaattattttttcattttgaattaaattatcaaaatgctgattttgacgccaaatgatgattttcctattggccaatgctattttgaaaagtttcaattagcagccctggtttttaggctaataaaatattgtttcaagtcatttttcatgtttttattgcgtttccttcgcgctattattagttttcgaaaaaatcttatttttgcggtccgaatcttagtttttcacctattttgtcttattttgaaaaaaaacttgcgagccctgataattatttcgttttaaatataaatataattttttaattaataatattttattaataatccaagtccattcattgatgagtatttttacccgtgacagaaacaaagccgaagaaagggttttgctgattgcgcaggaaaaacgcaatgattggcccggtcaaaaggcacaaaacgccaacattacaaacggacaaaattgttgagcgaaggtcactcaaatagcggggcttcagctgccgcgtttcataggccaggaaaagaccaagcaacagaagaagtcccttgtggccgagaacaatgactaaaaaatattttaaaaaacatatataaatgtgtttaaaagtctcttaccggtccacatttcgtgccgattgctttggcacaattcgagaatcggcattagcatcacatcctcaaggcgcatgccaaccggcgggtccttaaattgtttatgcttttcaatttgcattctttaatttagcaataacaaaagacgcatttttttaaatttgccattttagcttaaatgttttcatgcattgaatataatattgaataaaa

SEQ ID NO: 12199 - DNA, 1585 bp, Heterodera glycines
tttcattgggtccaatccgacccaaaacacagtgataagcaaatcaaacgaaggccattgagccgatcacaatgtaaaaattgctcggatgaattggctaaacgggatttttcacaaaaatgagagcaaacattttttttttgaaattcaattcgccaaccaaaacaagcaaattaatgttggcatttcgtctgttcgttgcgctgccgccctcgaacaaattgccgtaggatgaatgctgcgaaattttcctcaacgcagcgctaatcatcggctgccgaccaacaaccgctgtgaacagagtgcgcacctggcacatcggaaaatatttacaaatattaaaatgaaacgcatagaaattttaaaaattaaaaaaatttactgaatcgccccatgggcttccgctcgctgtgatcgcttgtcccccgccggccccaacgagggctgtgctcaccgagttggcttggccaagagaagtggattcttcctgaaattgaaattttaaattatgattaatttttcaagacttttcggtttgaaagtggacaataaaatttattttcgttaaaatatttataaaattaaaaaactggtaagagtttagtcggaaaatacttaaaaaaatgaaaaatattctttttttccttgacttttattgataagaacatttcaacattgttacagaagggggacagttttttattccaattattaagacctcattgttcgggaaagttgttgccatttgtcgtcgtttctcagcgctgttcaatttgtgggccacccaaattttggcaaaaagtgcgccataagcaaaggtgaagccgatcattagcagaaaaacgcggaactatgaaaaaaagttatttgaaatttaaaaaaaaaatgggtttatacgtggcaaaatgcactgaacaagccgagattggaggagaagcgcagcaagggacgaccacggaaagaaacatcggtcggaaagccgagaaaaacgagggagaacaaacagaaaaaggagccgaccagcaaaatgcgattacaatggggctgagattggatgaaagctcttaataattaataaatgaaagcaattaaaatttgggaaggataggccaaaaaagaagcgcagaaaacatcatttcgaaagcaacaattcaagcaactcaaagcatgcccccatttcactatcatttgcatgtgtccacggctttaagcccttcaaattaccgtttttagagaaatttatttaagaagaaacattggcaaataattttctgatcagagcgtttgtttctggcttactgatcactttctgccgaatcaccgatcattttctgatctctaaagcataatttgctcatgttcgagttccctttcaaaatattcatttttgattcctctcggatcatttttctttagagataaccgatcactctctgatcgagttttatctctcaaatcagagcctcttctcatcgctcattctgctgggcattctccaacctttccccagatttcctcttttttcccgattctctgatcactgatcggtcggcctttcgatccgttcaaaatatgagttgttacc

SEQ ID NO: 12200 - DNA, 4166 bp, Heterodera glycines
  unsure (1)..(4166): unsure at all n locations
catgcactatttcgctgtattctttttatctttgtaaccgttcatgctcgagaaagagaaatagtgcgagacagacaatctcgagaaagagaaatagtgcgagacagacaatcttgagaaagagaaatagtgcgagacagacaatcttgagaaagagaaatagtgcgagacagacaatcttgagaaagagaaatagtgcgagacagacaatcttgagaaagagaaatagtgcgagacagacatggtcggagaaatagtgcgaaacagacaactcaagagaaagaaatagtgcgtaacgcgcttatttgtaaaaattagccataatttacaggaaaaaaacgcaacaaactcaaaaattggtcgaggattatttttatcatatcagcaaattcattaaacaataatcggccttaaataaataaaatatgtatgcttaagaaacaaaaatttaaaggcgattaaacaccaaaattttggtgagattttttttttgttaaattttagccaacaaaaatgtggaattcgtgattttttgccgagacaattcacaaaaatctataaattcgcattttcaaaaaaaagatattcaccaggatttccaattgtgagtttagtcttattttgaagttttttgagaggccaatgaggctatatttttcaaggctttctagtttttttgcgattgtcctgatttggagggtccaaatctgataaaataaaaatgttctgatttgtcagaaatgttctgattttggtgtagcgaccaaaatttgttctgatttcttaaacaaactcataattttaaaattttatggcctaatgtcactattttacaaaaaaaatataaaatttatggcaaaatttggtcattttttggacaaaaatctgttaacaaatcgtactaaaatcacacatttttcccggcggcacctatcggcgccgccgggtcccctgtcctccaaaatttttggaagaagggccccgcaaaaaaagcgtttttaaaagcgaaaaaaaagtcgtcgcttggcttttaattgcaaaattggcattttttggtgaaaatctgttaacaaatcagaacgaaattacaaaaaattttccggcggcgcctatcggcatcgccggaccctctcccctcgcccatttcccaaaagttttttggaaaaatgcgccgcaaaaaattcttaaaaatctgattttttgatcccgagtgcactgaaatttacgatttgttaatttcctcaccaaaatttttaaagatgatcatgggaggtgaaaaatataatatttaatacatttttgatcgaataaattgtaaaaataaaagatttgaagcaattttgcaaaatgttctgattttcgaccccaaaatctgattttttggacccgatgttctgattttgaaaatttttcgatccgaaccctgatataactcacaaaattttaaatttttcaaacaaaaactaagcaaaatgatagtaaatgaatggcggtgtttggggtacaaaattttggttggcaaatgagggagagaacactccgccgtcgcttctggttgtttgatatttgtctggtgaagtgggaatttgggaaaatatcctttctttctttctccacccccgccccgcgccacagcgcccacaataatttgctttaggggccatgtggcgaaatgacatcgtcagagcagcaaaaggagcagcgccaagcaaaatcaatcaatttagcagagagagagagagagtaaaacaattaattttgtatggggagcagagcagggtgaaaaagagtgcgaagaatgagagagcggcagcaggaaagcacattagtgtagataacttgtgggtaatgagaatgagagtggtaaaagattgtgtgtgagagcgcgagagacactaaagaaaggcgaaaagagcgcaaagaatgagagagcggcatggaagcgcattaaaaagagagtaggaatgtgtgggtaatttgtgggtaatgagaaggagcgaaagaaagattgtgtgtgtgagcagaacacgagagaaatcttttgtgggcagagagagcggaaagagagagaagctanagaaaaaagggggtaagagagtggaaaaagaaaggcgccaactgcagtggtgagagatgaagcagagaagaaaaagaaagggaatagtaanggaagaataaaagatggataaagaaggcaaaagagaaattaaaagggaaaagaaatagagaaaaagagttcattaaacaatgatgaaggacaaggcagtcatgcattaattaaatattaattagtgtttgagcaaatgttgccttttttgcagtaaattgcaaattattaaaatttttgatacttaaaaattaaaaaagaaattgctttttttctttcaatttggaaatcaccgaaaaatgtttacacaaatttttaagtattgaaaataagaaaatttttcaaattttgctggacgcttatagaaaaaatgacgtagaatggttcaaaaaagatgcgaaagctgaaacggatctggttacgggatttggattaaaaatatattttgccgaaaaacgggaaagaggatcaattactaaagttcatactttaattaacacataaccaaccacccacttgttgattaggcatcaggccgcgtgatcataaacggaatggaagaagtgagtaatatggcacaattgtcgatatgtgaatatgtgtgcaaattttaaatgccaatatctacaagaaaagaaggttttttatgtttaaaaattataatcttagtttaattattaattacttaggagcagataaaaaatttaattgaaattaatggataaaaatgtttttttaatctattatttgacttggaaccggattttagacaaaatccagcaaaatccagcttgtagaaaaatgatctctgatctggaacgaggaaaaacccaaggaaaaacccaatcctgtatccacaagctatctcaaaaatcctcagacccggtcaaggtttttcaaaatcccgtactctaatacctatgtatataaatagttaacaactataatttttactagtattcataagaaaatttcaagatacacctaaatatcaatggtgaatcccgaatctatattttttgcgtatttgccttcgcttttttgtacaagaatggatttttttaattttgcgagttaatatggtgctgggacgttagtcaaaaaccattaaaatgggcgttagtcaaaaaccattaatgggcgttagtcaaaagacattaaaatgggcgttagtcaaaaaccattaaaatggacgttagtcaaaaaaaaaaaaatttcaaatggaaaatttttgacagagaaaattattcataatttcgcccccaaaatganccaaatttaaatttcggtagccccaattcgaaaagtatccaagaaataattaattaaattgagaaatcggattgagaaagaaaaaaaaaattatgatccaaaaattgtgcggcgatttttcaactaattgcctaacccaaaattactttctaatattcactgactgagactgatcatttttccaatggaagaatttttttgtttgtttgttttgatcacataattatgttaattgcttttgatgggaaatttattttctgttttttggatgggaaaaatgaacacaaattttatgcaaaaattaccaaaaaaagaaaaagaaaaattcttttaattcaacagcagcaacactcagcagatggaggaggagaaatgacagtcaaaaaatatgttatcagcacagaataaattagtatggatttttgaaaaaataaataaaaaacgtaaatatttatcaaaaaatttttttgaaaatttataccaaattagcaaaaaaaaatttttttttgagatgtatataaaacgtatcataattatgggttctttttagcatttattaatggattttgagtaagctgatttttgtatccaaactttgatccttgaatactttttacaatagacctaaaaatttttatttttattttaatcgatctaaaatatttaaagaattttctattccgaattccgataaaattcaatgcaaaacgaatatttttaggtggaatttatatgatttaaaattaattgcttaacaaattaagccactctaaaaaaatgctgaatt

SEQ ID NO: 12201 - DNA, 1766 bp, Heterodera glycines
  unsure (1)..(1766): unsure at all n locations
aaatttattancggcacnntttttcgggtagaaaatacacatttcgcaaaaagtttcataaaaaattttccaaaacatttctaggttgacactgaatctcagaggcatggtcgaatcgggtccggaattaggtaaatccgagttcagattcgtgaccagcgccctcgaaaagccgtggaaactgattttgagaccaaatcaaaaaaaaattaaatagaaatccttattcctaagaattgccaaaaatcccttctaattttttgcgttttttatgcctttttgattatttttcgtgacttaaattcccagccctaaacattagttgagcaaaatgctggcttaattaaatttccaagtctttctattatttgtattaagattattttaagggtttcaccgttctaaaaggttaggagtccccattttgtccattttccgcattttgaaccgggccaaaaacaattcaataggcttaaacttttcaattgttattaaaagtatgttgtattcgaacaaaagaaacaacaaatcaaaaaatgagagcatcaaatctgttccaattggtgagatcgtcgttgtcggaatcaccgctgtcgaaaaggtgctatgtgaattcgacagagattgatttcgacagtacagataaatttttttaaaacaagagtgtattaatattggagccctaaaaatgaagtgatatgagcacattcaaagataaattaaaggattacgattttcaaaatcttcgacggggcttatggatcgagattttgctctccatgtcacccattcatttataatttttaccattattttaatatcaagttaactctttatttacaaatcgtagccctacattcaaaagaaaattcgggagtaaatctacggaaattttcccaaccccttatgaatttttttcgaaaattttaacaaacgattttcaacgtattttgtggtgtcccggatcaccatgaaggagtgacctgatcaagtaggttaaaagaattttttgatgaggatcaaaagataagcaagcatgaattatctcagatttttaaatcaactataaggtggtttttcatgtttgagtcaggattttccgcctcttttttgagcgaagtctgatcaggcgactaattcacgagaatgataaagtagattgaaatattgtagtgtgctaaattttcagcggaatttgaaatttaacaaatttttaatcatcttgaatcagacttttttgcaccactgtatcacttcattttaatacattcttgttttaaaaaatttctctactgtcgaaattaatctctgtcgaattgacaatttttcggatactgtcgaatcaatcattgtcgaattcactcgttgtcgaaatcacgcgcagacagtgaaaaaagcgagcatggtcgacgaaaagtaacagaatcaatcacaaattaaacattatgccaaaataccttttcaaaagaaaatgaacaaaaatgaagaattttttctagatcatagaccggtcaaaaattgccggttccggaatccgtgccagttgctggttccgtctctaaaaattagtaaaacggaaagtccgactcatttttttatcccttaagaaaagataaaaaataacaaattattattaaagattttatttctttcaatgtgcccttgtcttctttttttcgttttgttcatcgtttccttgttcccttttaatttcgggtcaaaattttacgtctgacaaatctcgacatttttgtttcgtatttcgg

SEQ ID NO: 12202 - DNA, 1822 bp, Heterodera glycines
  unsure (1)..(1822): unsure at all n locations
ggtcgcctgtgaacaaattggtgctccaaatttccgctgttttcagccataattttcaaaaaaaatttttttctttttggaatttttattccaccaattttttattttttggggtttggagaccactcaaacccaaaattttcaaggcattcgtgtgttggacacgcgccacgaggccaccgccgtgtttgccgcagacgcggccgctcgcctgcgccaggacattggggtggccgcggtcaccgccgggccgggtcagaaaataggagttaaaataacaaaaattttgtaaaaataaacgaaattttctactctaaaattgtaaaaaagggttctttgtccaccacagttctttaaaatccctgaagaatttattccacggagaccaaagggagaggagatggaaggccgaggcatttttttttgctacgcctcaagaaattttccagtattttttttcaaagatcatactagtgtaaattatttaactaattttgggtccaagatggttttttgtgtcaaattttgatgaaatcaaagagaaacgcgaaaagattgtaggaaattgtttgaaattaaaaaaaaatttttttttgccaatttggggaaaattgtccggcctatagggcattttgtcagaaaaattttgccaaaattaaaaaaaatacatgaaaattctgctaggcatcaccaacacagtgaccgcgttgaaaaatgcccaaatggccgagtcgccggtgcttttgttgggcggcgcgtcgccttcccttttgaaggggcgtggggctttgcaagtaaacaatttttaattttgtaaaaaactaagtatttcgataagaccgccgcaaaaaaatcccgactttttttggaaattgccaaattttcaaaaaaaaaccaaatgattttctaaaaaattcataaaaaaggtttgttaaatgagaggggaagggtccacccgtaaaaaatttcaaaaaaatctaacaatcactaaactttttgccacaaaaagtgccaaccgcttttttcccaccaggacattgatcaacagacgctggtccgttcgttgtgcaaattctctgcccgagtcacctgtgtccggaacattgtgccgaccattcggtgccaaaaaaaatttaattattttttttcttttttttgtgccagaaatgccattgccaccgccaaatcgggcacgcctggtcccgtgtttgttgaactgccaattgacgttctgtacccgtacaaatcggtggagcgtgaagctgggctcagcaacgcgcccaaaaaggggctggtcaaggtgagcggcgcgcatttaatgcaattttcattttttgatttttttcgacgtgccaacaaaaaatacattaaatttttttgtatgcttttgctggcctagtgctaacgcattgattacagttaaaaactgaaaaatccaacggcaaaaaaaaaaaattttttttttttgaaaaattttcaatgaaaaattgtaaaaaatgaactttggtattttgaacagatttgttaaaaaggaaacaaatttccgcacataaacttttacaaaaaaaaagatttttttgcattcagaccctgctcgacgcctatgtccgcacacacattgccaacacgttcagcgacgcgtggcaaccggaacagccgttgttgccgctgccagtgcgcgttccgcgccccaccacggcacaaattgaacaattggccaacctggtgagcagcgccagggctggcatgcgccggatgataattccgttttttgngccctccgatttcgaattccgagaatttttagaggcatatatgaaaa

SEQ ID NO: 12203 - DNA, 2474 bp, Heterodera glycines
aaatatcccatataagaaaaagttctttttcttatttagtaatttcgccaaatttattaatggtaataagttactatttctcagaaaaatggggagtaacaaataatttaatgcggccactaaaagattcactaaaaccaaactgttcactcgtattcttaatatttatgtgcctcgaaaaaagcagtgttttatatttagctgagttaattattaccaatagacttaatttttcaaatattcataatattcattaatatatttcctttaaatttcatatttaaggaaattttagtatagcgaaaagctttggtatagcaccgtcactaagatagttaatctttaattcaatgcaattctttggctaacttgtccccccccccccttcgctaacaaattgcacacgaattttcaaaattttttccccggcggcgccttcggtttccgtttggccaagttttttgagcgcttccagtctcatataaattcctgggttcctaggaattccggttccaaattccctacattttccattttgcatatttatgccgtaaaaacccaaaaaattcactaccatagtaaaaaatttttaattttttttttgtaaataaaattaactgatattttattgttgtagctgagctccgccgaacgccctcttctgttggtcggcagccaggcaatggcaccgccggtgaaagccgacgaattggcacaaactgtcgaggtgtcggaaaaaattgaaaatttttaagaatttccattttctagtcactcggtgttccggcgtaccttggcggaatggcacgcggtttgttgggcgcctactcggccattcaaatgcgtcaggagcgcaagacggcgttgcgcgaggcggacttggtcatcctggcaggtgaagcattgggatggctaaaaaaaatttggaatatagacggctcgaaaaacattggagattggaattccgacggcccaaaaaaaattggcaaaaaaaaaaatcgcggaggggcggaacccgatgacctctcccctcatggttctgttcttgcacagcattttatcccgggcattaaaaaaaattttcaaacagcaattttcaagagaaaaatttacaggtgccgtgtgcgactttcgactcagctatggccgtgtgctgtcgccaaggtgcaaagtgttcaccatcaaccggcacagggatacaatgctcaaagtgtgtgctgtggtgagcaggagagggactagggagctgcttgtccgtccctgcaaaaattttatatagattttcaaacttataaaattttatgaaataaacctgaacaaaaattgaaaatgttccagcatttttagaaattttatgaagaattacttaaaaaaaaacattacaaaaatttgcacaaatatccccggaaaattgtttacaaattatattttttctggaaatttctaacatagtaaatttaaaaaaaaaaattttttcattctgaaaacacccttgggctagggcgacggaattctattctattttttttgtcaacataacattcaatgtcattcgtctggttgtgttgcagaaccacggcgtgttctggcacagtgccatggccatccaagcggacgtcggctccacgctcgtacaactccaccaacggatggccagcaactccttcgccgttgacggccatcaacgctgggacgcctggctgaacgcgttgcgctcgcgcgaacgcgacacggacacgcgcaacggcgccaaagcggcggaacggacagcggacggacggctgaacccgttgcgactgttgcgcatgctgaacgaggtgttgcccgacaacaccattctggtcgcggatggtaagaaccatgattattatgagagaaaaataccatccccccctccgaaaaattaaaaaatttctcgaaaaatttatctgcgattttttagaaaaacttaataattcgtcataaaattttgaaattctagaaaaatttttctaggattttttcttgaaaatgttcttttgcaaattaaaaaatatcgctgggaaatggagggggcgagggggtagacgtgaaaaaaaattcaacaatttttttaaggagttgtaaaaaatttttcgaattttcacaaattttcccaaaaaatcgcaaaattttttgattttttttttggaaaatttgacaattgaaaaaattaattgccttctgtcatgtcaaatcacgttttatttatgttttaaaaataaatttttgccaaaaaaggtggtgattttgttggcaccgccgcgtacactgtgctgccgcgcggcccgctccaatggttggacccgggcgcgttcggcacgctcggctgcggcgccgggttcgcgcttggcgccaaggcggtccacacctgactgtccggtgctcattctgtacggggccggtgcgagcgggtacgttagcaaatggggatggatggataatttgggctgacc

SEQ ID NO: 12204 - DNA, 839 bp, Heterodera glycines
  unsure (1)..(839): unsure at all n locations
attatcatcatccactccncattttggctaaaatattaattaatacgctttgatttgcgctcccaactgctgtttaacgaaacggccgaggctgggaaggttttttttactttttacgaactgacatttcgccaaaaaacattttataattaattttaaacacgtgataacccgatcaaaatcaaaaatcaatcaaaaattcttaaaaagatatcccttacaattagcacaactttaatcaaacagttaaagaaattatcgaatctttgccataagaatactaatacaaaagataaaaggaattatcaaattcattaaatttattcgataaattttataaaagacaataattaatgttttgaaaatgagatcaatttgcgattttggatctgataacaagggaaggtgcggtacccgatcggtggacaaattatgggggagggaaagggcgcgaatttgacagaggtaaacgaagcggcgcgccgtgttggccattcaatggcatccgcaagaatccacgcgcatatccgcataagtcttcacgacaatcacattgttaatgtccttgtaaaggatggaaatggcactcatctgaagcgagaaaggaagaacttctaacatgttttgcgcgggaatgacctgaacgggcacgcaactcggggccgacacggagtgggggtcaattgagtggatgagcgactggacgatggcatggttggtagtgttcagtttggccggcaatggatgggcacaacggccacggcattggtaggcttcgtagccggctaaatgtgattgagtttttcatgaaagtgccaaaaaaggggagggctttcgag

SEQ ID NO: 12205 - DNA, 1731 bp, Heterodera glycines
catgcgtcgtaacatcataatgtcgaattgtttccacctccggattccccctttgctttccatagagtgcccaaatgttcgatggcactttctccgtcttcttttcgccgtaattagtgacactaattaatgtgtcgagtccaaatttgcgtagaaatgcccgacgcaacaaaaggcgttcctccaaattcaatgtgccgttgggaaatgaaactgtcgtcgtcgttttcactgtttgtttcggctgaatgtgtgccttttggctgctcattgcgagtggactcttcagcaaaagcaaaagggcaattattgtgcaaaatgttctcttcgattctttccccatttgatgattatttctcggcacaattccatggcatttcgtacaaaaacaaaaaataggaacgaaatggccgaacattggcacagacagattcgaattatgtagctgaaaaatgattggataataaggaaattttgctgactgatttattggccaaaaatatgaaagtggacattttgggtgggaatgattgtccaaatggagaggtaataatttaagttggttggttgccggggttgtccggaaagagacaaattcttaagttcggtcgctccatccaaaagtcgccccttttgaggtccctcccccattattaattggaccctaagggttttgtctcagctttgccagcagaataaaaaacagacccctttctgctgccggtcaaaggccgacatgctcaatttgagagtcggtgacaaactgccaaaagagggacgaaaatggggagagaaacgggggaaaagaggggggggagggaatgagtgaagcgtaaaataatattatgatgacatttatgacatcaattgggagagcagtgaatgtccgaggcccttcagagagaccgcctactgaactttccctgcggcaaagaacagagatcaaagggagaccgccgaagcgaaattcgatacgaaacagtgaatttgtggtcagcagaaagtgcgggagggcataagggaattttaaggaaataaaatggatgggcggaggatgttcttctgatgttttggtcattttattttcaggggctgacattttaatgaaaaatgaaaaaatgtaaaaaaataaataaaaaaggacaagcaattattacttttaaatgttctcaatgatcaatgccccgccggtccatccaaacgatcgcttttaacgaaatgcgctttaaaccaagggaatccaaatggttaaatccccgtcgacatttaaaatgtgtaaaagttggaggagacggcgcctgtgacagtttgcttcaacgatcaaaaagcggaaacgggaggagactgatcgacgatcagcagcaaatggagggaggggggggggggaggaaaagcgtgggaatggaagcaaagggaagggtggagggagggaggggatggcaatgcgaatgaatgggcgggcattttgagttgatcaaatgcaccccccccccccccgggggggggggaaggccaatgatccacgaattgcacttccaatgcttcgctgttgggtgccatcactcaaaacattatggaaaatgccctatgagccatcaaaatatagttgcctcgtctcattaacaaatcaaatattgcgcttccctccatccatcgccgattaatgccgaatttgacgaccgaccaaatcattcattcattcccaccaaacaaacactttctcactatttc

SEQ ID NO: 12206 - DNA, 1608 bp, Heterodera glycines
  unsure (1)..(1608): unsure at all n locations
cccattctccgacccttcccaaacccatccaaggacatttgtcttctcccgcgtctcctcaatcttcaactttatttgtccactgaaattcgaatcccttccaccgcaatgagttcattttcatttccgtgggcgacttttctgtttttctccctaatttcttgcctaatttcgctgacagaggccaacccgaagtttctctgtgagttcgccttcttcatctgatcattttttgtcggactttcttctctccctttttccattaatttcccccattttttggtcattctttccctccccccttttttcagtgtcctgcaaagtaatcgacggcatttgccaaaatgacgaactttgcttggaagaaatgggcattcgtttccccgactgttatttggagcgcaaaattggttaataatttcccaacagatgatccttccttggtaaattttcaatctaagattttctccaaccccaaaaaagcgcactaaaatccacgccattcactgaaggggcaaatggaccacaacgatttctgaaaaggactccagcgatgaaactgatgaaggtgctaataagggggaaagtgaacggcataatgtaattaatgccaataaaggtgctaatgatgaaagatcggattccggtgggtcggagatgagcggagaatgccaaacgaataaaagtgaggatgagacgagcaaagacaaacaaataataatcagaaattgccacctcaaacagtccattcattctgtgcaaaaagacatttagaggcgaatgtttaataaatggaagaatcaatcggcctccgtcgcttcgttggccgtccgtccccctccgatcaatgctttttctccctccgggggatttacgtctgacaggccgagtcccaacggaatcggcttccgcccagaggccaccatttcgacactcctttgggaccatttgtaccgctctttccgtgtccatcgattgaccactccatcagcgagcaatctgatgattttcttgaaaaaaacagttatacaattcgccatcccaaacaaaagattcccatttgtgccgtctacttcgcccttctcggggacgaccctcatggcttggatgggggtgtacccggcgggcgtccctcgtatcccttgcctaccttttccatgtttcggtacggatgttttctccactcggcgtgaagatggccaggactgttggcatagaaaggcagtggctctgccttcttcaacgggaaacggccttcgccgtaatattcgtccaatttcattcgctaaaagggcatcgattgtttttggcattttgtctccttagcttttcaaatccgtaaccgctgttcacctctttcgtgtcaacttcgtcgtccgctttgaccggtgcggtcagtggcgaggcgacaattcgcggaaagaattgccgattgggggagagttcgaccacgtgaagtcgggtgcgttcggccaattgctggtgcgtctcctggttgagcaggccggcgacgaaggcgtaggtcaaagcgatgtaattggtggtgctgcctcgcactttggcgtggaggtctttgatgcccanaaagctgaaaaagcaccgctaaat

SEQ ID NO: 12207 - DNA, 1637 bp, Heterodera glycines
  unsure (1)..(1637): unsure at all n locations
atttaagaaaaagagagagagagagaggaggagaattgacaactaagaaaatgaaaatctcttcgtttctggcccaatttatgtgcattgtccaacccccctccaatcaacgtccttttttctttcttcccactagaaatgccacagttctccacgtatgccacgccacgctttcggcctgcgcaaggcgctcgcgcaatcattcttctgccatctcttctcatcctccatcccgccggggttcagccgcctctcatccaactcacccccnccccccccgcaggggcctagcttttgccaagctcccgaatttatgccatggccatcatattattatagcgtatcatacatatcacatgcttggctgttggcaaaatgaaatggccgccttgaaagggctaattaattgtaaataaaaaaaaacgtaaaattatgcaaaattctcggcgaatttaataattttttgagtttcaattagagatccagtactactgggccggacccagatacacaaatttttattgacccgtagcccgtgcccctatcatagttttcgaccggtacgggttttatggacaacgggttatttcgccagaaagtctgtgtaccccgtatagatgatatgtccagcgtcagtttattgtaaaagttcaaatttattcctttctttaaaaacgttttccaatcctttaaaaaaacgagagattttaataattaaaaaaattatctgtaaaatatttatccaacaattaacacgcaaaaaattttgacacatacaaacattggctctgctgctgatgttccaaccaaacaaatcaatgaatgagcaaaaaccgaacaaaaaaaagcacgcacaataccaatgaaaaaaacacatgccaattcatagggcaataaaaaatttctgttttttccttgttcaatgcaattaccaataattaagcgggagttagggctaggagaggggtcacttctgtccgtctccaccctgatcatcatcatgttgatcaccaccatcatcatccgtcgacgaatttgactgcaacaaatcgtcgtcgtcgtcgtccaccatgcccgcctcgtcttggaacagttcagcatcaaaaacgacaactttgcccgtcgtcgtcgttgttgctgatgatgattgtacattctgggctcctcccgtcgctgcgtcatcctccgcctcgtcgtccagcttcaagtcctggaaggtccgctcgtcaatttcgaacgcgtgcatttgttcatcctgcgatgcaaaaaaaaaggaggaaatgaggcggttaaaattagagaccggacaagagggtcggtcggtcggtttcggttaaaaaccaaaaaaaaccgaaaccgaaaaaaaccgaagaaaaattttcggtataccgtttcggtttcggtttttttgaatttttttatcttttcccaaaaaaaacaataaaccatttttatcaatagaaaaagcgaaagatcacctctgagtaaaattgtagagctatttttttgggggccggcggtgccgataggcgccgccggggaaaatttttcagaatttttaatgaattttgttaagaaaatagccagtttttcagaaattttcctctttttcccttagctttcgacctccccccctt

SEQ ID NO: 12208 - DNA, 3116 bp, Heterodera glycines
  unsure (1)..(3116): unsure at all n locations
ctattcgggctttagtagtgcaatttgatttaatacctaacccaacgccagatcaagtgattaatcacttaagggccctacaatacgattagcatctaatgggtttgatcagtggaattagctcatgccaattattttgtagaattgtaaaaataggctgttgttggggcttcggcaagcctaataaaaaaaaataaattaaaatatacataattatttgtttttgcttttttaaaaatttttggcttatattttttatttgttgatgtgtgcttttttagttttgtgtgtctgcggtagggccgaaacacactttttttacattttttgttttcttttggaagagccgcactgacgaggcccactcttccattagattttagaaaaaaatgtttccattaattttttttttctcagaaattgtccgcaaatgtccgtccgcaaatgtccgtccgcaagtgtccgtccgcaaatgtccgtaaggctttctaacattttaaattcctgagaccctaagcgttcgtcgacatttacggccccgacatttgcgcctttgtccaaaatcgggctcaaacttaagctttttcaatccctgatcgcctaaaagctttaacaaagcgatagaaagtgcttgtatccgatcatttgatctccaatgaatttttgaaaaaataataaaattttcaaacaacagaattaaattttctaataaactagaatacagtgctttcttaatttaaatgctgtttaagctatcagggcttgaaaaaacacaactttgaatccaattttggacatagccgcaaatgtctggaccgcaaaagtcgggccgcaaatgtcggggctccgtgccactcccgtttttttctataaaaaattttttatgttcgtgaaaatgatccaaaattttctgctcgaatttgtatagaatgagcgttatggtttgttaaaatcggaaaattgggtaaattttggatatttttaaagaaatacccaattaaaatttaaaaaaaaatccattttacctccgtttcaatgaattcttccagcgtgattcgggtcagccgattctgctcctccattttctttttgtccttcttcagaatgtagccgggaggcagggcatgcctaagcaaaattttgcggaatttttaaaaatttccgcaaaaaaaacggacctgtagatgcatgtgtcgccgtttgggcattcccaaaaccatccgtatttgctgttctccacttaaattttttcagcaattagagtccgaaattttgaaaaagtcgacgggatagggaaaatcccggcgatcccatccgggttctagtcgtaaaccacaaaaaaaaatcaacaaaaattgcgaaacaaattccgaatctcattaaaattcgagttgtttttcaataaaaaaaaactttagcattttttttggaaaaaatntagaaaaaaaatcgcaaggaaatttttcgtggtagtatggcgcccagtagacccatatcgtgcaaaaattggcaaattttttgtttaaattttaaaaaaccccaatcctcctcctcgttcgcctccctcacctgcttcgaggaaatatttgcagagaatgtctgtttggttgggcctcttccggtccttttcaccatgctttttctccgcaacatcttgcagcgttttttcgtcccaattttcattggtctctaaaaatttttcaaggcctaagcgttgaaaaatggaaactatttgaaacaaaaaaagtttgatgagcatcgaccgatattcagttaataaaattttcgaatttagaccccctcaaataaaaaaaattccgcaataaaaaaaaacaaaccgtcttttttatcgcccaaatccctgctgtccacgtacaaattctttttcattgtcttttgctgtatggacaggtcatggctgaacttgcatttgttgctggaaattgggggaaaaataataaaaaaatttgtaagttacacaacaaaaaaaaattcagattttttgagtctgagttagggatttagtttttttaggctaagaaaatgcctaaacattccgaaaagtgacgattagattaaaaaaaaacgtttgtagaaattaccccttggtgcaaaggccttgcttaaagaaaacgcagagaaccgacttggggtcgacatctaaaagcaaaaaccaaataaaatgaaccaaccgatacatttttacgaaaaatgtcgcaaaaaaaaaataaaatgggcaaatggaggcaaagactggtcccaaattttattttaatttcaagaaaactattttaggggtaatccaactaagcagctgcattcattttgcccattttcgaaccccgaacccggtttcgaacatttttcggaaaaatttaaaattcttggcaatattttgcaaaaaaaatgaaaattttaattcgaaaaatgtccgaatccgagttcatccgtgtccgagttcgaaattgagccaaaagaaggcattgattcttgcctcgcgcctcagattctacccatagaaacaatttcctaaaataaaaaaaataccgagaccaatgttcttcaaccattgccaacaaatttggaatgcatttcgcgcccccaaaatattccatcaaatccgtaatccgtaatggtctgtctgtccttgctttatttgtgtgtgctctcaagtacctgcgctcactttttgctgtgttgcttgcacaactggtttgaaaattttgtttatgtctttcaggtcttcatcctcttgcttcttcttcggcgtgaactgcttggagggcgcgcccataatctgagaaattttcgtgttttttttaatttttcataatttttgagtacatttttctccatttgtgccctcaattttttgtttttcatgccaaatgtgcggtcttcagggactttctgttttttcttctcctccgcctttttgcttgttttaggggcattttttggaggcatttttatccgcaaaaaatttctgatggaattaggaaatatctaaaaatcattagttatatgtatgtatacatatagggtctctatagatagcgataaaccaaagggaaaagggacagggcctccctttgatttgaaggcacaaaaaactt

SEQ ID NO: 12209 - DNA, 4996 bp, Heterodera glycines
  unsure (1)..(4996): unsure at all n locations
tcagatggagggctgtgtgtcggcactgtaccaattcattggcatcggcggactccgtcccaacactgtgtttctgaacttcccgcgcatgggcgactcggacgaccaccacaaggagcagcgcattttcgcgggtccatttcattttaaattaataattaattattaattaaatttcattcaaattcgaattattccatttttaatttggcattttgtccccctccccttttagaccaattgtgttgcggagcgcagaacgataattgcatggttgtggtgaagggcatcaccgactttccccgtcccaatgaccgactccgcgggcacattgacatttggttggtcatcaaattaaaatatctaaattatttcaaaattaatttcataaattaccataattattgaacacttttaattatatatttagatttattaaatttatatactcaatttttttgcttttaatattattaattaaaaaataataatttaattatatttaatgaatatgaaaaatattttagtttgcataatattaattgttgtctaattatttttaaatttttgttttacactctcaaatgaataattaatatttttgcatatttttaaaaattaatcccctaattaatttttcgaatttcatttatcccatttaattgttccttaattcaataatctttttcatttttttttttttgcctttctcaggtggattgtacaagatggtggcattctgatgctgatcgcttatttgttacagcagcacaaagtgtggaaaggctgcaaattgaggtgggaaagtgaagacaaaatattaaatattattttatctttttcaaaattaattttaaatatatttaaatcagaatttacgtgatcgctcaagagggggagcaaaatgaagagatgaaacatcgcctgcaacgtcacatttacatgcttcgcattgatgccacggtgggttaattagcgcactaaaaggcgtacaattaatatgggattaagccccaatccaatgcgatgaattgcgaatttttgaaaattactcncctgatgagagtgttgctccccgatattttttcaatttatcccagccacccccgacaaatttttcgagaatttcatcccctatcccccacttttctctccccgccgaggatcggggaatttaaatcgtaaataataatttaactgattttttaaattaattaattagcagataaaattgccttgtttaatcactcgtcgctaattaccttttaatgaatgcatttctttctttgcaaggtgttcattgtgaatatgattgagcccgaaggtgttgaggacgacgcggtgcagaagacgctgaacatggagcagcggacacggacactaatgaaggcaattaacaaattcaaaattgagtttttaatccattagtgagtcttcagaaaaatttgtccgccctctcaaatgggggactgtccaacggcggcttcacgcccgatgaacgcttccgaagtggcacaaagtgagagaagcaagaaatttatataaactattatttttaaatattttaggctatcatatttcctaaaccccttaaattagaccccccctagaaataaagcccaccttttgagggcaaattgaaaaataaaaccctcggaggctctattttaggaaatacgatattttgattaaaatctacattgggcaaaatggtctatcaatttcaattaaattttattttattattttggaagaaaaaagtttaattatcaacgaaaaaatgcttgtgagcttttctttttaatagtccgctttatgactgactaattttggttttattaattgaaattaatttaaaatttaatttctttattttttcacagttcgcccaatggaaatacgttggccgtgcccaataccgtatgccgaccgccacgagacagtgtcatcgagaccagctttatacagtaagcttttgaatttcgggaataatttatttgcttttttagaaaaactttccaagaagaaaacaacgacactgtaagcagtaatgagataagcatcaaggacattgacgacacgaaggtggagggaggaactaattaaatcaaaacaattaaaaaacctaattatcagattaattagatatttaaatcgtttcttataatgctaattaatgaatcaaaattttatttgttcattaatttaatatatcgcacttcaatttatttaaaaatatttattttttttcaagaaagctaaatatttttttatgaaaaattggttaataattaaaaagaaatcttttcaaatcgctctatttctatattattaccataaaattaataaaaagaataattattatttctcaattgtttttaggttcaaaaaatgaatgccgccgtccgactgaaccaagtcaattttttaataatcttttttcacatttcaaccaatttcgctcaggttattctcgagtattcttcggagagtcaattggtgcttttgtcgttgccaaaaccgcccaaatccatccaggccctcgtcgaaaattatttgtcatatgtaagaaagccaaaattttggttttaaaattccaaatttttcaggtcgaagccctcacggaaggcttgccacgcgtgttgctgatcggagggtcgggcaaagaagtgatcacggcagattcataagggcggcacacccggcaaaagcccatccatccgaccgattttttggcacttaattttttgaaatgcacacatttaaatttaccatttcccaccatttttatgtgtgttattattttattttgtatattattttctatttttgtcttaaatttaatactcaaaagttcattttcatttaatttaaaaattataactctatgcttttcnactcttaatctttttatttggacaattctaatttcaatttttcggaacgtttatctccgaataaatttttttttgctagtagtttctgtgtttctgaaaattgtcaaaactgttacaaattcttaactgtatttttttgatcaatttcaatttatgaataagaaaattaagaatgcattttgaacattttttggacaatttgttaatttaatttgaaaaaaatgcttgaaatggtcacaaataaaattgtacgagtgaataaaattggcataaaattgccaaaaaccagttcatttattttccataattttgttgtgggaatcgcggattttgaggtggagacctaaaaattaaattaaaattaaaatcatttaaaaataattattattttaaatatatataaatttacggctggtatgggaagaaaagatgaggcatcggtggaccaggaggctaaaaatttaattaattaacaaacgaaatttaaaactattatttttattaaaaatataaattaataattaaaattaataaaaataataatttaaattaatttaaagtgttaattaagaaacattaattataaattaattatacaaatagaatgtttaataaattgcttttcaccattaatttgttcccctcacagccaacaaattggccaatgctttgtgagctgactgttcgtgccacgcgaacatcgtacaaaaatgctgaaaacatttgttaattatttgtgctaattgccctattaatgcggaaaagaaagagcttttggaaatcaagcccaattttggcataaaagttcatttttattttttattaggttcaaaattgtaaattttcattgaaattgagggcacaatatgcaaaatcgatcggttattgtttgtggcagcaaattaccgtaatcattggtcagcatatggtaggtggtaaaatcgggcgtggcggcaaaaccggcgcgcaaattttggggcagtccggggaaaaattcggacatgcttccgaactggaatttttactcattaattaattaattgcgtaactaatgattctaatcaatcaattaattggaatgaattaattaactaattaccaaatgcggcgtgttgctctccacgttgtaagtggcgaacacatcgtcctgaatttcaattttagaacatttattttttatttgtttttgccatactttgaacaaaattacgcttccattgacaatcggaaaagcgccctcggggtagaaaagaattcggctgtgcaattcgcgggggtaacggtggtcacgcctaaaaattaaatacaaataaaacattttgaaatatttaaataattaaaattatttattttagaaatgatattcgaacatatgatttttcttttaatgatataaatgagtttaaatagcggaattggaagtgatctgagtcccatttggacttccaaaattctcattaggattatttttcgaaaattgtcgaataaaaatttattttgaattcgttaatcccaaccccggtccgtttttattctaacctcgaaaagaagggcaaatgttcgagattctcgggtgataattagtcatgactcgagaaagcatctcagtcctttttcttttcgaataatttaatgaaatcaaaaattgtctcacgtgaattgggccgttttctgatcaaactcatagccgaacagcatgcgcgatttgaccagcactgtcagtcgaccggatgaaaatgcgacgtcgaccttttcaggaccgtccgggaaaaactggggaaaattttcaaaaacttcaaaaaaatcgcattattaggagggacacctcgctgattttgtaggggcctccgaccaattttcctctgctcaaatgccatgcgtaaccgtccttgaagaggaacaaagtctcggaattaactgaaaaaagcaaaattggggggggggcattaattttatttaaaatataattaatttttatttaaaatataatttaaatagtaattttcccccattttttaccattcgctgccgttgtgatggagtgagggcatttttcagcttcttttcctgctgctgtcgtagctccttcgccgccgtat

SEQ ID NO: 12210 - DNA, 2287 bp, Heterodera glycines
  unsure (1)..(2287): unsure at all n locations
agggatgttgttcactttaaacatcaacggtcggtcatttgtcgccactttcgcaaaaccatgcaattttcatgccattgttaggctttttgattcgacagcgtttaaacggcgatgtggaaatcttctgccggcctcgccaaatcatttgttcgcctgaactcagcaccgtccacctgcgcaccgccaacgttgagatggaagttcaggtggtctctccctttgctttattttcctttcatccgatggtttctttccttttcagaccgacaaaaaggcctatgtgaagtacgggtcgaagcgtgtgcacgtgtcgcggagtgggatggtcgtgtcgaatgagaactgttccgcatcgatggaccacattggccgcattgtgtccgcctcttaacttaatgggccgtggtgccaaagtgtaattatgccataatgtgtctagtttctgctattcttttccttcccacaccgatgttaaagtgtactcatgtcctgaatttctgcgatctcattattttgttttgttttattcggtcccttaaatgccggtgaattatgccttaattagtctgctctatattacatttgattgtgtcttttttcaattgtctctcactaatttaaaaacattgttctttgtatgtaaaaattggccgagataaagattatttattaattatttaaaaatacactttaatcactgcaaagatcggaagataaataagtcattgatcagcgattgtttttgtaataatcatggtactcgttctggtatccatcctttccaccgtatccactcttctcgtatccgtccttttcaccgtatccgcgttgcgcatatccgccgtatccgctctgctcatatccgtcccttccaccgtatccgctcttctcgtatccgtcacttccaccgtatccgctctgctcatatccgtcccttccaccgtatccgctcttctcgtatccgtcacttccaccgtatccgctcttctcgtatccgtccttttcaccgtatccgcttttctcatatccgctctgcgcatatcctccataaccgctctgttcgtatccgtcctttccaccgtatccgcttttctcatatccgctctgcgcatatcctccataaccgctctgttcgtatccgtcctttccaccgtatccgcttttctcatttccaccgtatccgctctgttcatgtccaccgcatccctttttatcatatccgtccttttctccgtatccgctctgctcatatccaccacatccctttttatcatatccgtcctttctactgtattcgctcttctcatatccctgctttccaccgtatccgccatatccctcctttccaccgtatccgctctgttcatgtccaccgcatccctttttatcatatccgtccttttcgccgtatccgctctgctcatatccaccacatccctttttatcatatccgtcctttctactgtattcgctcttctcatattcgtcctttccaccatatccgccattttcagtaccataggctccaccgtattggtacggtttatatgtctaaaatgagccaaaaatataataaattatgctaattttgattgcaaaaattggcccattcacaaaacagcttaaagttactaaaatcccttctcacttttggtgcgcaacacacgcagcgagcattctgcaaaatgtcaaactttgaacgatttgacttttggtgctttttctttgactgaccttcggcttgcgcgggtaattcacttcgctgtccgtttttccgtagcctccgctggtaccgtagtcggaattggcaccgtattcgccggcgcttttaccgtattccgtcgccgtgttttgctccgtgcttcgcttgcggcgataatacttaagcaaaaactcgaattcactgtcaaaccgaaaaatcaaaaaatgcctccaccttttggtaatcggatgccgtcggctggcgcatttcgtcgtaatcgacgataaatccgataatggctttcttaactttttaagttttttttggaaatcctttccaaaagtgcaccttcgaaatgctccgttctttacgcgcttaaaaaaataaacataaaatgttggcacaaaaaaagtgtcaaataccggccaaatgacaacactttaggcagtcctcgtcactgttcacagcgatggtcgagcagcggagtctgaaagtgccaaagagaatgggaaagtaattgatattagaaaatcaatttctggtgagagtgtgccttggccaagttgtaantagccgcccttt

SEQ ID NO: 12211 - DNA, 1806 bp, Heterodera glycines
  unsure (1)..(1806): unsure at all n locations
cgaacattcattcatttntaatncctttntaataattgactaattgcctttctttgcgtaactgtcncctttcgtgccgtactccgtcttttcatcatatcccccaccgtatccgactgttccgctgctaccgtatccgcttgttccgtaagttgcgcctcctttcagttgcttttcgctgtttgtcactctgaaattaaaattaaatgcataaaatgggaggcaaataaaatggattcaaaaaaacgaacaccaaaatggaagcgtcaaggtcgcaaacgtaatctgccaaataatgaccaattaattaattaaccaaacaattgaaatttaatggatgaaagtggcggggaatggaggtaattatcctaaccgtcgacgagccgatggggcgatccataggcgtattcgtaatcgcccgccttttccgaataggcgccggagggggaatagggggaataatcggtgccaaaagtctgaaattaatttaattaaattttaattttaaaatttgataatttattcattttttaattttaccagctgtgcaccagcccaaatgataagcattgaaacaaagcaatgaatgaaacgcattttcaaataatgccctaaaagggagaaaaatcattgaaaaagccaaagaaaataaaggaaaagcccagaggggaagcgagcggataaaaggcaaagtgatcggattaaaagaaatagcaaaatgatcagaggaaaaacgagcgggtaaataggcaaagtgatcggaggaaaagcgagcgaataaataggcaaagtgattggaggaaaatagacgggtgaacggagacgacggcgtaattcgttcccgccattagcaaaaacggaagtgatcgctgggaaagagagtgatcagcagagccaaagggacaaaagtgaactccgaacgattctcatcattcgaagcacataaattggcctttacacttcgcttttcccacgccatcgccgacattcccccgacgattggcgagattagccattttcacagcaaagccgagaaaaagtgttcgctcaccgccgccccattcgcaatttctttttaaataaacgcccattcggccgatcgaagggacttttgtttcgccattcgtttcattttaattgaaatttaatttaataaaaatttaattttatttaatttcagtcatttgcccggcatgcgtcttcttctttttcccaactttggcctttttttgtgccttttggctgcagtgactgtttttggcattgaggtcaaaaggacaacggaagtgagcgaacgaaaaattcaaaagaaaaaagaaaaaaaatttaaattcagcaaacaaattcaacaaatccaaattctgtggataaaatcaaaacagaagaagcaccgccgtcgacggtgacaaattcgaagaacgaaacatcgacaaaagaagcagagaaaacggagcacaaagaagaaacgttgaagaaagaggaggaggaggaaggaaaagagaaagaagagcaaaaagaagaggaggaggaagaggaaggagaagaggaagcgggggaagaggaagagggagaggagtttggagaagaggaaggagaagtgacagaggatgaagaggaggaagagggggaagtgagagaggatgaagagggggaagtgacagaggatgaagagcaggaggagggggagggcaaggaggaggaagatcagaaaagaggagagagtgaagaggcgaaaaaggaagaaaaaggaagggaagaggaactgtaaggggagcagaaaagagaagagagaacggagaaggccaa

SEQ ID NO: 12212 - DNA, 2537 bp, Heterodera glycines
  unsure (1)..(2537): unsure at all n locations
ttttcaccaaatattcgtcaaagatttctgtgcaatttttatccactgatccancataatgatataaattaggacgctcaaaaaancagttaagagaaataataagcatattcanntttncaagataagatattctaaaaataaataaattaaagcatttaaaatgaatttattattntaatttgacagcatattattcacggcaaatacttatagaattaataaattttctcactaattatataataaataattttaaatatattgtaatgaaataaaaataaagtaatttcattcactattaaataaacaattttatccctactgatcaaaaatatttttgttattccctaatttctttgcaatttcaatgacaacagtagagtagaaattaattatttaatttttatttacaatatttattttgctaatgttaaatcgcgaagtaaaagaagaaaatttttaataaaaagtcagatattttcctgattatgcaaaaatcgtgcaaaaatcatttgatataattactatttattatcttgatcgctaaaagaaaagattttaacacaaataaaattcattatattagaatagtgatttgatttataaagacggaaaatccattttcaattagacatccaattcatttaattctacatttggctttatcttaattgcacagtttggttatgtttgtgcaactaaaatttaaaatctttcaaaaacaaaaactaacggtttgagcagaagcggatttatatagacataaaatgcaaaactagaacaaaaacaccaaaatattgaccaattatatgtaaaaactaaatatggatcacataataatacgaaaaaatggacaaaacgccaaaagatggataaataattacaaattattatgcaccaatttttatgaaaaataataaattttttttaaacttaacgaaaagaagaagaaaatatggacaaaaacttattgatgaataaatttattttttatttgaattttttattaaaataatgagcctattttttgtcttctttaccaatttcggagtagaaaatgcgtcatgaaaattttattgtcataaaaattaaaaatttttgaaaaaatcattaaatcttcaaataacataattaatgctcctaataaactagagaactaagatttcttaattttaatgcagtttaggctatcagggcttgaaaaaattcaacttagaatccgatttttgacataagcgcaaatgtcggggccgcgaatgtcgctcagaataatctcatttttcaatgaatgaaaattttttgggcaaataaaatttgatttttttttatttccgatattttgttcaaacaaaaaattcctatcttttaaggcgtcgatcggagagggactcaacgaaatttcttaaaaaatcatccgttttcaattctcaaacatttcttctacaaattgtttcttccaattacaaatattcgcatttgaagtgttcacaattttagcaatttcattatcactcatttttggattttttctttttatttcccaataaatgttctattttttgttcctccgttattcttttacagttaattccaaattgtttcttccaattttcaattgttccatagttaactccgattttcttacaaatttcggcataattttgtttccattcttttggcgaatattttcttttttgcttatatttatttgaaatttcaacgaatttttgcacaattattagtttttcttcatcagtttttgatttgtaacttttctttttttgaagaccaaattctttgatccatttttgaatataatttcgatttgtccccaatttcttcgctatttttgagttaatttttccccattcttttgctgaatattttcttcccttttgcttaattttctcttttattttataaaactttccaattatttctctttttttgagttcatttcgtttttcttcttctttttcttgccatttttctccaaatatttcgccaaatgacttttgttgtaactttttcttttctgatccaattttgtcaattaaaaataaaataattaataatagtagaggaaataatttcattttttatcgtctcaaaattgtttttggttttttttaatttaaacgcaatatattttcatggacatataaatgaaaaaaaattaattttctgattaaaatgctggcagataaccataattctattgatttaacgaaaaataagaaaagcctactcaattgcaaataatattaataaaaattctcattaattaaaattccatttctattgggttttaatataaaaatcaagaaatataacttaaataaataaaataatacagcgcggagatcggatgaatttgaaaggagttttgcggcggttaatatgataaaatgaaaggatatccaatcgtanaaagcgagtaaggagcagttggaatctgttgcttctggcacgctttatttcggcttattttggtcagtgattttgggtttgcatggaaaaatcaaattttccta

SEQ ID NO: 12213 - DNA, 2007 bp, Heterodera glycines
tatttcgccaaatgacttttgctgtaatttttttctgttctgattcaattttgacaattcaaaatataattaaaaagaatagagggaataatttcattttttatcgtctcaaaattgtttttggttttttttaatttaaacgcaatatattttcatggacatataaatgaaaataattaattttctgattaaaatgctggcagataacaataattctattgatttaacgtaaaaataagaaaagcctactcaattgcaaataatattaataaaaattctcattaattaaaattccatttctattgagttttaatataaaaatcaagaaatataacttaaataaataaaataataaagcgcggagatcggatgaatttgaaaggagttttgcggcggttaatatgataaaatgaaaggatatccaatcgtaaaaagcgagtaaggagcagttggaatctgttgcttctggcacgctttatctgatcacttggaacagtgattttgggtttgccatggaaaaatcaaattttcctaaatcgtgtttaatagacattatagagaatagagagagctacaaaatgttagcataaagaccccgattcattaatccattcataaacatatttacgatttgtccctaattttttcgctagttttaatttaattttgctccattcttttgttgagtattttgttgcttttgcttaattttctctttaatttaattatatttttgaattatttttcaattttttccaaattttttacacgattaataatacaaaaaaagcgaataaaagatgtaaataaaacattttttaaattctcaaaattaaatttatttatttcgtttaaaatgtatgtattttatgattattaatttacttttttatctatttaaatcgcctttctagtgctttaaaaaattataaatatttcaacaaaaataaataaagcaccattttgctatatttaatgaacataaattgactaaattaattcatgtcagtgttgaaaggagttgaaaaaatttccatcttcgccaaatggaaataaatgatgacaaatatttattcacaaagtgtaatcaaatttctttaaaaggcaaaatttttttacaaattttaatgtgcttcaatttagggtccataacttgtgaggaattgattttagcaaaaaattgtatttgatcatatttgtagagaatttcgagatctttctagtatgctttatgcccatgctctttttatactgtgatatgaaaaaatttataaaataaaaataaattttgaaattcaaaaccataaggggacaaaaaagagaactgaaatctttagcatattaatctagatttttttttgtttttttttgtcatcataacaatgggagggattacgaaaatttttaaaattaaaagttgtcaaaaaactcaaattaattaatttttgtttcggcttagaaacaaaatggatacaaaaagaacaaataaatttgttaactcaaatatcaaacaaaaagcatcgctttcgtcctcacacaaatcgatcttttaaatttccataatattcggctgttaaaagtccgggttaatttcaaaattttttgtcccgttaagcaatgaaaatcaaaactaattttattagccgtttctttggtttaccgtgcttactaattagtaccccccccccccggggcttctatttttcaacccccctcgagaggggtattctaatttagaggggggggggggggttactaattcagtaaatacggtatattgattatgaacatggagcacagcaacatgtagaaaccgtaattttgaaaaatacggactcggaccaggacctgaatatccgagttcgctggcaccggcctggcttagaacaaagcccggcgggcatatttcaacttggagaaacaaattccgacaaagtcaattaaaaatggaatgagtttttcaaacaagttctgattttcacatttgtcctgagaaaaagaataaaa

SEQ ID NO: 12214 - DNA, 1633 bp, Heterodera glycines
cggtatttaactatcatcatttaccattgtgtttcaaaaaattgcctgaggcaataaattgtgccaaaaaacacacacattcagttagcggtgtacaaaggtgccgttgtggcgatcaaagaaattcgtttcccgcgaaagctgaaggagctgacacgggacacaaagctggagctgacctggatgaccaaactgcgccatgacaatgtgaacagctttttaggtacgtattcaatttacgcaccagcagggctaatgagtgattccggaactgaaggcccaaaaaaagccatgtaattcgtggttaatattccgagttggaatccagtctctcgtgtatcaatgaatccgcgcaatcatgagagagcattttaaaattcattaaatttttctttgggccagccagacttaacatattgaatacttaacattcttggggtatcagttgatactagatatagctaaatgttctatatgagcctgggaaattgcatatgagttcataaaatcaataaatggcgcatttttgttcgagaaattctcgcctagttaatctcgtaactaccgtatttctccgattattagatcaccctcaagtagaagactccttttgagcagggttgaacaatagaacactctcgggtctaataatcggagaaatatgctaattggttaacgaagtttgttgcttctgatcactgagcctctaagttaatattgaaaagtaaatttctcactgatcaccacgtttgatcagcttagtttgccattttttttgttgttgatcagaattggttattatttcacgtgtgccgcatttttacaggcattatgctgttcccgaccagcatttgtgttgtgcgcgaattctgcactaagtcaagcctgatggacgtgctgcgcaacccgtacatgaacattgacgccgtatttgttgcttcattcacccaggatttgttgaaaggtcggctagacaattgtttttgctgttcttgtatgccagccaaatcatgccatgatgtgtgccgaaaatggcatggcattatatccagcaagcatttatcttgtttcacaattagggagtcttggctttatctgagtgttgtcaaagcacaaatctgctgatctttccattttctgagttttaggcagagaaatggtgaattcaactttataaaatggcaaacaaaaaatgaaataatatttgcccatcgtcccaaaaggacactaaataaacgcataaaattatttaaaaatatcaattttcgactttttccattatttttccacctagacattttgaatgcctataaaattgcctattttcattttgttttgtcccaaattttgaagattttcattcaccattttctccaaccgttcaggggcgcgattatccgggttctgaatggactaaaaattttgccacttcaaattaaggatgattataaccattttcaagtttattcgctgctgataataacctttatggctgagaatcgagcaaagaattaaaaactctttatttctcgcgtttaaattggccaattagagactataattaatttatgaaatgtcataccactcattttatttcgttatcaggtatgatttatttgcacgaatcggacgt

SEQ ID NO: 12215 - DNA, 993 bp, Heterodera glycines
ttattctctttttaatgtttaattaaaaatttaatattcctttattttaagcatctatttgctgaaaattctttccttttaactaaaagattttactgaaaaatttttctatttttttttattacagtactagaaagagacagtaatttaataatttcggctgcaaaaattcaattttatttttgccttttgctttaagtgggagaattatctgtggactgcgcccgaactgctccgccagcccgactttgactttggccacgtggtgatgggcacccaaaagggcgacgtgtactcattcggcattattctgcacgagctaattgcgcgccagggcccattcagtctgctgagcggcactgctgctgatgtgccgcaacagaattcgacgaatgtagggcatgatgcggcacaacagcaggcggaggagggggagcacgggactgaacagtacggggcgccgttgtccgtcaaagaagtcgtccaaagagtggtaattgtttggggctgtactgctcgagaatgtcggccttgattcgagaaaaaaacatgtatttgggtcaacaaacttcggtctcgactctcactaatttcactctcgaacagcatttttaaagtaaaccagacttctcgaaggtgttccgatcaattcaattcaccggaatcttgaaccaactgactaagcccaattttcgatccttttcaaaatggcatcggaactttcatgggcataaaaacatgagaccgttcaacttgggtcggaagaatcccgagtcgggatcctgagttaaatgccgagggaccccgagaaaagcccgcgggttcccaatcctataccaaattttaataattgtaaaataattaaaatactaatccaagttcatttccttggtcaccgaatttatggattgtatataaaaaatgccattttcccatcacagtactcgttggatggcatcatgcgcccatcggtgcatgtgtccaatgccaaaa

SEQ ID NO: 12216 - DNA, 2002 bp, Heterodera glycines
aaattaccatgataaaagcaacccatccactcgatggcaagaggacgaagaggcgggtggcggtgccaaagcccatcaacgcggtatcccgtgtcttcaatgtgcgcctccccgacggaccagctcgcgcattgcacttgcgccccggggtgttccagctcgaagaagcggatgtaccgctgagactcagccgatgcgcggcgtccacgcaaatagccgccttctggtgagtggacaagatggttggctggcaggaagcaccgacgaagcgtggcaagcgcaagaccagccgccgttgatgacacaatgaatggatcaaggccttgtgcatgctgttcaatcagatggcgaaaacggatgaccgactctcgcagaatggcaacgtcgttgcagcagtacatgatcagctgctcacgaagctgaaatctgttgccgttgttgttgttgttgttttcagtgtgccagcgaaccactcccccccccctctaatagagtcactcctcttcgcttctgtttttttttaaatttgaactaatttttatttattttttacttaagcacatttgttccaataattttcaatatttcaggacgaaaagcgtcgcaaagacctgcttctgcagcgaatgttgcccatttcggtggcccaacaggtgttgtaacaaaaaataataacaaatgaaaattgaaattgaaattttacgtgttagtatggacaatcatgtttcaaaaatcataataccgaataaatttttacgaattgtatttttaaaaaataaaatcccatggcctagtttacaaagaaaaattcaggccttcagcgcctttaaaaaaaaaaaagattattccctgatcagtcattaaatcgaataatttttgaacaattatttttcaaaaaagattaattatcccaaggcctatattaaaaaatatgtttaattttcccaagggctgtttttcaaaaaatatttttccagcttctggaggaacgtgaggttgtgcccgaatcgtttggctcggtgaccatttatttctcggacattgtcggcttcacgtccatctgcagtgaaagcacaccgcaccaggtgatcgccatgctcaacaagctgtacacactgtttgacggggtgcgtttgcatatttttgacaatgaaataataataaattaatttattaattatggatttatgcaaaaattgttaaatatacctttttttaattattttttgtttaaattaaataaaattacatattaatttattttatttttttaaatgtagaattctttaaaaaaaattttgctgtaatttttttaaacacagaataagattatgccaactttagtgtaaagtgtttttcatttcaaatgcgcatagaataaaaacttttttacaattaaaatatgttttttgtaaaaaaacaaataagttttacaatgccaactttaatgtaaagtgtttttcatttcaaatatgcatagaataataaacttttttacaattaaaatgtgttttttttatatacagaataagttttacaatgccaactttaatgtaaagtgtttttcatttcaaatgctcatagaataataaacttttttacaattaaaatgtgttttttttatatacagaataagttttacaatgccaactttaatgtaaagtgtttttcatttcaaatgctcatagaataataaacttttttacaattaaaatgtgttttttttatatacagaataagttttacaatgccaactttaatgtaaagtgtttttcatttcaaatgctcatagaataataaactttcttacaattaaaatgtgttttttttatatacagaataagttttacaatgccaactttaatgtaaagtgtttttcatttcaaatgctcatagaataataaacttttttacaattaaagggtgttttttttatatacagaataagttttacaattgcggggggaatgtaaagtgtttttcatttcaaatgctcatagaa

SEQ ID NO: 12217 - DNA, 1028 bp, Heterodera glycines
atttttttttgcggtgtacccccccaaaaaagttggtgaatgggagttgggtccgacggccccgataggcgtcgccgggaaaatttttgaaaatttgagtgcaatttcattatagatttaataattaaaatcggtgaaaatgataaaaaaaaatcggtaaaataaagtgcgggcatgcgggatcgaacattaatccacagaacaacataacctgctgtcttcaccactaaactacaatatttcaataataaggcttattatttcttataaaaaaagtcattcttaagggtgtacatattttcgtctttttcgtaaaattttgctctgacgaaaacgaaacacgaaacgaaaaacaaaattttgaaaaccaaaaacgaaacgaaaaaactttggcggacgaaaagaaacacgaaaacgaaactcaaaaagtgcagaaaatgtaggacgaaacgaaaacgaaacgaaatttcgtccagcctgatggggtgcatcccaaaacgtcgccggccgaaacgtcgccgacgactttttgaaccatagctttgtgcattgtcaattaaattaattattcttggtgttgttcgatagctttatgtgtttaatattaataggcaaaatttcaaacattttcgttaggtttcaaaaaagttacctcactaccctatccatgccgatccatccccgcgaaatccatgggaccatcctgctctatccatgccgatccatcctgaaatccaggacaccctccctgccccattgttgtttaattgtccgttttattttgttgtagcaaagatgccaaaagccaccaggcaatgttcgataaggaaacggaagagtacaaatgggaaatgttgaacgcgcggagcagggaggagcggaagaaggccaaggaatgtgtgaggggctcagtgttactcaagatggcccaggatagagcgttctcggatgaaagaacaacggagcaactggcaaagtcaatgggtgagtgaatttttgtgtgatttaattgtcaaaaattatcctcc

SEQ ID NO: 12218 - DNA, 1366 bp, Heterodera glycines
  unsure (1)..(1366): unsure at all n locations
tcatcattctcggcatcgcatcgtttccgtccaccgctgcgcaccnggatgaagagttcaccgaaagcaattggcggcggcggcatttctttgnatccgtcaacattctctgctgctggcacatcaaccggcggtccctttgatgttgccgaaaacgttcatggcatcgatcatgttacgcataaaccatttaattttttgcgcacgaactctgagcgtgaagcggaggaaaagcggcagcaacaaagacagcaacgtgaagcgattgtgcgccataatgagttcataatgatgggaggaaatggatttgatgatgaagacgaatccgatgtggactcggacatggactcgccaagaaatgtccaacaacaaagttacaacgacggtggtcatcgccgccttggcaaaagcgaaagcaaaaaaaggttggcagaaaagaagcagcagctcgcggaagctaaagctgaattaaaaatgcaactgagtgggctcaaacaaatacgacagtaaaatttttaaggcttttgcatttgggaaaaagaaatacaaattttgcccaaaaaatgggtgcgcgggtcctttcgcaaaatcatccgcgtcacctttggacattttgtaaaatgcgccattttaggctatttgttaatactgtagtttgtccccaccccattttagaaaaaaaatttcaaaaatttttttgtcataaaaacaagtttccaggggttttgggggtcattggtcacgaatatgatatccatttcggccaattccgaaccccggacccgatttcgaacaaaaagtcgaaaattcaaattttctaatttctgatttttagtctaactatttaattgttcttttattgcaaaattggtagcttttagaatgtatccatgtatttaaaccgattttgagccaaaaatgcgaaattcgaaaatttgaatttccgactttttgtttgaattcgggtccggggttcggaattgttaatgttgctaaaagcaatcaaaatttgcattcttgtcatcttttcgatagccacggtttttctttattagcctgcacaatttcgaatcaaattaacaaatttattataagttatgggctttttcaaaattcgaacaaaattttgaaattttgcaggctaattgagaaaaacctgggatatgcacctcagaggcgttggtttaaaaaaataaatatatttttatttatttgcgttttaattactttgaagccccaccaaaaaatcaaattttcacagagagagcgaaaactatgaacgtagtatgcggcgcaaatcagtcaatgaattctccgaagttttatgacgaattcgcgagtatgcgcatgggcgacaacagtttct

SEQ ID NO: 12219 - DNA, 1884 bp, Heterodera glycines
taattacaaattttttagaaaaatgtttgtaaaacatcttaatggcttaggagaggcctaggctaaggcttaggcctgaacttttgggcgaagcctaggcttgggcttggttgggcctaggcttaggtttaagcttaggctttattttgtaagttgtattgtacggctgagttgtccatcagctgaattttgtcctcagctgattagtccaaaaaccaactcaaaatttcaattgaaaaactttttggagaagggaaacaattcggggaggggaactgctgatcccggcggggcaacttaaggctctaatgcattttatgagtccaacaaaccgacaatacctggtttttatacgataactttgttcatgttcgaataaaccctatatttttggtatcattagaaagcacaaagtcagaaatgtaaaaatacgagaaaacaacagaattctaacatttaaagaaagttacaaacgaaaataatcaacaattaatttattagtcaaatatttcttggcaattgccgaaacgctgatattttatatattttagcttctttagactttatgccaaaaagatagggtttgttcaaacatgaatgaacaaatatttaaataattaaagttttagcgctgcacgcactgctcactgaacgcgcccgtcggctgtttgctgcgggccccgggcgtgtctttctgcgcgcaatttccgtattgagcaagcagatgaccgcgaatgagatacgccaattcgccgcatattttgcatggtttccgttctgcagcgtgcatgagaacccagacacaattgaggcgaacggaaaaggcgagctggcggcgtatggcacgcaatttgacatgaaaaaagcggaaatggatgacgcggcggatttcgagcagttcatgcaagaaatcaaaacagaattgttgaaggacagcggatcgaggcacagttttgatggcagcgtcagtggccggcgccgcagtgttgatggcgccagcgcccggcgccgaaccattggtggcgcatgcagcgggcgccttagtgttgatggcgtcgccagtacgatgcacagcagcgtaattatataattaagcctcaatttatcataattaagccataattggtttataaatattaatataaattgaaaaaagaaaaaagtaagcaccctgtgattgagtttattgttcattttttaaatgaaattaaaagaaaaattctgggatttaaatatttaattttatattcaaaaagcgagaatcggttggagtgtgttttgtggttataatttattttttcattgtcgaattttaaatttaaattttaaaaagttaattttataaattttaatgttcaagaaaatgttttttaattttcaaatttccctaaataattaaaatgtcaaaagtgcacgttcgcgcacaggtgtttgaaagcccatgccgattggatgggtgcatgaaaccttttgaagttgccggtccatctaaaaactaattagggcgctagttttaccgcaaaataaccgtgcccccttttgatactttgtactgtactatttccctaccgtaatttcttaatctcttagtcaggcaaccgtttgatgaggagcaaatccgtgtcacagacaccaacccgctcgcttacaacgtcaaaattgagtgaggtagatgtggtaatttttttgcaatgcctaatttggacaaaaaaattattacaattttttaaataaaaattttgattaggaaaccatacaacaactggttgagcgttattcaccgccgaatgactcctgaaaagctgattgattgcattgattacaaaagaacatcctctctatccaatcctagacgcatgagatttgagatttttttttgagaaa

SEQ ID NO: 12220 - DNA, 4488 bp, Heterodera glycines
  unsure (1)..(4488): unsure at all n locations
aatttccgaaccatgggcgagtttggacatttggaacaattgtgatggatattgaaaaggtgtcggaatttgcgggagaaaggttttcgagtgattgtaaaagcgagactgtgcgggaaaagaccgatcggttcaatctcagacaaagggccgactttattctgagagcaattaggaggcatttcgccaaaaataatttagggaatgccaatactaaaatatttataaattgaaaacattttttaattcaaggaatgccgaaaaaaacttgccaaggtggagcaaattattctgagagaaattaaaaggcattttgccaaaaacaaaagatttatttaatggactgaaacattttttatttaaggaatgccgagaaaaacttgccaactccgaattgagagagacgaaattgctgagcaaaaacggggaattgaatgcagagaatgtgagaaaaataaaaaataaaaatgaattatttaaaaaagaaaaatggcaaagaaggggtaaaaaacagaaactttcaaatttttaaataaaattcagaaggcgcttaaagcagagttggagaagcagaagatgatgacggaacacagtgaacttaaggcgaaagtggaaaagatggagcaggaaaagcagcagaaattggacaaaaaatacggtgagaaaatttaaaaaaaaaacaaattatttccattaccgtattcggatcctactgttaaaatgaatatttcaaaatgatttcagtttcattcgatgtgttcaatgcattggtggagcgaatcaaacgtttggagaaccagcagctgaagcagaacaaagaggaggacaaaaagggtaaaaataaattaatggacgaacttttatttatttgtgataaattataaattttaaattaacattaattagctaatcagttccaattattttcattttttgttgttcaattggagactcttttagcagaggaaaagcagcagaaggaaagtgttggtcaacagaaattggatggaaaatatgccgtggtggacaaaaacaatgttttgggtgggcacaattggcaaattattttaaaaattgtcattaataaattggcgctatttaataaaccaaggttctgttctgttgaattttaacctgtttcaaaagcgtttattagtcaaaatacattatctaaatctaaatgttaatgagttaatttaactttcgaaaatgttatttgaattgctttagtgacgtcatcgggcgaccaatcgccgccggcggttgtctcagcgaaagttgcaaaggtgggaaggaaacataattatttcacaaatgccattttaatttcaggaagtgcctaattcgaagaaacaaaatgattgggatgccaaagtttgccacaaagacatcgaaatcattggggaaaagcaattgacgatcaattgcaagggcaacagatttggtaattaaaaataaattaaataatgtaattaattaatcacttttttaattaggatggagctctgtttttgcgaaatttcccatcacaaacttttgtcgccccggcattttctacttcgaaatgaaagccatcaatttggaaaggtgggcatttggaggaagaggcaacctttattaggaccagggttgccagattaaaattttaaaaagcctcattttgggtcaaaaagcctcatttttacaaaatattcaaaaaacgtataaattgttcaaatgttatatttttgattgtccatgatcgatttgagtaattttttgttagaaataagcattttgtgaaattctgagcacgagaaatcggagttgattttttgctgtgttttttccgaaaaattttttggtgaaccagggggtccggcgagtgccagataggcgccgcccgggagaaaaattttcgtaatttttaatgagatttgttaacagatttgtccacaaaaatggccaaattttaggattttgatcaaatttttaaggaaataaaggacttttaggggctggcggttccgataggcgccgccaggggaaaattgagaattttgacaatatttttagctgattttcattaaaaaattattaatttagtggttttttggaaaaaattggttcttttctggtttttataaaaaattttagcaaaccaaattattaaataattgtaaaacattatgccaatttatcaaaatttaaaatattctgaggattttccccaaaagcctcaaaaatcctcaaaatttctaaaaagccacaaaaatcctcaaatcctcattttccaaaaaaatcctcattgacctatcaaaaagccacaaaatgaggataaatcctcagacctggcaaccctgattaggacgtattattcatcatttaagggaataaatgtaaaaaatcatttctttgcgtaatttttgaattctttattaatttataataattttaacagttttgccgcgattggattcgccacgaaggaagtgccattggacggttcaattggccaaattttgaacagttacggataccgaagcgatggctcatttggctgtaatggcatcaatcggccgtgcaaaatgccatttggccaagtgccaatgtcattatttgacgtttcaatgcaatcggcggacgtggcaatggcatataaatcatcggagttttccactggtgacgtggtcggatgtggccttttcttggacactcaactgatctttttgacaaaaaatggccaacgaatgggtgggccaattaaaattaaaaaacaaattaatgaataatttaatttttaagatgactcatcgtttttcatttcttctcccgccaattctctcaattctctgtttccgtgcgtttctttgtgggcgggcgacaaaaccgaggcgaactttgggcccaatttcaaattcaatttggccactctttgaagaaaacagaaacaatggaagaaggcgataattttgaattaattatttattattatttttgctctttgtttatttttaatttttgttttgtaactgaaatattattttatttgtttttaattttattttattaaaaaatgctcttgaattttttgtgtgttttatatatctgagaattttgtccattaatatagtgaatacaaatatgattcaacaaatttctgttatccaagcctctacatctttcagtccaagtttttggactataactttttttattctcaacgaaatcaaacaaaaattcaaaaatttcaacttttttgcaatttttacgttatacttttttggtaattatttagtcgcgaatcaatagcttagaaacagcttaaaacagtaagcttttgaatgatatcaagattgttggatttggttgagaatgataaaagttatatccaaaaactttggctggcgcctaaatggcccctactccttnctatgtattcttgagggagtgatcctgaatgtgatcccaatgaaattcctgatagattctgatgaatttaaaaaaggacagggatggacttagaggacgggaccccgaaatttaatccctttgatcccgtccggtctttattacaaaaaaaataaatgtttaaaaatttattttgccttttaaatgattgcaggcttttccctaaaagtgccgacaaatatgtcttcctaaccagttgaccaccgggtcgcttgccacactcccttttaattcccctttcttcttccttcttttttggaaaaaatcccgaccaaaagtgcttgtcctccctttttagggcacttcccggacccggacccaaacaaccctgttatcattcgaaagcacagactttgtagaggtgcttaaacatattcaatttttgatttgacccgttttaagatgtgcaaaaagcgttcaaaaattggacattcaaaaaaagggtgattttttgtcagtttttcgaatgtagttcgaacagttctgaacattttggaaaacccgtatttttcccttatagcccttgagaaactgaatcgtttgaccccactcgcgccccgtaaaactcgctagaaagtctgaaattagtttttaagcttggatcatgggtataaacttcttataggaggaattggtttacgatgaattcttaatacactggtggaaaagtctttaaacaaaaaagcaatttttgtatattggttaataaaccaataattaaataaagcattgtgggcaattgtttatgtatttattagtccaatagatcggcttcatatcagcaccaaaaaatcgcggatcaaaaatagaatgtaagtgatagggtcaacgaggtgagagatggtcaaaataatggcggaaaagtctttgaataaaacttaaaaacaatttcaagggggctcttaaaaatctcaaataattcatgcatgcttatcttttgatgctgacgcaaatgtcttttacaccaacttgaacagatcactcattcatagtgatcgggacaccccaaaatacactgaaaatcggggaaattttcga

SEQ ID NO: 12221 - DNA, 2371 bp, Heterodera glycines
  unsure (1)..(2371): unsure at all n locations
tgctttaaacgcctttttcgatcatttctctcactgcatcaaacacttccttctccaattattctaatttgatcacttccttctccgatcactccgattttctctctgatcactaatttctgtttaattcttcggctgattattccatcattctttctcatctgttagctcttctgattgtcttccatttgcttaaggatgtgactgcgatcatcttttgtgtggcaatgtccgaatatgaccaagttcttcacgaggacgaaacgacggtggcattttaggattaaattcaatgccaaaatattaggatcaaaaggaatttagttaaaatttaattttcttcgtgtggaggaaaaaactcaaaaattcttaatggtaattacagaaagactgaattttttcataaagattcaatattttttaagtttttgttgacaatttcatattttatttaatttgttgcgaattattttaaacggttaaccgttaaacgtgggcaatttgagaagaagaaatagagaaatagtgtgtggaaagaaaaaaggagtgaagggcagacgcagaagggaaatttattctctcaaataaaaaaataatgcaagcattcacatctcccatgtggtctagtggttaggatttgtggttttcacccacacggcccgggttcgattcccggcatgggaagagatttttttcaattcttttttgtatttttagcaattattatttatattttatttttttatatatattttaaatttaaatattcgcctttttctcttaagaatcgaatgcacgagtcgctgaagctgttcgactccatttgcaacaacaaatggttcaccgacacttccatcattctcttcctgaacaaaaaggaccttttcgaggagaaaatcaaaaagtctccgctcaccgtttgcttccccgaatataatggtaaatcaccaattaatgattaattgccctaattaattaattgttgcctaattacctgtgttttctctgcctttttaggccgttccgattaccacgaggcgtccgcatacattcaggcccaatttgaggcgaagaatcggtcgaccaaaaaggagatttactgccacatgacctgcgccaccgacaccaccaacatccaatttgtgttcgacgcggtcaccgacgtaattatcgccaataatttgcgcgggtgcggcctttactgagtgagcggtggtgccaccgacgtcccttcgtctaaaaagtgttttctgtgctgccgaatctgtcgctttgttaataattttgttgggatggcaatcggtcggctcagtctcccaaatgatcgaaatggtgatcactgatcagcaagcagcttttcaagccgttcttcgcttcgttttctgctgatccgtccccccccccaatgtctgtcgatattcgctcaatccgccgccaatgcaatgcccgcgactttatccgctaatctttttgctatgtcaccacagactgacccaatcattcgtcgttcgttgtgtatttatcggctttatccccccaaatttgataaattcccacaaatttcgccccttttcctttcccttcgcttttaataaataattgttttattttacttttccaaattgtgattcagaggccatttgctgattgtctgtctcattaagcaacttttttaaacgaaagattaaataaaggcaatccctctgaaaggatttcttttcattttaaatgttttagtcttttgcttttattttcttttcccttttttcaaaatgtcatttctttctttttttcaccactgaccacaaatgttttgttttccattctcagctagtctttttcttcttattttcaaattcaatttttattccaaataaaataaaataatttccaaactttttctttcgttttgagttttattgaatttaacaaaatattttccaattttttctttatggatttacccataatggcacaagtgctaccgttctctctgtgcttctattttcatacggtggcccttttcccattggcacaatgccaaatttggcacttttcgtctctctctctttcttttctctttctctatttccgtcagctgtaccaattttttaagattttttatgtttcctctctttttctcataatattgtgctgctttatttcattttatcatttatcacaacaaatttccgcgtaattttttttatttcgctcgcattttggcatataataaaatgagtaattattataattatttttttcatttttatattccanataattaaaaattattcccaaagttttttctttcggctgacaaaataagcgaatggaataataaaaaagtacaaattatggccattttata

SEQ ID NO: 12222 - DNA, 1456 bp, Heterodera glycines
aataaaataagaaatgtttcaaaatttccaaaaggcctttaagatgcaagtgtttctcaaatattttcaatttggaaatataagtttcagattatagattaaataattgactttatttatggctatacagtgatacaagtttgtaggactgggtaaatattaaacgtaaaaggttttatgttgctattactaagccccgtgacacaattcacgcgagagaattgccccgctccggtatcctgtatatggcaggatttacagtatatgcagtatacaatttaaatgccatagattgcaaaaatcagaatatttatttcggctgcttatgtggggggcgggaatttgtggcattgtgacgacggaaacgcggaggagcgggcaccgcttttcattatgttattatgtatttaataggttacagacaataaacgaggggagagagagagggggcggaaaagggggcagcgaatgccacggcaataaaattaagaatcgtagtcttctagttttttattagcattaattcggctctttgaatattttatgatttttcaaaaatttactaactatcaaattatcagacaaattactgtctaccacttaaacattataatgctatttaggctatcagggattgaaaaaacttatgtttgaacgcgatttggacatatgcgcaagtgtcgggtaaccgccccccccccctcactttgatccccgcgctcccctcgcgatgtttgttgcatttccctaaaaattcggcccaataaaacttttaagcgtttccccccttttttggccttttcgatcgcctctctgatcgatcaatcacttctgctgctgctgccgccgttccgttctgattgctccttatttggcctcttatcagctgattccttcttctcccccttccatctctttttttattttgtttattcccttttttgtttttgttttttaattacccctcatattttgctaattcactttccatttttgatggattagctgttcgttctgctgtccctatccctcaaaatgcttttcgtcctccgtccgcgacgattcttccgtttcccccccccccccttcagtaaacaattgattcattcattcattcgccgatggaatgaatctcaaaatttccaacttttcaattcgactgacaaacaatggacaaatcaaaatcattcattttgtggtgtaaaatttcgcataatttgcacaattttctgtataaattcagaaaaaaaaactaaaaatagaaaaaagggaattctgtttcagtgttttggcccattctaatcactgatcagttgagccatccgattcttttgcttacacttgttcatttctgatcactgatcaatgtttttccttctttatcaccgttatctgatcactattgctccacgatccgtatcgtctctctgtctgatcactctgattagttcacttt

SEQ ID NO: 12223 - DNA, 1057 bp, Heterodera glycines
catatttttgttggatcaaattgctgccagccggcattttgcccgatttgttgtccgcagtgccttttgccagttgtgagcggtaattgttgtggcacgcgagcatcgacacgcggctgccagcagaaagtgccaaaacagagcatggaacggctgcgaatttgaagattatattattagtgtttaattgaatggaaaggaattatgtaaaaatattcagcagtcggagtacagagttttgagtcgagaattttcggtttttttggggccctagagcccgggaaatttcatgtagcgaatgaaaaatctgatttttttttgatcccgattgcaccgaaatatacaatttgctaatctaatccctaaaaaattattaaaaccgataatgtgaggtgcaaaatcaaaatgtgatattatatttaaatgatcaattgttacacaagccgatttaaagcaatttgcaaaaggttctggttttcgaccccaaaatctgtttttttcggcccgatgtttctgattttggaaaatttttgatccgagccctgatctaatatgaaattttggttttttatttatttttcttccaatattaaatttttgccttcattcctaatttcccgattctcttttaccgcaccaacaactcctcatttttctattatccgctaattttttgacatttcaattattaactaaaattgttatttttttttaaattaattcaccgatgaatgcaatgagcaagcagagaacaaatttagaaggaaaatgctccattttttatgtattgttattgtaggatttgaataatttggaaatgaatggagacggacggattggaggattaaagcggacagattatgaatggcttaattaagcatttttctcgcttaaatacggacatttaggttgaaacaccacataggaataaaacatcattctaaaagttaagcagcaaaaaattatttgtttagatgttcgtcctcgccataacgtgtccatggttaacgccatttatttgccttttaataattttatccgttaaacggcggaaaat

SEQ ID NO: 12224 - DNA, 1214 bp, Heterodera glycines
  unsure (1)..(1214): unsure at all n locations
gtttttgacacatcattcagcanaagctgtgcaaattaagtgaatgtgtttggcaggaggattaatgcgaaggaaattaaaattttcaactatcaagaacgtggcataatactcaaaagttggaaatccaatagcaccacggcagaataaacaaaaaaaattgcaatattgattttaaattaactattttcatgccaaaaaattttaaaaaatttaaacaaaaaaaggatttactaataatttcaaaataatgaacaaaattgatttaaataaatcaaatgccgtcaaattcaaacgcccattttttacttgtttggacttttggccatttgttaattaggctctttttttcatttgttgtagctaaagaattgtcctttatgctgtgacattagaaaatggaaacccatgaaacagaaaatagccatttacaatatatgaaatatcgaaagatggtaagtgacagaaattataccaggcaatttgcaatttgcatctgaccggacatttggacagggcagcgcggacgtacgagtattttgttttcagtaaaatccgaaaaaattgctatcgtttgagctcacatgcttagaagctaacttttgattttggagccgaattaaaaattgtttctaatcatgtaaagctaccgattgatatgataccaagattgtcggatttgattgataaagaatatccaaatgccacttcttttgaataatcgtatcacttcatttttttgtttgcccgagcaaatcactgtctacctacagaaatgatgttacattagtggtgcccatcaaggttacagtatcccagtggaagttacagtcacagtatcccttttccaggtttggttcctcgtctttcctctgctccaatgatcagtacggcttcgtgttgtacggatcgctgaggtgggtgacgtcactggtgaattccatgcgcaatttgtccataattttatcggcataattagcagcagcatccttttcgccaccatttttgtcataatatcgcacaaattttgtgacacttgactgcccaacaattgtccattcgcccgtcaaaatttcgtgaagataagcagtgaatgcgccatgagtggacagaacaatgtgctcagcttggaaaagcaattaaaaaaaccaacgaaaacaaacaaaaaatgtcagtcaattaaatttaagaccanaaataaaaaacataaattt

SEQ ID NO: 12225 - DNA, 1366 bp, Heterodera glycines
aaaatgtcagtcaattaaatttaagaccaaaataaaaaacataaatttctaatttatttttaatttatatgcacttaatgtaaatttgtcaaaaagataattagataaaacggcttatttgcataattagggatatttggtctaaatttaataaaaatttactaattaactttttatatggaaaaattgggcctactcataaattctaaaataaattaccatttttattgtctgccaatatttggccaattgtttttttaatgacccatttacaatcgtcttcttccacttgcttcacagattcaagtgccgatacagttctgaatttattgatgaataaatttttgccaaaatgctgcccaaaattgcaaaaatgagcaaggcacaagaagctaaaaaaaggcaaaacataaataaaataaatgaaaatttaattaaagttgacgacctcggccaatcctggctcaatatttatgctaattgcatgactttttgcttcagcgccgcccaaaagtccaatggctgtttggacggaacgtgaaaatggagaggaaaaaactttgctgatcgtaacattttcaaagctaattaaattcaaaattgtatttttcaaaattttctgcaattcaccgctttcccaattcctgggattgttgaatgcccagcggggacaatgggatgtcatccctggccaattcgtcttcagtacataattttttgtcaatattgtcctgtcgatggccatgcctgatgacccacaacgattggataacagtgggacgtttatctggaaaaaaaattaaaatcaatttatttgtacatatgtattttaaaataattttttctttatttaattatcaattaaaacaattttcacacataaataatttaacctaatgtccacagttgagctgcatttgtaatatcactttccatatatttgactttaactttgcttaaattgagctcaatcaagtccaaaatatattcatgatcaccgtaaatgttaattgactaaaaaaaaataaaaactatttttgacaattccctaagaaaaccaaatgttgtgatttttaaacttattagagagttattttataaaaataaactaactaattaacaaagctaatcccactttatatttaaatatttgattataataaaattacattttctttgcatgaattttttaaaaattccaatttttgcttcagctgtattacgatgtttacaagaacattgttataatggctcaatttgttttcgtatctgaccaaatcgagcaccatccctttctcttgcagcgattttacaatctgttaataaagttaaattaattgcttatagttcgaattgtcgggttagg

SEQ ID NO: 12226 - DNA, 2049 bp, Heterodera glycines
gggaaaaatttttgtattttttaatgcgatttgttaacagaatttgtaaaaaaatgaccaattgattaagttttgggtttttaggatgcttaacatgaaagaaaaaaattggaatattttttaaaattaaaattttaattaaaataatggtaaagaaaatatgaagaatattctatccaagtggggaattgaacccaggcgaaaaattatgaaaggtagaaagtttaaccactacaccacatgtgcatgtgtgtaatcccatgactaaatgaaataaaatttaattttttctcaaaaatttctccttcttcaccaatttcctactcttttctcgaccagacccccattcttaccagtgcaaatttttaccggcggtaccggtactagacaaaccggtaacggtaatttcatttttgaaaaaaccggtaccggtaccaaaaaaaccggtaattaccggccagtaccggtaccggtaccggtaccgctcaaccctagatataatataattttattggaaattaaatttaaaataaattattcttagtcttagaaggaaatgattaagcattatgaattaataaatcacatgcttactgatttttgtctgaaaattttatcatgatctcttcactattttggcattttcttcactatttagttaatggcatttttcttcactatttagttaattatttgagattttttttcactaaaatttccaatccctagtcgtaaaacaaaaacaaaaaatgcttaattgttagaatattcattaaatttatccgaaatttttgaatttctgaaatagatctttaaaataatggaaaaatgggctttataaaaatcatagatacatatttgctttgccttttattctgataattttttttatattaaatcaatttttcactacatttatgcattaaaaagatttaatttctaattcctacttttaccatccatgggtttttactattcttatttattcatattaaagtaaaatcattgttttaaatcaatgcttaattttataatctatattttacgcatttcaaataaatgatgattgtatctattgtacaaaatgttgtaaattctatacaattgcgtaaattttggctaagaaattttcaaaattatgcaacatatttgaatgacattcaggaatattgaataaactaccggacgggaccgagatttcgcgtgattcttgtggggttccgaccacacggaatccgtctcgaatcttttttaattcatcgggattaagaaggacagggatttgatcgggctacgagtcggaattaaaaaaattatatatattattaaaatttctagatcaggaagaaagctgaatttatatttccaaaaaatttcgtgtccttttatgttaaagcaattaaaaattagaaacattatttttcccaatttggcgtttttggcaaaatttcacatccgattgataaagtcaagaatttattaaattaaatttgttaattttccaacaaaagattatcgaatatttatcgaaattaagtaacaaaaaattgagatgggcactgctgcacttttcgatgatgccgtgccgcaacaaagcgtgcagctggcaaatgccgtacttggacaacgccggcgggcggcgaacggtcggcggcacaaaacgggcaacggaaagagaggaaaaagggcacaaaaagttgccgaacgattcggcgaacatcgatgttgaaagagaacagaatgatgggcgaaatgctgttcagcaaaattgaaatctgtgaaaaatattaggaaatcttttttatattaaaatatgtctaaataaaaaaaattaagaaaaaaatccaggtccaggaaaaacccaggctcttcgggatctggattcaggccctggacctggaattttgaaatttgttttaaaaaataaagtaatgtttgaaaaaaatcaaataattgcttgcaaacttttaaaaatgtctaatttagaataataatatgtttttaaatctattaaatcatatttgaaaacttgtaaaaaaacactaatta

SEQ ID NO: 12227 - DNA, 1108 bp, Heterodera glycines
gtcatgcttttgaaaaaaaccattagtggtttttttctgtgacttttggcgggaggcacttaatgtgtgtcatgcttttgaaaaaacattagtgtttttttctgtgactttagtgtggagacaataatgtgtgtcatgcttttgaaaaacattagtggtttgttctgtgactttagtgtgagacactaatgtgtgtcatgcttttgataaaacattagtggtttgttctgtgactttagtgtgagacactaatgtgtgtcatgcttttgataaaacattagtggtttgttctgtgactttagtgtgagacactaatgtgtgtcatgcttttgaaaaacattagtggtttgttctgtgactttagtgtgagacactaatgtgtgtcatgcttttgaaaaacattagtggtttgttctgtgactttagtgtgagacactaatgtgtgtcatgcttttgaaaaacattagtggtttgttctgtgactttcgtgtgagacactaatgtgtgtcatgcttttgataaaacattagtggtttgttctgtgactttagtgtgagacactaatgtgtgtcatgcttttgataaaacattagtggtttgttctgtgactttagtgtgagacactaatgtgtgtcatgcttttgaaaaacattagtggtttgttctgtgactttagtgtgagacactaatgtgtgtcatgcttttgaaaaacattagtggtttgttctgtgactttagtgtgagacactaatgtgtgtcatgcttttgaaaaacattagtggtttgttctgtgactttagtgtgagacactaatgtgtgtcatgcttttgaaaaacattagtggtttgttctgtgactttcgtgtgagacactaatgtgtgtcatgcttttgataaaacattagtggtttgttctgtgactttagtgtgagacactaatgtgtgtcatgcttttgaaaaacattagtggtttgttctgtgactttagtgtgagacactaatgtgtgtcatgcttttgaaaaaacattaatggattgttctgtgactttcgtgtgagacactaatgtgtgtcatgcttttgaaaacattagtggtttgttctgtgactt

SEQ ID NO: 12228 - DNA, 923 bp, Heterodera glycines
gtgtgtcatgcttttgataaaacattagtggtttgttctgtgactttagtgtgagacactaatgtgtgtcatgcttttgaaaaacattagtggtttgttctgtgactttagtgtgagacactaatgtgtgtcatgcttttgaaaaacattagtggtttgttctgtgactttcgtgtgagacactaatgtgtgtcatgcttttgaaaaacagtggtttgttctgtgactttcgtgtgagacactaatgtgtgtcatgcttttgaaaaacattagtgatttgttctgtgactttagtgtgagacactaatgtgtgtcatgcttttgataaaacattagtggtttgttctgtgactttcgtgtgagacactaatgtgtgtcatgcttttgataaaacattagtggtttgttctgtgactttgtgtgagacactaatgtgtgtcatgcttttgataaaacattagtggtttgttctgtgactttagtgtgagacactaatgtgtgtcatgcttttgaaaaaacattagtggtttgttctgtgactttagtgtgagacactaatgtgtgtcatgcttttgaaaaaacattagtggtttgttctgtgactttagtgtgagacactaatgtgtgtcatgcttttgaaaaaacattagtggtttgttctgtgactttagtgtgagacactaatgtgtgtcatgcttttgaaaaaacattagtggtttgttctgtgactttagtgtgagacactaatgtgtgtcatgcttttgaaaaacattagtggtttgttctgtgactttagtgtgagacactaatgtgtgtcatgcttttgataaaacattagtggtttgttctgtgactttcgtgtgagacactaatgtgtgtcatgcttttgaaaaaacattagtggtttgttctgtgactttagt

SEQ ID NO: 12229 - DNA, 1377 bp, Heterodera glycines
aatattacataattttttgcgctaaagcaataatatttttcaatataaatttcttttttattttatttttgatggcatcatttgagacgagcaaagggcggacattggattgagaacaaatttcactgggttagggcacactaatttttaggtactgtggcagttataagaaaaaagaaagaaaaacattttgcttgataaatttggggaaaattacgccgccaaatatctatgccgtcaacggatctgatcaatcacttttcgctttcatccgccattccgatcacttttcctgaagacattttgtcttccgctcccatttcaaacgcgcttcttcgtcatcattcgactcttcatcattttccgcatccttctgcgatagtactccatggccgccgttggttgctcgtacacggcaccgctcggcccgcattgtttcggacatttcaccgcctggccctggccttgggcaccctggctgcccggcagcccgatcttgcccggctcaccgggcggaccgtccatgccgcgctgtccgcgtgcaccggcctgaccgtccaagccttgcggaccgggcagtcctggctgtccggggggaccgggtagaccagcatcacctaaaatcaaaaatgtattgatatatatatacagtaaaatttagataaaccatatttttatttttttcccaaaaaaaaaaaaaattacccggtggtcctggttcgtagcctgaagcgccatccgggatttcgggcggtgagaagccgggcggtcccggtggtcctggtggtccgtcttgccctggtgcgccgggttcgcctggtggcccagggtaaccgggcaatgcttcaccgcttgatctgccgggcaggcctggctggccaggtacgccgggtggaccggacgggcccggttcgccaggcgcaccgcctgggcacggtcggcacggtgcctaaataatttaaaattaaattatatgtttagaaaaatatggaaaaagtatacaatatatactgaattagaacccactccctccccccagaaaacctttcttttgagggggggttgaaaaattaagcccccgagggttctatttcattaaatacggttataatttttaaaatataaatgaaaaggtttttaaataacatataattatttatttttagacgactcaaattttaaaatttgtaaattcaaaatttttttaaaaatattgtatctagtgagaattaaaaatattttgaattaataaatttattttgaaatttaaattttgctattataatttttttatcggcttctaacaaaaaacttttgcatggttttcacgaagcgataggccccgaggggaaatcccttactcacatgcatgatcag

SEQ ID NO: 12230 - DNA, 3588 bp, Heterodera glycines
  unsure (1)..(3588): unsure at all n locations
tcggtgcaagtgctgcctctaccatagccatagtattcgtatgcgtgccgtttggtacgattccctccgctggtgccgaacaaatcggccactgaagctagtgcttgggcattgcttctgatctgcttcaactcattcttcagttctgttgctgagcccttgtgaacaaatgaaaatttaaaaggaaaagattttcgtttatttttgtataatcaaaatgttttctaattaaaataaatttttgttataaaaataaaataaatgttcattcttcaattttaaataaaattaattaatctcgttaaaataatatgatcaaaaaaaaaaattaaatgaaaaggaatttacttagtcaaactaataaatacattttcaatttcaaaaaaattttcaatttaaatttaaaaataaaatatttttgaaatattaagtttcattgaatatcattaaaataacaagaaaattaatgtttaaatgagaactgacttggcattggccaatctctctgtacatttccattctcaaattggcaatataatttctcatcatcggcagcgttacagaaagggacagcagtgaaacaagtgcaaaaagcagcgaaatgtggcagacaaatttgtaggccttgattttcggttgaaaatccattgtttgaaggccaaaaagctattgtaaatctgaaattctgaatttttttaaatttttaatttgggtatttattacataaatttatagcgatgtacgaagtcaaataaaaaagaaaagcattaaaaataattaaattttaaaccaaatagcgttaaaaatatggataattttactattcaataaagttattaattaattaaataatttatatttatgttatttaaatatatttaaaatttttaaattgtctttgcaatgtgtttgaacccggaacattttattcagactttgtgtaattgcattaaacttgaggaacatttatttatataatgaaataaattataacattttttattttgaatattaattatgattattattttattcgcaaccctttgatgcttttatacaaaaattttaggcgccaccgacgccaccacaaatttaataaaatgttggccataatcatttttggtggtggggctgactgactgaacaaaaatgaagaaaacaacaaaataactgaatgcaatttggtccaatgctctccccattctaatagttgcgcatcaatccccttagggcaaaagaattttcatttttttaaatttttttttaaatttcccccagggcaaaaattgctttgcaaattttgaagtgtgccccaagcagcacagaatgagaaatgatcatcaaccaacccgacttatccattattattattattattattattgcccattaaaatgtggggcagccccccattcactcacattttctcccgccctttttttgtccatgtcaatttttttgtttcacatttttcaatccgtccaattttatggccggctcggccgcccgcccgtccgccctccgttctttctctccgtaaatgttttttttttgttaatgatttttttgtttcaaatttttatggccacgcgaccatttttgggcgggagaagtgaaacaaattttcgcactgcagcacaaagtgttgtttttttgttgtgtatcacctcatttcaatgccaattggtgtaaaagcaattaattaattttgtcgcaaagagttcaaatggaaaaatgtgattaatacttttaaatattttatttaatattcaaaatgagaaaatgcttgaaataaattaattaaaatgactttttgggttgtatgaataggtaatttacaagaatattaaaaatccttcgaaaattttttatattttttttactgatttttattagaaatgaaaaatacatcaaaaaattatttaaattttttatttttattggaattattaaaaaagtttaccaaaaagttttttatttgaattcattttaatttgtaagatttatgaattaattaatactaaacagtgtcacaaacatgtcttgataatttactcttttatcttcttgattaattgttggcatgtttatcacccacaaatattcataaaaaacgtttagttatacggttaattatgtcaattagcttctgtttcatccctcttactatttttaattacctgttaattagcatcccattaattattcaaaattgattttggttttattgcctcaggcacaggctgattagcacgtaataatggatgatttgtcgttctctgcccatttgtctgtcaaataagatcccccggggcgctgcgcatcaaattttgtgcgcaattgagcaacataaaaaccgccatttaaaaatgcaatttgttgcgatgtccaattattttttaaattttgcaattgttaatgggttaaatgaacacattgaacattttaggtcttaaaatttttttattttgtacattaaaactatcagaatgcaataaataatttaattaaggagtttcccagccggaattatataggaaattaaatgcataattttgtacggtcatttggaaaaagagggaagtcgatatgcattttttaaaattttatttattatatcatttttagaaaagtcgttaatgcgagatcattagcagaagaggctaatacgaaaatggcaaattttattgagcaaatttctgagaattttttttttttatcggtgattaaattcatttaaatcggtcaatcaaaagaatatgaaagttctatatccccattttccgtaatattggcttgaaataaagccgttttataacgggatcacataacttgctccttgtcatattttcaccctaacaaaaatattttttaatataatttttcaattaactaaaatatttcctaaattaggtaatgtctaaaaatgtcaattaaaaaaatacaaaatttgattagcttggaaaaaaattatggcgttttaaactgttttaggctgagttggtggtaccgcatctccaccattggaacgcccaagtgaataaataaaaacaaacaaacatttgattttgttttaaggttttataaacaatttgtggccgtcagtaaatttttacatttgatcttcttcaccattttgttattaagtcgacttgaaactggtttaatgtctttgaaatgtgcctaattaattaattaattactgattgttggtctctttatttgtgaaaaatatggacagcaatttattcaaataataaagaaacatataggtactttcatctcttttatacaaattctcgcttttaattcccgtttgttaattggcggccacatttgactaatattgaatttgttgggtcgccttcgacaataaactaataattaattatcttatagccacgggcaaataattttaatcgcaaaaaaacaaaaaaaataaaaaattacaaaactgaaaaattaatagaaaacaaaaaataacttatttacttatttcaaannatattttttgggctactcaaaaaaaagtataataaaaaacaaaaatttttaattanaaagctttggcaccaatcggcagctatc

SEQ ID NO: 12231 - DNA, 3237 bp, Heterodera glycines
ccctcttcattgaccttaatcaaatttcaataggcaaattcatgctttaaaaggataattttgagttatttaagccaaatttaaaggcttttgggcttgttcaaattacagactttttactagacatgaaaattttaaaaaatacccccccccccccccttagcccgtcaaagtgccctaaactggtgaagcactgagggggcggggggtagtgtggaggtggggctgaacaaattttcttaaccaatcaaaattttttgccggcggcgcctctaaaaatcctcattttttcttaaaaattggcacaattttgcccagcggcgcctatcggcaccgccgtacgccttttccccaaaaaattttcttgaaaaagcgcaccgcaaatcttaaaatgggcaaaaatatatggaaatccaatccatgtaaatccgggccctaatcatgggcaatcaccgcacatcaatgaacgccttctgcaccactttgctgatcacaacggttccttgccggaaatgccctcaaagttggcactgtcggtggatgggtggcggtccggtgaaataggaaaacgaattcgatttcgtaaaaatttaagtttttggcgcaaaattttgggttttttccaatttcgtaaaatttcacatttttacaagtgctttttctatttttgccaacgaatgccgtcctgtggcttattatgtggcacaatcggtccccttttgattttgaaccaaagagacaatgtgacctactgtatttgctgatgcttttgcagtggtactgtggcctcaaatggcaacaatcgttccaattgccgatgccatcgttcaccctcagcgtttggcacatttgacggagaacaaattcaacaaaattgccgaatcaaaacccattcattcattttggaaacaattcaatattcagcaaaaccaatccgagaccaaacgagttatagaaattttttattgtaaaaccatacgatcgatcggatacagtacgagtttttgatgaaaaaatatttttaaaaattcagaaattttcattttttggaaatttgaaaattaaaaagaatttgatgatgagcagcgttttagcgcggcttaattcaataaaaaagtttctctgtgcttcttcgggctttacaattcttaccagttcagccgcacgcgtagaagcagtgaagtggggctgaattttgaatatctatcaaaaatctatgggatgaattgttgggcgtgtactgcacacaaatcgtctcactgcctctgctcttctctagcttctctgtatactgtagcaaaatgttcactcttttccttgtgtttagccttctaacttatcacttaactgtgacgtaaaagattgtacaggaaagagaagaagaagaatgttgggggatagatgaacaaaacataaggaaaagaagcgaaacgatagggcatacatagaaaatgacccccatttaccccatacaaaagttttgtcagcattttctaatcaaatgaccgttcggcacccttttcaccccaagagggccaatggcaatgaagaaaactgtaggctgttttatgcctgtgctccaagcttgctttgcttgcatgcgcggaattaagcacgactccgtcgatgagcctgctctaaggcggcgccacgccgagcattttgcgagacggagatggcttagatggctaagtaacaggccacgctgagccgaggttaatcctcgtaaatttttggcccggggaaggctctgtccttcccttaaatgtcctttggttgtccttcccttccaaccattgaggcacaaacgagcagcagcagatgagcacgattgtgtgcttaaaataaaagaaccaaattcggcaattgagcaagaaaaaagcccgaagaagcactttttgaattttcaaaataattcatccaccgttgaaagccgacattattaatgaatataattaaaaaatatatatattagtgaaaatcattttattggaagagagcggcattagtgggtggccactggccagccaatggcttcggccagcagtggccggtggtggtcatttgtgccaaatgcttggaggaacattagcacttttattgattcgtttggccactgacaaaagcaggcgcttcaaaatgaaaagacacgagcagagaaaacagaaaagaagcagagagaacaaacattcggtgaaatttgataatggggaggagaagcattcgaaagcatcaactttttgattttttatggttttttcactgtcacttttgtcacccctttggcattgaaaactcgagaatcaagtcgtaatgccatccatccgccagctgaaaatccaatctttaaagtaatgctttggctaatttattccgtcaaattgcaaattattgggcatggaatagctgatgaaagcggaccgacagcagttcgtgttttgatgcttcttcacttagcgaaagctcttcattaaaatttgccataaaatttttggctcgtaaaagccaactaaatttatttggtttaaattatttcctaaaatattatataatttaaatatagacaatctcggcttatcctcaatgaaaggcgactgatacggtacttctttaatttgatcatgttactgtttttgctaatcaaaaatttgtctgacattcccaaaatatgttcattcacaaatttatcggcaaaatggtgaatatgaaaattaaaataaaataaaaataaaattggttttcaataattgttcgcttttttgtcgtcttaaatgtcaatcatcatcagaagattgaaaagctaaaaagttttaaatcagcatcaaaagttagataaactttaattatttgaggtttttctgtgctcttaaatttgaggttcaaattttccttcttcaggcgcataccgtattatctctaattatcccccgtctccatttatcccatcgtatctaattatcccctccccccttttctgaagaggttgagaataatcccccgggggataattagagataacacagaattttttcccgcacatattgcttagtgcgcacacttttttggagataaacattttaacaattttggcatttttccggtgtactgtatttcatatttgattttacatatttatgtattatatttacgattttccttatgggaaaatcaaatcactcttcctcctcggcaaataaaaaaatattaaaaattggaatccaatgcaaaaatattaaa

SEQ ID NO: 12232 - DNA, 3786 bp, Heterodera glycines
  unsure (1)..(3786): unsure at all n locations
tgcttcctccagtgattgctccaatcctgatttcggtctcgttcgtctcgctcgttcatagcgcactactgggttggctctttgtgctccctgtattggggtgttgtagtacgggaacagcgcccatttttgcatgaggtttttcagatattttttgagaaatatcatgacgatttttcccaacacgtagtcactttttatatagatttctgttttcaagcttttgttaattattattcggggttttattttctaataagaatttcattttttgccctttttcaagcgcaattttggaatgcgaccgattcattacagggacaatcattttgccctcattggcaatagcaactgtcggctcgacgtgcagatcatttgaattatccgatgaaatcagaagctcactagcttcatagttttcattgactcccatttccaaaatcttcgttgaccgtggctcgatggttgtaccgtaaattacagtaagaagatttttggaattcagtactgaattctcaaattcaaccatcgaatcatttgcctcgtcataaagcttaaagcccaattttccaagtccatttgtgccgatcagcatgtcaaaaccgatcgaagcttttgtcacatgcacagcgattttaacttctgatttgagaccacgactatgaattggcaaattcactttgaacaaacatggcaccattttgccgttgacatagagaacgcgcacgtttgtttgcgacggttcaagggagtcgaaatccaaatttttctcttttaccaattggtaaagaaaattggcacttatcagtgatatttgggcaccaccatcaagcattgagtccgtttccactccaaacgtcgaggttttcacgaccatcacttttccgatgggaggaactgcctcattttcacgaccaacaacaagtatttccaaaaaatcatcgacttctggcgcaatttcgattttgccaaggcaaagatccgttgtcacgctttcttgttgctcgacgatgcaattttgtcgaagaaaattcgaagaatttggtttcgttgaaccaaaatttctatttgaattttcaaaagttttgttcgaaacgtttacgggttgggtttgggccttattttgggcgtttgcctcaaattgtttgggccttggacagttccgcgaaatgtgcccgacttcattacaattgtagcacttccacagtttttgctcaaaacttggattgttttgtctgatcggtccattatttggttgaaatccgggctgccgatcacgaaaaattggttggaattcgtgctgccgttgatattcccgattaaaattagggttcttgaaactgagtttcattccgatcagtctttgacttttccgcagccacaaaacgttgcgttgcgcgctgtgtcgattccgcacgcgctgctagcgaaacaaaatggtccaaagacattcgaggcgttcgaatgagttccaaattaagtgacaaagttgggtcaccaattgatcggatcaaatatttgatggagaattcgtctgacaattggaaagaaagaccatggtaggctctcttcaccaaccccgaaattcgacctgccaaatcatcaatcgattcgttgggttttcgtcggacctctaacatcagctcatcaaaagcattcaagttttttgagtccgtttcctccaactgtcgcatcatttcaccccgaagcagttcatactttatcggaatgactgctttcgccgcttcaagagctctttcagctcggccatacgctttgctttctagtcccttaattcttttttcatccggccaactgtcggtgtaagcgtcgaatttttggctttggggtggcatcatttggttttcgtaaaccggaaaattttgctgctgtcgcgccactggacggtacaaaacactgttttgttgctgccatccacgctcttctcttggtggctgttgatgcatttgcctcggaatctccgttgggtgcatcatttgacgtccatcctcaaaaagatgtcgtccaacgaattcgttgtgttgccgttcgaatggcaaaaagccgaagtttgtgttttgttgttgccgcgctaacgcaggttgttggcgaatttgaatttggctggagcgaaaattttcgtgctcccggtaggggccaaaatcctcataaatttctcggtgccggatttggttgcttacaattggaaagttgtgcaattcgccattaaaatttattggcgtcgatgtacgcccaatgagttcgctttgcgaaacatgacgcgaatttggcgccgtttcccgaaccaaatttctgttaatttgctcgaaacgcctattttcggtgccactctcaacgaatctcatccttactccttcttcacgcaccaaaaagcttccaaaatttggtcgcaaaacttcacgcaaaccttcaacaaagtcctcgtgaccaacattttcattgcgaatttgctgctgctcggcgccattgttgccaccaccgtttgctcgcggcggtaaattcgattggatggacacatgcaaaaggcgccgccgaatttcatcgtcatttgctgctgctgctgccatttcactaaaatggtgttcgttttcctccgccgacaaactcaaatttcggttaagtcctggcgagatcggagcgttaaccaatggttcattttcagcatgaactccttcaacctgttgttgttgctgctgctcttcaaccgctgcgttttggttttgcgcaaaggttcgcaaattcaacgctctttgtcgtgtcaatggcggcgaacgaattatcatttttgcacctgtttcaggtttagcaaaaaccaaacaaaattttgctgtcggcagtttttcactttttcgtttgatggtgtggcgattaggacggtgaatagtacggcgaatgcgaaagttcggctcgaatttgttgcaatttgaaaacgttcgactcgaatcgttttgttgccctttgtcctggctcaggacttttcaactccactttcttcttttcttcaaattcaactccaacttcttttcctccaactttttttgaaattcgccctggctcagggtcaattcaattccgttgattttgttgtccagttcggacttcaaacaaaactacctaattccgatctcgcctttccccgtttacctgctgttcctcaggagcgccaaataggaaagaataccgttttccttcaattgaattggggggtggagactagagcccggaaatttcaaatttgcggatcccgctgcgggactggaactcaaaattttttgcgggacgggatcccgcgggattaatcccgcaaatcccgcaatcccgcaaatcccgcatttaaaatttgcgggatcccgtgcgggattgcgggattttggaaaattcgaaaaaatttcaattaaatttaaaaaatttccaaaaatcaaaaaatgctgaaaaataaatttttaggggctgtcgggatgcattaaaaggggctgatgggtcgactaaggtttttcgattggatccgacggtaaaaagttgatcggaaatcaaattattaacgttcataaatttgactatttttttttcttcaaaaccacttttttgcggtgcaagaaatcgggaatttttcaaaaaatatacaatataataaaaaaatttctaaatattttaataggctaaattttttaattcttaaccaagtaaaaggtatttcacaaatgtttttagtagagttcgaactgggacctggatccanggcctggatttttcctggatccaggt

SEQ ID NO: 12233 - DNA, 1064 bp, Heterodera glycines
cctgggcctggatttcctggacaaaaatccaggaaaatccaggtccaggaaaaacccaagctcctcgggacctggatcaaggcctagccctgaattttatgaaagttttcttaaaatgaaaataaaggttttgcatttcatgttggacctggacctggatttcctggacaaaaatccaggaaaatctaggctcctcgaggtctgggctaaatcatggccttgatttaaatgttttaaattttttttttgaaaaagaaaaaaaggtttatattcaattaattgctttggaacatctaaaaatatctaatttataataataatgtgttttcaaattaatttaatcattttttaatacttcaaataatacattggttaccagaaatagtaaattctaaaaattttgtccaggaattccaagtttttttttcgtgtttagcctaggcctgggcctgcatttcctgcataaaaatccaggaaaacctttttcatttatttaatcattttttgataactcaattacattgattaccagaaataataaattctcaaattttgtctaggaaaaacccagtttttttcgtgtttagcctggacctggattttttcatagacacaggtccaggaaaacccaggcctggatccaagtccaggtcggtctctagttgtcataatttttatttattttattattattaaggttgacatttggcaaatgcctaaaatttctgtgcagggtttagagctctgacccaaaattttttttctctgaactttgcaggttattagaagctaaggaaacaatggataccaactccttaaaatcccagctctacatactaattatcctttaataatgtgaattggcaatggacgaattgagccatttgacgaattgtctgtccttcaccgacgaattttccaatttattgaccgaaaacattgatgaattgtcctttactgatgaattgtccgttcattttttcgatagattatttgtgtcttgttgacgaattgtctgttctcaccgacgcattttccaatttattgaccgaaacaatgatgaa

SEQ ID NO: 12234 - DNA, 4540 bp, Heterodera glycines
ccaatctttgcgaccaaatggatcagccgcgccttctcgcaattgaggaaggctctaaatgggcaaacggcaaaactcatcaatatttcacacatatgtgacatatgcgaaaattgcttacggtaaattggctgacaaagaacggtgcgctcgtaactccttggcaggctcttccggcttcagaggttttggcgtctcaatttgtgctgttgtctgttgcgcaccagccatggactgttggaatttgaagctgggcttctatgccctcctttggtgacaccgacaaatgccaaattagcataacatgagcataatagataaaaaggtagggataattctcttttatatgaactgatgcgaacaaaatatctccactattaaacatcatcctctcttattgaccaaaaatgccaaaattatgtaaaaccaattaaattggctcctatcaaaaatgaattacctaattgcccaattattttgaggattttgaatgatttgaaaattattgtggaaaattttcgaacaaattttttcacgatggtttgtggtttctaaagatgaatgaatgaaaaacgaaaaaacatacttcataagaatttgtataaaacccaatttattcgagaatttatttatttaagacaaattatcttgtcataaatggattttttggtaatcacccaatttttcagaggcaatttttcaaaatttaccctaaaatttgttttttttcacccctcattttttgccattcccaaaaagctagtcaaaaaaaagattttcagtgccaatgttggcattgtgctttcccccccccccattggcacccttccaatatgatcctcctcttccttctgctgactggctgggttggtccggcattttttcaactaacccccctcttgccagccacatcatccgtaaatttttcccatttttctgattttgacaagctcataaattatgcgccaaaacagcgtggcacgcgccgtccccccggggcggtgccacaaaagtccaatgctaatacatacaacacacacagagcttattattactatgagatgagatgagatgagatgaacggcctgctggtgagaagaaaagtatcgcatcgccaatgatttttcaagccgataatttgcgccattttttcccgcattgttcccacgcttttcctccctcattatgctttggcaacatttcagtgtgccgctgtcaccccaccccctccctcctcgcctatcccttaaaagattggcacatttttatgaatgtgccatgagaacggcacaatgtgagaaggggattgaaacatttttaagggggtaatttaattaggaagtagtccctttcttatcccattttttaaaaatgaaaactcaaaacttgagtttatctgcttatacccaccaaacagggataagtcgccgccccctcctccgccccgaaaaaaatgtcgatttacgcgacgcccaaaaatttcgggcggaaccttaaaaattttcggaaaaaaaaccggtttaaagtaacctcgcccctcacggaaaccaatgttttaatatgctcgagagtctcggtcttgaaaatcagggaattttgaaaactttttgactcggaatttgcaactaattaaggctgataagcattttttgtgaaaatttgctttttttttttttgccatttctccaggcgctatttctgtgtttcataattctccaatttttgtatatcacaatacttaatatattttttttcttgtgcagctctaatttgcgatttcacatcttgctgctgattgaagcgcctcaatgttacgctggtaaaaaaaagagagcaccccttcccctgagaaatttttaaaaatgttcaaacttagaaatttttgaaattaaaaatattttttcaatattttttagtgggataatttttttttttttgtaattttctaataaaaagtttttaagttttcagttaaacattttcaaaattaaaaaactaaaaataaattttccaaattttaaataccgtatttgctcgattataacccccgcccccctcgaatacaaccccaccctcgaatacaaccccctttttgaaggggttgaacaatagagagcccctggggctctaatcggttttcatgtgctcattttggcgtacagaattttcattgaaaaataggtaccaaaatattttatgactcctttcaagggggcagaaaaacgaactctcggatttaaattcagaaaatttggtgttgccaaaaaattgcagcccttaattgatgatgatgagtttaatgatcattaaatcctaaaataccgcaaaaattcttttacaaatcaaattaaaaatgtttttttattgctttaatttgtgattcaaaaatcgaatcgaatttgatcaccaccgaatgatctgtctgatcagtggcataaaatgcggtgaactgatcaaacacactttgagaatgaatgaatgaaaaaatgaaatgtggtggcgttttggtgacgaaggacagaaaaaaaaattatttatataagaaattgatcagtgtcaaccctctgaaaatcaatgctctttcattaagcccctgcttaaaactgaactgatcacatgcacaagtaaatttttgggtcaatttttagaattttaaaaatttttctttttaaatttttcttattagcgatttaattagaaggcttgaatttatctaatttagtgggcagtttgatttgaacaaaaaattttattttaaattcgcatttttacattttacaaaaaaaaatgataatgaaaatatattatttcttagaaattcaaaaaatttttttttgcatttccaatttaaaattttcttattagcgatttatttagaatgtcttaatttatttaaattattaaaaatatattttaaatatttctttttatttttgttggacagctttatttgaacagaaattttttatttttttaaaattcacatttcagccatgttaatccaagaattttcttggcaaatcttttacagaaaacactttggatttggcaaatcccaaaagttttttatttaaatttttttttaatttaatattttagcaatggcattttcactctcatttaaggtcatcggtgcaccggcgcagttcctattgggagccggaccaacgagtgcagcaacggtatgccggcagtggcacaacgccaacaacggcaccactggtgaacgcggcaacaaaatcggtggatgacagcggcggaaatggtgaaacaattttttgatttttgatcttttatcagggctaaagccactcataataatatctggcctagtttttgcattgtctctctgatcactcacgaatgcctttgatcagatttaatcattatatctcgacattcgaccaaatttttgccaatcggcaaatcttttaatcatatctgatcactagggagtaaaattatatggaaatccatatttttttcctggactgtgggggcctgaaaggcacgaaaaacatgtttttagcttggtttgaagcttctaggatggatttctatatccatatttttccatatttcgcgatttatgtccatatttccatatttgtccatattatggcatttttatccatattttatgtccatattttggcatttttccaaaaaacctctattaaaactgcccccaacagataaattggctttttgaccccgaaaaaccggaaaatttttcaaaaaccagtttttagcaaaatttttttgaaaaattgaatgaattgaaattttattaaaaattgttaaatttatatcaaaaataagcaaaaaaaatggaaactttcggttttttggttgatgttctcttaaaatgttttttttcttctaaaacgagttcttatacaatattcagcgattttagatgtattttacttgaatttaatgaatttaaagaatttaaaaatttccacactcaaattggaaaaatttatgtccatattttgccattttatgtccatattttcgatttttggtccatattttatggccatatttcgtgattttatgtccatataattttattccctactgatcacaaatgctataccgattgttagtaagggtttgaatttttataggaagatgattgtgaaaaaaatattttattttgaaaaaaataatttgccattattcataaatcccttttttctatatttaaaataaatccgaaaatttctcattttttgtcaaaatattgaaaaaatggcgccggaaattgccgttcctatttaaccaatgcgttttttcgtaacaatttccattttctaatgcaaatttttctcatttcccaaaacattttccgctcatttggcccttttccatttgtcaaggccacaaaaggacggacccatgtaccccaaaagtaattaggccagaaaaatttactcgtgatttgttcaaggaggacgaaaatttcccgaggttcgataccgaaaagtccggagacttttctcgagtcgttgcttggctccgagactctcga

SEQ ID NO: 12235 - DNA, 2515 bp, Heterodera glycines
  unsure (1)..(2515): unsure at all n locations
caaaagctaataatgatgatgaagggtcggtcatcncatcaaaagatatgagacggacattgtttttgagtagttggaatgagttgtatataatgcatggtggatggagtatgacgagaggaatatgttacgggtaggaagaataatattttggtatggtgggtataaatgtaaatagaaagcataggaatatgctacagttcaaaagtgctacttagctaaaaaaaattacggtagtaaggttaaacacattgtacaaatcttatcagttgagaaagcatggcatatttaataagtgattttgcggtaagaccattccatggccataaatttgaggacacacgacaaaattaaacaaacggaaagaattaatcacggtcattattaacatttcatatatgattatcatcaaaatttgtgtgctaccgcaaaaattctttcttttggatgataagactgacagacagcgaaagattattttgtgagggcaactcaaaatggcaataggtatttctacaccacattatattttttgtacaaaaatttttaaaattttaagggtgggattaaataagatccaaaataaaaatatttaaataaattttaaaaaatgaaaatttttaggatttaaacaaaaagttaacgagcagagaatgtatttcattagaaaactatttattgtttaatctaaataattaataataattttcaatttagcttcttaaaaattaagggaataatggtctaagaaagtaaaaaaaaaagtcaataagtaaagaatattattaataaagtattcttttatatatttaataagaaaatacattttggaatttaagttaaaagcagattttaaaaaagtgtattcaaaagaacggaaacgcagcgcggtaacgagtcgcgcacaaatgccctatttccgctagaaacagcacagcacgccaatcagtcagatcggacggacacgacgacgaatgtgtcgtgtggcacaaattatctgcttttttgatcagcaaacggatcaacaactataaacaaaaaaacagcaccatcggtggacacagtgtgcgcgacttccctaccccgggggctctcttcttttactaattacccaattagtgagttaatgagtgacacccaacaacatacataacagatcaaaaaggaggaaagagcatgatgagtgagtaaaaaatgagactaattgtaagtaaaacgtcgtcgcctatgaatgaatgggcaggaaggaattgctttacgctttttctcccaattacggacccccccccccccccgctccatccccgccgggggttgtcgtcgtcactcactgccccgattttttttgggccgtcaactcttatcggctgctacgatctgtgcggcaccgtcgtcggctgtcgcctctgatcggctggcagaaaagttccgaccccgcgggggcggcgggggactctttcgctattttttgcgtgtgtatgttttatcagaaaatgaatgaatgggtaattaatgtaatgggatggacggatgggttgtccgtccagcagcactggtggcttttttctgggaaactttatgcaaaatattattattgttatatcgcaaaaacaaaataaaaaatctacggtattcaaaaaagtaaaaaaaaaaataaatgaaaattattatttgttttttaatattcaattcaattgactaactgcatatattaattacaagagctcccttttaaaaataaagaaggttttacttaattaaaaaaagatatagctatttaattgaataaaagatctttaaaaaacgacaattagttaaatttagggcagacgcaaaaaaaagaaaagccgcgcttttccccaaaagaaataaagaaaggattgattttgttttgggcaaacacatttattaatttgttgacatgcatttggatcaaatttgtgtccaaattgttgtccaactccttcccaaaaggtgtctctccccgctgtgtatggcgtataaaataaaacaaattcctttcccggcggcgttttggccggccaataaattattagtataaattattattaattgttattattcattcatcaaattttgtgtcaccatttacacaaatgtttccatctgcgccaaagtgtgtgagcaagcacagtttcgctatgttttgagcaataaatttttcggggcttttggggggagggggcaaacggcggacggcggacacaaatcgccggcggcgcaatgaaatgaatggatggccccggtcggccatttcatcccatcccttcgtttcttcactttgcttcctccctcttcgtcgtcttccttttcacccccaaaatatgtgtctctccaaaggttgatcggtcggttgtccaccattttctgtcctccccttcccccagcagaaggacggacaaactcaatgactgtccgtaagttattggcgcgaaaaaaaaacttttttgaaggtgagaaaacgccatttcgtggagggggggggggggggggg

SEQ ID NO: 12236 - DNA, 2764 bp, Heterodera glycines
  unsure (1)..(2764): unsure at all n locations
acgaatgttttgggggcctaaaagagaagaattggggagaaatacggagaacacccaccccacaacaacccccgaagggtggtgggcgaaatttgggggaggggggagaaatgcattcatttggaagagtggcgcgagtggtggtggcaccaaaaaagacggcgcgttcggatggtcaacagtcatcagtgagccaaaacatctttttttgattggttaatgagcagtaatcggcaaaaaaccattcaaaaaatcatttgttcatctctaaatgatgtgctgccgattgggtgcactctcggaaaagagcatcagtttatgagcagcagaaggacaattttgttgggtcttttgtgtcatgcgaacgaaattcagcagtttaagggcaataaaattggaaacctttaataaaatttaatgaccctgttcaaatttgcgcgtggcctgggtcaattcggcgcgaatttttccgtgtcggcctcagagaatgcttcttaccaaaatttttcaaaaaaatacaagcctataaaggaaaaattcttattcaaccgggaaaaagcttagcattttcgtagagattagaatgtttactaagaaatgaatgttgtcccatcccatcagggaaatgagattttttgcatcagtattttcatccagataatataattaagtaaatgatagtaaaaaaaaattcacgcaaaaaagccgatttcttgctcttaaaagggatacataaggattaaccaaggaatgaatgttaaacttttcattagtccatctccgccgggggggggggcgtacttttgggcgtcagttttattaaccaagcaataaacatgatgaaaatgatggtgataatgatgaatgtgttatgcgtttgaaccaatcacagctggatggatggatggtcgctgcgcgggaacaaaccgaagaatgtgcggagagatcagagacgaatcgccgagggtggcgccaatccaaccaaatttgccgattttgccaccattcttgaccccacccatgtcattagccagtaaagacagatagcagcagcacttcaacgtcaagctgtgcacacatttagaaaatgggggagggagagagagagagagaaactgggagtgattgaatgattgttgattggaatgttaacacaatcaaataattggatttgaatatttaaatttgaaaagagaactgacaagagggtggtgaaaagtacagacagcaaaattttgaaactcaaaaatgctaataaatgaataaaggcaggggtggcatatattttttggaaataaattgcattaaaattctcaaaattttctcggcgacgcctaacggcaccgccggaccccctattttaccatatttttgaaaaatgaagaccaaaatggcaaaaatagatagtaattttctgatgaaaaacggctaaaaattttgtaaaacacacccctaaaaatcaaatgaaaataaaccccgaaaatcgaatttttgacatcagccccccaaagccaagggtctggttacgcccttgatctatgtacattgacaattaaaaattgtcttaaaaaacaaaaaattcgataaatcatttttcagaattagaattaattcccctctgatcagagcattgcaccactcgcaaatggcggaatgcccactccatctgcacaatttgcttacagtactcacttcacgtgtcattcaaattcgcgctttgggcatccaattttcgcgtggaaacgccgcaacttgatcgcctaacgcacaatgaatgagtgaatgaattgcatatggatgaaagggtgtgaatgaatgaatgaatgatcatcatcactacctctcttaaattacacaaattgcttggcgtcgtgtctcaaatttgtgccgcctttgccacccgcgccaattcaaaattggcgtggggtgggagacaatgagaaaaagaacaaatctgtgtccttgcgaatgcgaatttgaaagcgacggaggaattacatgggctgtgaataatcggggaaccgaactcatctttttagggagattttctggaagaattttactgaattggaattttccactgcccatttgttgtgccattaaatcaaggataaaaaaagaagaaaaggatttgcgcgtttaaagaatattaataattaaaaaaccaagacgtttatttcaatgtccatgtaaatttatttataatttaaaccgaaaaatttaattttgcacaaataaagttcaagttacaaaaattatcaaaagattacagtaggggctagaaaaagaaaatatgagatcagaaactgtacttttttaaaaataatattaacatctgtgttttttaagaaaaaaatttatcaattaaaatcagtgaagcacaaaaagaaagaatttcccggattatagcgctttaggtcttcaaatcgcatggaaagtcattctgacagaattatgctgtttatgtgattctaatcttagacttttttccatagattaaaatatttttcccagtaattattttcagaaacaaataattaatttctttgttgccaaaataaacaactattaaatttcgaaattactgatttttgtatattatgattacttggtaaagaaaataaccaattttaaaaaaggtggggtgaaaaaacagtaaaaagcatctttagttataaagagggctttattaaaaaaattggacaactcttttcgtgaaatacggtaattgcattaaaaaacttttcaagcanaattggtttat

SEQ ID NO: 12237 - DNA, 2784 bp, Heterodera glycines
  unsure (1)..(2784): unsure at all n locations
ttttttcattttttaaatttatctcctttttttattcattttttattcatttatataaaaccacccttctcaatttccaatttaataattttnaatttcatttccatcttcncacacttttcaccaaattcctttttaatttttttaaattaatatattaatatacccctaattcctcacttttcnctnctnctcaacaaaaacttttccatcagattgtccatcgttgtccaaactaattgattcacaattaacttctgaaaatcatacaaaatttaattcgtaaacttaaattaatatttattttcacacctaccaaaactcaatttactttctacggtttctttctctttttctcattacctccatctgttggtgtgaaatcgccatttgttgaattggtcgaaattgacatttttaaaggtattgaaaattcaaatccttaaatcattttcagatgttttttaatatataattattatttcgttaaaatttcaaagaataaagaaatgagcatttatttttctgctgattttttaaatattttttagggtcaattaagaataaattgaggcaaaatgatgacccataggaattattcatatttaaatttgccattaaaaattgtgacctaataattgaatggatgaatgaaaagaataaataaaaatgaaaaatataaaccaagtaaaggacaatcagagaaaatctcctctgattgtcctttgtttccttttttgccttcgactcgttttgctttgcaacaaaaatgattaattttgtgaaaatgtgtctataaaaaaattactgaactcaccccttgagtcgaggtcggcgaaagttatacattccgaagaattgtatttttataagggaaaaaattatttttcaaatttggattttttttttattaattttggccaataatttttgaaaaaatttatttattttttgccaaatatttaaaaattgatgaattttattgtaaaatttataacaaaggtcattaaaaatttttaatcaatcgtttaattgttatttagaggaatgcaaaagttaagtgaaaataaattttgtgttggaatggtatggatcacttttcaaattaacccggcgattagcatttcggccaaacaggcattaatttggctacccgacatatgaggacctgacatttaaggacccgacttattattttgttaaaatggtatcgaataatgaaatgagcattcattcttctgctgatttgcctaattatttttagagtcaattaagaataaattgcggcaaaatgatgacccatagagaatattcataatttgaatttcccaatttatttcagcaaaattgtgacctaataatgaatagataaatgaacaaaaaataataatctcatgattgtttttggccggttccttttttgccgtcgactcgttttctttgcgaattaaaagtgattaattttgccgaaaatgtatctacaaattggggtagggtagaccccaacaacactccgagtcgtggtcggggtaaaaaaaaacatacacaccaaagaacagcaggaaaaatttttgtacaaattttggatttttttttccaaaattgtcaatttttagttcaaagcgcaccccccccccccaaaaaaaacagcgtgaaaaggaaaaaaagagaaaagagatggaaattaaaattaatatttttgtggtatcattcaatagctaattgttttccaaaaaaatttatttaagttaaaaaaaaagttataaagcattgaacattctatgttttttgcattgttcatgcattataaacatatttttctttaaaaatcgagggaaaaaaatatgagtaaatgagtgtcaatgataagcaaaaagctcatcaggatttatatattttttagggaggggacggcataacggaaaagtatcgaattggaattgttagtttgattaaagaatacaaagtcgaaaatctcttttgcttgcaaaaggccttatttgagaaagtctaatttaaaaatattcatattgtaaaaatacataaaaatgaccaatgagcagtaaataaatagcaaattcttttggtcaaattttattgtattgacgaaaaattcgttcacaaaaaagagatagtcaattttgcttttgtatttcctttttctctcaaaaattgtttagtgaaaatggtcctcctcctcctccgttggcattttcgccttcgttgcgaccaaaagtgccaacatttgcggatgggccaaagccggcttgccgtttgccataaaatccgtagggatagccgtagccgtaaccaccccagcccttaaaaagaaattaattttaaaaaattaaattttaattagggacgaggaaaagtgaatgtcaaaagttaaatccgacaatttttaagatttaaattcatccgcgaaaattttaataatatttcgtacataataagcttgggtctgctcaatggccatgccaatacaaaggacgagcagaaacagtgaaagcctaaagggatttttaataattgggtaattaatgacggatatttacaatttaattgctgataaagccattttttgaatggattatttgaattttcgggaaggaatttgttgttgaaaatgttttgaatgtgccacaacaacagttccatgcccttaaatacttccaattttggcgcaacaaaaacaatttttttctgccaatttctttctcaagtgccatacaataaaataacaataaaaaaattattccaaaaataatcgaataaataaat

SEQ ID NO: 12238 - DNA, 915 bp, Heterodera glycines
  unsure (1)..(915): unsure at all n locations
aaattgttttttnttcttagtgaattaattggataaatctaattgtttaattttatttgacataattttttaagagttatttctattaatttccagcagaaaatcgcatttttccactccatgaattaataaattgccttctcgaatttttgagatttttgtcatgggttttttcctttgtttatttctttatttttaattttataattattattacaaattcttaattcgctttgcaaaacaatacaaaaaattttttgtttccaaatctattagcaaaataaagctttctattatttaaattaaaacaatttctagttttatgtattaaatagcgattaattacgatttaaaataatttgcatggcccatttagtctgatttccattttccgcccttcccaatttgttcgttagtttttgaatttaattcgaagctcttagtttgaaggagtctatagttcttgttagtagggccgcaacttttagtgacgaaaaatcccaaaatagttaactaaaatagtgagtaaaaatgccaaaatagtgaagaaatagtgacaaaaagtccgaaatagtgacgaatagtgacataattttcagccaaaaaataagccaaaataatttttattcactgattgcagttgcaaatgagtaggactgggatttttaagaccaaaaaacccaaattagttacctaaaaaaatttttaaaattaaaaatttttgccaagaaagtaaatttttgagaaaattttttttcatttcataggagtatattttgaaaaattgtagcttgattcttaagggtgtattttttgaaaattttttaggttgattcttaggggtgtatttttttgaaatttttttaggtcgattcttaggagtgtattttttggttttattgcattttgttaagg

SEQ ID NO: 12239 - DNA, 2382 bp, Heterodera glycines
tccgccattcgttctgttccgctcgcgttcgttcggtccttctaaggacatggcaaagtgccaaggtcgggaaaatgttcactctgttaatacgtttataatgttattctaaattaaaaagattctcccacctccaactgtcggattttgttcaatgcttgttttaattcctgttgtgaattgtccaattgctgctggtacacgctggcaaccgaaacatcgctagcggcgccatgcgtcgtatcggtggcgcccattgtgctggccccggaggaggaccccacgcgagagaggggcgaggcggaaacgctgccgggagatgcattcattgtcagtgctgacgcagccgcctgctgctgttgattttgcatattctaaaaggcgcgaaattctgataatttaaataggaaaacaatacgaataaaaaaagcagcagcatttagtagttcaatcaaatttgaccgtaaaataaccaaccctaactatgattttcagcaaccttttttgaatttagcgacagaaaagcaaccctaaacacaaattcacattcaaagtgatcaccgcaaaaagcgccttcttggagaactcgcgggttctgttgtgttcttcggccaattgttgtcgcagttggtccaactgttgttcgtattcactatattaaatgttgttttattaaataatactttttaaaaacgcactccttctgtctcttcaagtcgttctctaagccggtgcatcgctgccgaagcaattccatctccacggaaatgccgcctttccccgtcgtttctgccaactgagtctttgccatttccacccgaagctgaacaaataaatgctatttgagacgacatttttgagaattctcccactttcattgtgccaatttcactgtcgcgctctttgagcgctttctgcaaattgagcaattcctcgtcctttttggccaattgccagcggattccatccgcctcaacagcttcctttttacgtccatacgcgcgttcgtttagaggaacgaagggatttccattgattgtcaggggggaaccgttccgcgttggatcgccgtctttggcgcttggcggaagttccatcgacgaattctccagcgcgacactgagctcgtcaagcaccgttctgacaagttcaaggcccctctcacgttcatcactttaaaattgcaattgacagccgataataatttagtacgaaataaaggcaaaaattaaacgaataacggaaaaagacaattgaaaaatggaaagaacttacaaaatatggaaggcgacctgttgctgattgtcaagacgtcctgcgaatttttccacttcacctcgcagaaattcgagcagttgctgcgcgggaaggccttccgagtcgacggcgctcagttgggagacggccattgcgcagcattcgttcagacagcacatgcatttttcaagtgcagcaatcgcggaaagaatacgatcagaaagctaaaaagaaaaaagtggaagattggggaactctttggtaggaaaagaaatcaatggatgtatggggaaggcaattgcaccaatccgatgaaaccatcccgtcccgtccaatgtacctctggaccaaggatgaggtcattctctgcagggatccgattcagtgcccgaatggtcagtccctcgcattcggtgagtgtcgccgaaagtcggtcagtgaaggcgagaaactccacttcgacagctggcaaagatcaaaaaaatattttcaaaaaattccatttaccttccaccgaagtgggcaggttgctgtgtccgctgctgttcatattctttgccatcagagacgaatgaattgtcgaggcaaccaattccgacgaagtacccgaactcgtcgaatcggaagtctgccaatgtcagaatttacaaaagcaaaattgggaaaaaatttatcagtgcatttgcctgtggtgtaacgagaaagtttcgaagtcgttgagtgttgaattgggcccagccgagtccctccttcacttggaccaatatgttccgcaggtcatctcgcgcattgtacgactcagtgctcaaattggcggagaaaagacgctaaagacaaaggaatctgttttcatctgtgcatatccaatgggacacctgaaagtatttgacaatgcgttccaattcggccaccgatgtgttctcatcaaaccgattttgacgcaaaaggccaaaatattggtccaacgacttctcctggagggcaatgtccaattgaatagtggccaaacgagacaacgctttatccgcatttggttgcttcagaacgctaaaaaaattaaacattcggaaatatttagacgcaattcgaaaaaagaaaatatatggtagaaaaaagtttttgtct

SEQ ID NO: 12240 - DNA, 1723 bp, Heterodera glycines
  unsure (1)..(1723): unsure at all n locations
tagaaaagttttgtctgttaagggtgaattattcttcgtntcttccttacgaaatgtcttctgcaaaatgttgtgaacacgtgcaattggtagccgaatcggcgcacatgggcccattgttcagctttgtgcgagagagtgacgtgctcacggcgtagtccaccgggcaccggcggatactttcgctggagaagacgcgccaaagacaacgctttggcggacattcgggggaacaaaacacaaagcaaaaggcagtcgttgtcccctgaaggaaaggccaaaaatgagagaaatgagaaaagaaacaatttgtgcggtgtgtttggagggaatgaaggagccaatcgtatgaatccaattgacccctttggcattcggtccttggcaattccttgggtttctttttccttgactcccggacataacaaatgaatgcgttggatttgttatgcttcagcgcaaggcaattaaaacacttaaattcaaaaaacaaaaagttaccgccgggttttgtgaaattgtcgggcaaaaaactgcgcaggtaaacgctttgctgtttgaacgactccaaatcaatggaacactgctccatctcgacaacctaacaaccaatgtatcaactatcggtttaaaaatgacttatttacctccgaaaatgttctgttaacattggccagcagtgacatttccgcgcccgcattccgcgacttttcctcgtcccgcgcgtgcatcgtggccaattcgtcgtgcaaattttgcacccgttcgttgagttcggcagttttttgtcgaaatttgacgattacccgttcatagtcaaccgcacggtcttcccagtcggaaatttgatgtttcaactgaaaaataagggaaacagatttttttcaaatgaaggaatatattttttaatttccctataaataaaattgtttcttaaaaaatcacattggaaatggcgatcatctgttcgtccagctgctgtttcagcgccttttccgtatcttcttttccctcaatgattgcttcgttcaactgatgcatttcctccaaatcggaaatgtccaatttatatagcctaaagaaagaaaaaaataattattataacagaaaagacggtgaaacatattttatctgttcttcaaggtccaaagttttgctggttaaccggtcgatcatttctgccgcactcatttgattgtcgagcttaaccaatgactatgtaggttattgggcttcaaatgatcagatggagtgaggggcgggggggggggggaagctctgccacacctcccaaaaaataaatttacattctgaggaaaaaattttttaattgtaaggctacccgcaccgtcggacgactttaatccgtttaaatactaattgtaaatggacattttttcaataaatctgcttaaaaaaatttctccgtggcactaacatttttaaacacattatttggtaaagatttttgaggcctaagagcagaagaacttttcttttcgtccgttggtgcaccatcccccaaaattattttctgaataggggcccgtgcacaagtgccttctgattataatttaaaaactaaagaccactgacctcctcctgtttgcgggtcaattgctcgtttagctcgtcaattttttcgcggaatttgaccaaagcgaattccaacttctcccacattcggtccttctcctccaactggtactccaacttaaattat

SEQ ID NO: 12241 - DNA, 1653 bp, Heterodera glycines
accatttcctcattaatcacacgcattccctaaaatttgattgttaatctcaaccgatgtggtcgttttacgaaatggtaaccgcaatttaacgcaattccaaaagaactttgctgactttctttttgaatcgttcttcacaatccctccatttccttactcccaattgtgtgatttgttccaaggcttgttgcagctgttgctgacaatgagcagtgtccaattgctttttgtccgttgacccaatgccctcatcttttgaggctgtggccgtctgctgatttgacatttctaccagaaaacaaaaacacaatcagatccagaaataacaaacagaattaacggttcggaagttccgagaaattgcaataataacaaatgacatatttagtcattcgcgccatcgtatttatttacgataatcgctgataaaggatttaaacaataaattggtgacagaaatatatttaggtatgacgtcattcactggttgttctccgcgaagcccataaggtcgagcagtgccgctttcagatttccttcgtgctgtatcagcttcttctcggcgattattctggacacttccaagtcgtcaacctaaaaaaatgcttaatgaagagagtctaaaaatgatcttaaaaatttacaagacacaaaataaggcgctatattaaaagtgaccagttttgaaaattttttcaaaaggggggaccctttgttttgcaaaatttttttgtgataaaaaaccatgataatttgttatccggggttttaaaggtcgctaatcacgaatctgacatgtattttgactaatttctaatccctaacccgaactcgaataaaaatcgaaattttgaatttttcaaattatgattttttgttcaaatttagattaggaaatcggaattgatcaaaataattgaaagaatcgtgatcggggaccccaaaaacctaagatgaataaatttttatgactatcacaaaaaattttgcaaaacaaaagggtcccccctttgaaaaaattttcaaaatcggtaacttttacagtagcgccaattaaacctttcatcgccaagaaaattgacaaaaatttttgggatggtaaagccggccaagtgaagagcatcggacggaagaatgaggaggagggaaaagaagacggagaggagaagaaagaagagaaagtcactggggaatatgcccaattccatcggaaaatgaattgatatattaggtaccttttatttgcatgatcaaactaactacctaattacatctcaattagcattaatcagtaagtgaaaagcatcgagcaattggcatttagcaatcgaataaaaagacgaaatgccaaatattagaattactattcaaaaattagaacaactccttttgcctacaaaaatcatttttaaaatatttaaaaatttaaaaaagtaattaataattattataagtgtaaaatatcaaatattagtataagttagcaaaaataatagatttaaataatttaaatgtttaaattaattttggtagtttattcattttccacttttattacatgatatttatcgtttacattcaaattcacaaataaacaattaatgtttttgttggctctgttaactttttctgctgctgttcttcccccta

SEQ ID NO: 12242 - DNA, 2251 bp, Heterodera glycines
  unsure (1)..(2251): unsure at all n locations
gtatttcatagttcccaaaaatnttgatatanttttttcctccgagaaaattgtttaatgaagtcgagatttagtcaagttaatgatgtttagtttccgactttgaaatactgtcctgactatatttatttttagaatatccctgaaaacagaaaacaatgattttaattttaaatgaactttaatttattttcaaaatttagttaattatatatttatttaaaaaaacaaatatttttggtttattaaaatgaacgaagaaaagcgacgacagcttattgaaagagttcaacatgttctgcctactaaacaattaactgaattcaacatggaccgatggcttgaaagctatggggaggttataaatttgaaattttttgattatttaattaattaactattttctggtataattgtaaaaacaattcggaaaaattataaaaagtatataaaaaagaaatttgaattttttattttaaaaaatgaagaaaatttattatattatttgtataaattcaaaagatttttaataattttattatttcaggacattgatttgtgtgaaaagatggtccattattatgtgaaaaatcgcaaagtgttaggcttcgacggtaaaaaaaaatatagcaattattaaaaaaaaaaaaaattaaccaaacaaaatttaagagccaaattttgtcaacggattttattcaaaagcaaatatacaaaagttctgcgacatttttccacaatcaaagcaagtattaattgaatcactcaaaaaataatattttaattaatttatattaatttaaaaataattaaaatccattaatttaaaacatttaggcttcaaaaaggttgggtcaacagctatgataatggcattgtgttcgtggaggccggcattgctgaaccatcaaaagtgttttagaaatattgcttaaaacatttttaattgttatttcaaaaaatggaatattaatatggttgagattttttatcttttttcttgagcattttcggtagaagcattttcttcatccaatttgaacttagaaatttaaaagtatgctaaaaatacatattttgggatttgggacataaatcctatttttggactttttcataagttttactaatttcccaatatttcaaaaaaccgtcgcttcataaaaataattagctcgcaaatttaaaaattttagagattaaaatttatttcttattttttacaggctgcaaaattgatgagaccaggcgaatatttgagcgcattctttggctttcttgaattgatgttacaacatgtgttggaacaagaaaaattgacaaatcggcgatcatgggccgtctgtatattcgacatgcaaaatgtgtcaattttacagtgggttaacccgttggggccaatgactcgatgttttgaggtcagaaatataatttttaatttatttattcattagcaaccattaatacttgcctgacccagacctggcttttttagacctgatttttaaggattttttgcctagatacaggttttggaaacccttgttttcttgatatatttgagaatgggtatttcaggtaacaaaatgtttttttcatgttacttcgacctaggccagcctagtttatattctagcctaattttcaaggtttttttgcttaaaatccaagtccatgttttaacaaatttttattttttagtaaaagtttgagaatttgttattttggtgacaaatattttatttcaaattatcgtaagaagattaactagattaaatattattatcattctaaaatgatttggtgaaggtttttgtgagcataaaaggcagactattaaagaatattttgagtatcaaaataataacaaagttatttgatttagttgctaactaaatataatattattatttaattgttaaatattattgcttgtttcaattaaaataactgttatttaattaatgaaattaaaggcacgcgttgcgcttgccatggcctattatgctgaaatgctctctaaagttgttattgtaaatccacctcatcttcttaatgtgttgtttaaggtaaatttgaaacaaaaaataaataataaaattttttcaattaattaagattatgtcatttctgttgccaaaaagtatttcaaaccgattccatgtggcgacaaattttgcggaaattcaaaatggatttccccagacgctgtcccggttggatatggtggacanaaataattaaagactct

SEQ ID NO: 12243 - DNA, 2984 bp, Heterodera glycines
  unsure (1)..(2984): unsure at all n locations
ttataaatannttttttgattaaaatttatnagaaagctcggcataattgtgggagcatcattcaatttcggtagtaccacatgaacatcacacattgaaagcaggcgaaatttttgctcgaaaatttgaagccaaaaagggccaaaagttggtgtacgaatatttggcaaaccgtaattttgtgatcagattgcaaaagggtaattaataatttaattaattatcatttaaatattatatattattttttcggttttatcttatactagtaagaccaaaaaattcgcccaaaagaataaaagttttttttcttaaatttttctaaattctactaattatttttcaaaatttttaattttcatatgttgaattatttttgctgttataataaaaagcatatcactttttattaaacaattactttatactaaatatatttttatttaatgaatattgtgacatttttgcgtgcttttaaatattttctgaattaaaaaattttttaagccaaacaaatttgttgcaaataattttattattttttaataattagatcaataaatctttttatttagaaaatggcgattttttattaccattttatcctaaaatgtgtacacctatcttgcccgaagaaggcgctgtccaaattgatgaacattcactgatcaaatttgagctgaaaaatttgagcacgattttctcgctgaagcttcgcattgccattaagctaattgattaaactgttgtataatttaattacctaaattggataatttaacaacaaattaaaaattccgtattttcaagaaatcaatgcgattaacaaaaccatcattttaagtagagtagagcgggaccgggaccaaaacacggacaactgagtaccgaggtcccggttttgaccgggaccagtcccgggttttttcccggttttcccagccaaaaattcccggtttttcaacccgaaaaggtcccggtcccggttaagctcaaaattcccggtcccgctctactctaattttaagttcattttattctctaaaattaggcaaaattttgcaactaaaattaagccgcaactgaggaggtcaacatcacaaaataccaaaccaattaatgaatataaaataaacgcaaataaaactgattttgatatatgtttaataaataaaaaggtaaaaaaattaaaatatttttagtggataaaaaaaacttaaaattttttcacaagctactaaaaaaactttaacatacagcggaaagtgatcggttctaattttatataatcacaaaatgtatcaactcgactcgacattttttattcatcaatttctttttattttttccacatttatttttgtatttgcgaaatgaaaaaaatggaaccgtcatttgttcacaaattttgcgatcgctgagctcagtttgtttcttcacttgaaaatattgctatgttttccattttttcactaatctttttcgctctgtaattagaaattaatttaaactaatttaaaaattgaccattaaattattttgtttgatgtttaatttcttggctcatctttcaatcgtaccaaactttttttcagatcttttgtatgatcagggcaaaaaaaaatccaaatttaaattaataagtcgaagggcaggctgaatcaacatggtgagaattgtttaaaaatgcataggatgatcaaattttgcatgttgccttctttagtcaacaacatgatcctccacaatccaactgaccgcagtcaaaacaatttgcatcaaaacaaaccatgccgacatcacaacaataactccatttggtttgttgaacatcagattttgtgcaagtgcacagaatggcacacaaaaatgaaatgtacataaataatctaaaaaaaaagttaattataattaattagtatagacttgaataaaatttaacaacaatttttgttgaagaaagacaaaataatgttgaattatgaatttaatgacttttatgagaataattgctataagccatataaaattaatgaaaatgaaaataaaaataaaaaatacatgcaagatataaaacttacataataatcataataatgatgccaatattatctgctgatgaattttttggacaacaatcaatgccacaacatttttcattggttgcacattcccaagtaatctgacaagaaattaatatttagaaaagaaattagtcaaaaaaattaattaaaagaggttgttgaccagtattattttgtcttttttatgagattgtattgtaaaaagttgttttattgaatattttatttttacaatttaatttaatgtaccttttctgggcgttttccaatgaaatttggctaaaaaaaataacttttaaatgcaatatttcaacactttatattattatttaatttagtaaaattgaatttcttattaaataaaacaatgaaaatcattgttgaaatataataaacgaacaatttcttcattttgttgatcatttgcaaaattgtaagcataaattttgttgaaattcatatagcactaaatgtttaatgaaaaataataaattattgtcccacctttgaaaaaccatcccaaaagtaactctggccatcaaatttgaatgggtgatcaattgagaaatcgctttttgccaattcttttttaaaagtttctaaacgttcccatccgctgctaaaatttaaattttaacatttaatttattgctccaaagaaatataataatataatacaattattggcattttttaaaatttaattaaaaataatctttgctaattaccccctccttggttcattgacaaatgatgatacgcatccaagaattatggagaaaaatgtgaaaaagtttctgattaaattatttctctccattttttttctcgtaacagaaaaatattaatgaaaatttttaactttaaaagcataattttttatttataaaatttaaaaa

SEQ ID NO: 12244 - DNA, 2023 bp, Heterodera glycines
aatttcgttaaaaatatacgaaatgggaaaacgaaattcaatttcgtaaaaatttacgatataggaaaagatgaaatagaatttcgtgaaaattttaacgaaatgcaattcaaaatcgtaaaaattttgggttattggcaaaaaagtttgatttttttcaatttcgtaaaatttttccatctttaccagtgctttttcgattttggccgaaaattttacgaaattgcctcggaccctcgtacgatttacgaaattgactcccccccccccttgtccacgtatgatccaaacaatgggccataatttctgttttaaatgcttattcgaaactaggttttaatgccagacataagccgaaattctgcgttttaattacttccaatcagaaggtgcgttttttccgtagacatttgttggcacaatcggatagtcccattcggcactctcattttaaatgtccgctcacctgacgatggtgaccagcaccagcatgagaaaaaggatgacactgcgttggttggtcatcacgtcaatgcgcgacgttttcagcggggcgctggtcgagttcatcagaagtcgcgagtcgtgccctgtgtagacgacgacgccaaacacccagcggcaattcttcagtttggcaccgcgcagcaaaaattggtcaatcgctgcgggaaaatatattaattgggaaactgagtttcgttgtacaaccaattaatgtacggggaatgggaaatcgcactcacaaagtggcactttttcgtcgtctccggcacacatggtgccgctgaattcgtgcacccgtcggttgggcggttcgcattcgatgtgcgcacgcaacgcggacagttgggcaatgtcagtgagttgggcggtgagagggacggcctaaaggaacggagatgaactaacgagaaaactggttgtttagaaagagagaacctgtcggatcttcaaatttgtctccccgtccagctgtgccgtctcaatgtaagctaaaaatggcacaatggttaattttgaaagaaaaaatgacggtaaaatacaatgattgatatagtaaaaaattgagttttgttcgggaccgttaggaaaaattgagtataatttgctgaaagattttgtaaaaaaagacgaaatttacgattttgaacaaatttaaaaaaaaagaattaaggattttttggaacggctggaaatttagtatattttcaaatcgactttttaaaaagactttcaccaaaaaataaataattttgtggaaaatttcgctaattttttggggcaattttggtaaggtagaaaattaaatcattttattttcacccattcccaacgcttcgctggacgaaaggagcacaatgtcggcagggaaaaactgtccttcgcttacgcgaatgatttgaccgacacgcaactgaacatttcgtaatgaatgagaaactcgagaaaggtttgattaagcttaatataaaattagcatggtaaagggaaaagattagagggtcactaattaagaaagataccagtacataattaacaccgacaaattgctctgacctccttccatttggctattcgtatttggccaccggcgcaaaccgaaccgaaagagtccagcagttccacctcgtagttgttcacctcactgtccatgcgtcgccgtttctggaaacaaaaaattgcacaaaagtgatacattgagcactgacaatgtcctcgaaaatctcttttaacgccgacccagacaaaatgaagagaaaaggcactgctgttgtgtaatgacctgacgaaaagaaggcagagtttaaaatgggacaaagacatctttggtttggaagagaaactttccactttcccaaccatttaaatgtcgttttatgacctattactagaaagaaagctcatggttctattagtgttattgggcctcaaatttaacaagcctgaacgatccaggacatgagacaaattgcccgaagtaatgggtttccctattcatttttagagttaaaattcaaaa

SEQ ID NO: 12245 - DNA, 1016 bp, Heterodera glycines
tatgctcgacctgtggggctgacttcggggatttgctgcaacaccacaataataagaaagaaaacgttgctgtaacgacggaactgttcaagaagaaagcgcgggaagaatgtgaagacgttgtatttgcaggtgctgaaaattggagatcggcctgtatttttcctggatctaggtacaggtacaggccatttttaggaaacctgtatttttcctgtactttgtacaggaaatacaggtacaggctcaatacgaacaccctggattttcctgtccaaaattttagaatttatatttcaagtgaccgatgttttttaatttttcaaaaatgatcaataaatttacagagaaattaatagcaaaaaaatatggcgaaaatgggatttactatagtgaaatttaacggcccaaaattgtcaacctaaaaatagggtgaaacaaatggggcgttaaaggaggcaaacatttaaaattgtcacttcaataattgcaaaactttccaatttgacagcaaaacgggaaaatgtctcaaattcgtcaaaatgggaaaaaccttattttgttgtcgcaatatttttgcgcttgcgcacctccgcccacggcaatcgaacgcggcgcgacgttcgcctgtttttgtgtgccgccgctccacgtcgaccgttgggaggcggaagacattgaggaggtcaacgaagcgacggtggtgtcgcggatggcggaataggagggccaattggcacggacccaatgcataacaacggactgactgcaaaaaaagggggctatactttcgttcaaggggtaaactaaaaacacgtttaatggttatgaatagggtcgcgacttttagtgacgaaaaatcccaaaatagttaactaaaatagtgacgaaaaagtgagaaaatagtgaaaaaagtccgaaatagtgatgaatagtgacataattttcagccaaaaattgagtaaaaataaggataaaattttagaatgtatcccccccttttttgaaaaattttt

SEQ ID NO: 12246 - DNA, 3941 bp, Heterodera glycines
  unsure (1)..(3941): unsure at all n locations
ctatttggtgtttctgattttgtccaacatgttgttttacatggcggnttggtttggntgtgntttagtggngagccttgttggtgtccttgtacagnttggttttgatgtacgtgggaagactgaacttgntgtacttgagttggttgtgcaaattgtcgtccatttatggcttggggttgctgttcttgtgtttgaacaatttgctgcccctgtacatcttgtcgtccttgtactattttatgttgctgttcctgcatgctctgctgtggttgttgctgtccttgtaagaaatttgtcaggggcagctgtccttgttcaacttgttgtactggaacagtttggtgttggtgattctgtccaaccctttgctgtctttgtacagcctgattctgcatttcttgtacaacttgttgctgcactagtacagcttggtgttgcccttgtttctcgtttttcaaccctagttgtagttgcccttgcaagccttgttgtccatgtcgtatttgttgctgtctttgttgaacagcttgatgttgttgatgcccttgttgtaaaactgcttgttcttgctgtcctgcttggtgctgtttatgtcctagatgtactgcttgatgttgttgttcttgttgtcctgctagatgctggtgtccttgttgtactgcttcatgtccttgctgattcggcatggcatgttgtccttcttccccctgcccttgttgtactgcttgctcttctggtccctctgtttctctgttttgcatctcttccccactttttgctccattctcttccacttcttcttgactttgctttccccgggggctggtcctttctttctcttgctctttctgctgttttttccccaggggttccgccggtggcatttgtggcggtgtgacagaagcggcgggtgctaataaaagtgcaaaaagtgggtgccattaaccaattaatgatgtgcttattttgtgttttgtttggttggcctacgcccacaaaaaagaaaaaacggaatataattaagagaaaacgaactgtgccaaaatttgccaagaataaaatggacaaatcactcgaaaaaaaaattgctggcactttgctcttccctccccgccgatcagctgatcagagtttgcgattggctatcggtactgatccatcacactgatcagtgactcaccgttcgtcgtccgctccatttcgtccggcctttgttccgacagcgccaccacttcttcctgcccttccacttgttggtgttgcatcgggtggttctgttccgtctccaccacttcgttcctctctccactctctgctcctttttctctctcctctttgtcttcgtcctcctctcttttttcctgttctttctctttccctcctcctctcccttctctctcttcccctttccgtctctcttcctcttctttggcccttcttcgctcttcctcctctctcttcctttcttccccctccttcagagttcgtttcgtgttttcttcttcctcttcctttgctctttttctgtgtccctcctcttttcctcctttcccttccgtttcccccactctctcttcaactttccctctctcttccaccaattcctcctcttttggtgtcactgcttcttctgttgctgatgatacaaatgaaaagccttataccggcgattgcataggaaccgattgaatgacaatgtttggcacttctttttcagaatcacgcacttctgttagtcattctcgtgatttgtccactctctctcccctctctgtttcttttccatcctccactctctgctcattgtcttcttttccctctctcactgtattaatgctttccatggagtcttctcctccctccactctatgtccaatctccacttctctgttactctcccctcttcgtcccaatgtatcttccgtctttttttcttttcctacgtccaatccgtgctcttcctgtcgctctctgtctgtcccgttgctctccttctgtttgctctgattccatttgttccttttctcttccgccaatttcaatgacactcttttcatctgctgtttttcttcgtcagttctttgctgctgttgatcaaatgcctgcttctcaccctcaacatcatttggtgaaggtggcaccgcccggggggacgacggtgcgatttcggggacggagagtgccgtgagggacggggaaagtgccgggggcggttgttgagggacggccaccgtggggagggagggattggcgccgtctgagtgcgttgtgccggtgcctgaacattgtgccaaatgtgaagcaatcaaaggcgggaggggagccaaagaatggccagaaagtgtgatcaattgatcattccaggtgatcagtgatgatcagagcagtgaccgttcgatcatttttgtgccaatttgtgcaatgctttcaaattccattcgctgttttcattcagaaaacaattttttataagcttttcttttttcttttttgtgtttaagctgtgagtgcattattaattaattataatggtggaatgaacggaaaaatgtcaaaaaaaaacttacgcaaaaaacgaccgcaataaatttggcattccttctgtgaaaagaagtgatttcggttgccggcacaacctaaaacggcaaattagtgccaaaaatgtgccccattactgaattatttatcgctgctgtgtgctttaagttacctgtgtaagtgaacgattcgcactgcgcacgttcgacgttgaaaaaccaccgctgcacaaaacgcgtgcaggtgggagcaccggggtcctaaagttggagcagtacaacgagaaaaaagagaaatgaacggacaaaaaataaagtggaatttgccaaatttggcgaatgagttacggctggtgccatatttctcactttggaaagggtcactccgtaaattcaaaaaagtgccgcataatccgtccccaaaaattgtcaatgatgaatgacttaccaaaatttgcgagcaaatttcgttgtttccgaatgcgaccacttgctgctgttgctgcttttcgtgttggctttggtgccgttgatggccatcaattggcacaattggcaccggtgcggacgctgtgctgcttggcaaggccaattccggtgtcggtggagaagccgagtccgaagaaggcaccggtgactcatccgatgccgcgggagtggcggcagtcggcggggcgagggaagagcccaaaagagaaggcacgccatgttggatgacttctgtacattgacagtgattattaaaaaaaaagccgaaatgctaataaattgtgccaaactcgccgattaattttggtgccggcggcgacggaggcgaaggcggtgaggaaacggaggggtcaacggggccgcggagcgtgccgattcggcaccgaaacggactcatccccttcggggagagccggcgccgcgggcggctgcgcgccttcgccggaggacggctgagggggtggaagaagcggacaaacgcactcctggcagcttttgctgacaaagttgcgagagggggatataattaggagcgattaattaattctggaatatttaattaattatcggagggaaaggttaaaaacaatttaaaaaaattaaaaaatggatggaaaaatactaattaagccgaaagtcgaacctattcaagaagacaatgcacggctcgacgcacaactgaatgtccacgggaggacaatgggcgcgagcgacggacgacggaccggggacaagcggaggatgacgcggaggagcacaactgaacggaaggcaccaattagcaaacggaaatcggaaaatggggcatggtacaccaagaaattagcaaaaaaaggaggatgaatccgattaaaggatattcatacgcattgattgggagtgaccaatctgatcattaggaagagtaatcat

SEQ ID NO: 12247 - DNA, 3826 bp, Heterodera glycines
tcccgagtccgaacattctttgtttttgagtcagtctcttatttaattcccccccccccctcctttttttgcattcgaagtgtaataggcacccggaatctcgtggtcacttctccgttctcgtggattaaatgaatttgggaatcagtttatcataaaaaacaaacataaaaggcaaggagaaaagaagtttaagaaagcgaattatccctccaaaaatcaaaacaatgagaaatgtgacgacgatgagaaaagcgcaaaaaaaagcataataataatgagacccgcttcacgggaaaggccttccttcgaagtgattacgaattggagttggcgatggaccgtttggccgcttcgatcaaataatggagtccgttcaaaggcttggcgcatttgagaaaattgtgacggagcaactcacgagcagagagacgcaagttgacgttgacctttgccaattcattatttattccttttcgccatttcccttaatacttcaagtgccgcgtctataaaatccttaaaaagcggcgaaatttgctcgcgcgagggaaagtcgggccgcccattggtcgcaatctgaaaaaagagtaaagcaacgcatcccacaatccctcagaaataccaaataaatcgctctgagtgggttttcattgaggtaaggcggctcgccctcgaccatctgaaagtgttttgagagagagggcggcacggcataaccgacctcaatggccataatgcccaaggaccaaacatcaactttaggcccatattgctggcgggaaacgacttcgggcgcctaaagggtttgggtggaagttcagattttaatcgagaagttggtggggtgcgtttctgacactgctcttaccatccaatacggcgtcccgacgagagtcgtccgcttgttctgctcgggactgatctgtgcacaaaagccgaaatcagcttaaacgaaatggacaaattaagggttagtcgaatttcggctgcaaaattcttactgagtttgactgaaccgtccaatcccaacagaatgttgtccttagaaatgccaattcattgagtttggaaagggtcggccaaccgatttgatgtcgcgatggatcacgtgccgggaatggaggaactccaacgcctgcagcacttcacgacagacggcggcgatcattccctggcaaagcgaaagttagcgaaaaagtgcataaatagcaaatgcctcttccatttggcactctgtcacaacgtccgtcagagaaccaccggccaaatattccatcaccacccataagtcctctccgaccaaataggagtccaaataattgacaatgtttcgatgtctaagggaaattggaataaaagaaaagggaaaggacagtgggcacttgttctctcgcatgacgaggatttcgttgatgatcagctcctttttgggctgttggctgagattcatttgcttaatcgccactaaaacggcggcacagacaaatcgccaatgttttttgtttttaccttcggcaccggtgtttacttcgattgccgtgaacacagacccggaagccctttaagaaagaatggcgcgtccgcttcagtctttagttttatcccagtgaaaagtgctcaccccgagccgatcttctccacttttctgtacttccgatcggggtttccaatgctaacaatctttaaaattacttacaataaaccttgatttgttcatattgcaattaccgtcctcagtcgtgccaatacttctgaatcggttagccttcttcgacgtccatttgcgcgtccaccaaaattgccatttttaagcaaataatcaggcacaattttgctggtttcttcgtgttcgatgggttttgtgtactgaaaaagccaatctttttaaaattcatcagttgatcgatggcaaatgccaaagcgatcgactgcttcgtccaatggcatttcgttttagcgttttccgattggcacttttgtcttcccccccccccccctccacccttttctgttcggtgttttccttacgatcgaaagtgttttcttcggcctttccgggatgggcggtgcttctccctccccttcttctccgtcgtcgtcgtcttttgagggcaattgtggcggcgcatattcctggtaaattcacatggcataaataaaaatttacggcgctagttaaaaagtgaccacttttgaaaaatttttcactttttttggtaaattttttttttgtttatttacatataatgatgtatataaagcattaccatcacaattatggtgaataaaaagtatattcacgattttttatcttaaaaaattttgtaaaacaaaagggtcccccctttggtttttgataaaattaaaaatctgtcactttataactagcgccaaatttcttaataggccaactaattgtcatattcatgatcagcgacctctaaaatccccgggtacttggtttcatgactttaaaaaaaaatttaccaaaaaaaagtttgaaaattttttcaaaagtgactttttaagtagcgccaaatttactatgtgtataaatatatttaaatgttggaatttcgacttacagggggcaaactgcttctgacgaggtcatcgcaatcgtcgccaaattcccttctcgacgcttccattttcgttgttttatggcatgcatctaacacaacaaaaaaaacaaaaattgacaacaaatgataaatggcaaaaaagagaaacatgcaaattgtaagtggcccttcccccgttgcagggtttttgccttaattttaaacccttggggtgggggtaaatattttatagtcccttttttatggtcgtgtaaagtgcaatagagccgtatttaccccgtggacgccctcccataggccgtctccctgaaccaacccttatttgagtaatacggagggacagttgcattcaatcgctttggagaatggggcagagaggcggacgaataattattgttgatattgtgactcatccgattgtccagtgaaacttgctgttcgaatatcgaagaaagtgttggagctgaaaccgtgagaattttacgatttaacacaccgtttcaaaaaattttggacaaaataaataaaatttcatacattcgaaactgttgctcggctgcagccatttttggtccttcccttcggtcctcgtgaagtatttaagggcatttagcaccgcttgtgggttctgctgctgttcttgcttgctgatttgactttgttgcagcaaaagttcccaacttttgggcattccctcaaaatttaatttatttttatttattttaccgtcttttatacaatataattgactaccgtaaattcgccagtcaccgggtcatagccaacatgaacctaagcaaaaggcatggaatttaaattagattttgtaattctgaaattgtccaaccgtatgttgaaagtctgatggaagcgaaataacgggcttctcggtggacctgtccttgtccttttctgcaataaaaagaggttaaaggagagagagagaacaaagcgactactttttcctccgaacggcttgctcttcttgcatttcttgttcatctccattcctgagttgaaggcatgagcagtttcgagttctgatttggacgactcgaaaaagaatccgtgatttttggagggagcgagtatcgaagacgatgacgaagaagaagaagaaaagcgaacatttgcgggagatggcctctcttgaccaatttgggcaaaagaggggggatgcatcgacataattgcaaatggtcaacaacgattacaacaagatcctggcgaaaaaaagt

SEQ ID NO: 12248 - DNA, 3631 bp, Heterodera glycines
  unsure (1)..(3631): unsure at all n locations
atgaaaactgatggatatggatgttgtaattatttgttgtttttttctgtgccgctttgtttcgtctgtatttttcgtcacttatttttggcgttttttgaaaaatttcttaacaaaactatgtaataaaacaacataacataaagttaagttattaatagagatagagaccgacttttaaggcattgtcttttttttctgcgcactagtttcgacatattaagcataaaaaaacgcattttccatttggtttgagtcttatacgttgaattctattatgcctttaatgccttttttggcattttgccgttttggtgtcttttttggcgttttttcccgaaaaacccattaaaaatgcaatacaatcgagaaaatacaccattaaaaatgatccgaaaattttcagaaaatacacctcctaagaattgaaaactttctcaaaattaatcgcaaaattgaatttttaggtttaaaaatttttcttattcgaaaaattaaatatttattaagcatttaaaggaccgaattattattttttttggttaagttttacgtgttttgctccctaaaaacccttaataaaaaactttaaatgccaattttcatgcctctttcggaatgttcatgcctttttttcaattttttcgtgcctattatagtgccatttttgcgatttttggtgtctttttagtcggtctttagttattaattgaaattttgttcgggttaggcaaaatatttataatttgggtttttctaaaattcgaaaaaccgatttacattcgaaaaattaaaaaatgattttaagtgtgtaaaagcaatatatattatttaaaagcatagttaaattttaattaaattggaaaagtaagtcaacgaattgtccactcaattaatatgcttattttgctggactcattacaattttttatggatcattgccatgctttttctttgtaccatatcacagctcagtatgttgaataacagtggaatttaataaaaaattttagtttttcaatttttaaattattaacagtgcccaaacttctcggtgcccaaaattcatgtcgccagaaattattcattggattaaaacattctctccaattttaagaaactttttatttatttgtccttatctgaacaaattgaaataaatgaaaatgttccataaaaggagcttaatgagcgtgaatgttactcaaataatcaaacgtattaaaaaaatgaactgacgaagcgaaaaaagcatgggtgcggggtgatcggaagaggcgggtcatttcagcacggaaaagttatccagaaaataattaattatttaagtaataatgaataataataataatttaataataataataataataataaattatttggctctatttaagtttatatgccataaaaaagatacgaccatataataatttgacaaatttaatgctccataactttttcctagaagcatcattcttgtatcatttgatagccctaagtgtcttctattttcctgtaaaatttcaaaaaatttcgttgtctcaaaactggggaagtcgtaaaataaaaaaacagtaaaattttggttgggtaactcataggcatttcctaattcttaggttcttacttaaaaattcccatccttttaatttctcttcacattccgcaattttaccttaaattccttttccttttcattaggcagtagggatgtgcgagattctcggttctcgattttcgactcatgaaattttttgggtttttgggtctcgcttctcggggtcatttatcggtctcggttctcggtaaaatcatttctcgcacatccctatcaggcagtcattactatcagccgcatatttcgcttgacagtccgctctcccctataaaagccaaggagattacagctaaagaagagaagagcatcccatccgtccaacttctctcctcccgcccttctcttctccatctcatccattttctctcgatcagttcgctctcctccgtctgatcccttgcaacgccggcggagaaggaaattcttcaccctcctttttccgctctatcaccagggatgtcattccgaggccccaagaattttcggaattccgaggcccaattttttcaatatctgaatccgttccaaccctgcccccatcccttcttgggacagtattcgattccttcatccactatggtgtcaagccactagagcccggaaatttcaaatttgcggatcctgttgcaggattggaattcaaaaatttttgcagggccggatccggccggattaatcctgcaaatcctgcaatcatgcattttaaatttgcaggatcccgcgcaggattgcggattcctagaaattttgaaaaatttcaatgaaatttccaaaaaaaaaaacctgacaagaaattttaggggctggcgggatgcattaaaaaggcgactaagatttttcgaatggttcagacggtaaaaagagatcggaaatcaaatctgttaatggttaataaatttgactattttttgcttttcaaaaatgctttttttcagcgcaattttttcaaaaactaggaacaaaggggtccgtctatgcagataggcgccgtctgaaattttttttgaaaattttatcaattaattaactgattttgaccaaaaaatgaccaaatgtcacaccttttgactcaattctacaggattaatgtcgatccagtggtgtcgataggcgccgccgggaaattttttttgcaaattctaggtgaaatttgagatgaaaattgaatttattttgattgattttattataaatttattcaaaagttttggcattccgttttttaaaattttcaaagaatgtatgcggatcctcgccggatcccgcacaaaaatcaaatttgcggatcctgttgaggattggaattcaaaattttttgccggaccggatccggccggattaatcctgcaaatcctgcattttccaaaaaatgcaggattgcggactgggatcctgcaaaatcctgcgcaggatccggtcctgctccgggctctaatatgtataaatgatggccaaggatatttgtttttttaaattcgtatatttattcatagttcaatttctgtttgcctatttttttattgttagcgctaatgattcattaaacagttgatttttagaataattttaattttatttttcatggaccaaaatttgttttgccccacaatttttttcttacttattcttccaaactaaaacaaaattaatatcattcgaatgttttttaataaggcattttttaatttctgcaaatagaccaaaaaagtggtcataatggcacaaatttaattggactccaaagaaagagaaaaaggagaaacagttttttgggtagaaatgaattttcaaattaaaattcgggaaaatccttcgctccgattattaatttattatcgtccaaatgatactccttagtaaatgtaggtcgtggtctaaatttcaatgaaaacgcgattcgcgcaaattanatttgcgcaggttcgatacgtgaaatgctgatcgcgatcctttgtctccagcccattgctggtctgtttcacgctaggaganttaaacatccctaatttt

SEQ ID NO: 12249 - DNA, 2390 bp, Heterodera glycines
  unsure (1)..(2390): unsure at all n locations
agtaaaaatattaatattntaataggccaaattttaaaatttaaatgaaacttttattcaatgattttcatcagtctttttgcatgtctatatagtgccactcacatcaacacacatttgcacgtgccacggcacgccgtcgtcgccgccaacgcacgcgacaccacttccaaggaaataactggaaaaattcgtcaaatccaaggaggcgtaagaatttatcaaatttgaaaaattattaatttgtcttcaagtggtttggattttcgccggaataatttttctaatatttttcttaaattatccttgccataaaaggactatttctctcttgtcttgcctctctctctctctctcgcctatttctctcttgtcttgcctctctctctctctctctctcgcctatttctctcttgtcttgcctctctctctctctctcgcctatttctctcttgtcttgcctctatctctctctctcgcctatttctctcttgtcttgcctctctctctctctctcgcctatttctctcttgtcttgcctctctctctctctctcgcctatttctctcttgtcttgcctctctctctctctctctcgcctatttctctcttgtcttgcctctctctctctctctcgcctatttctctcttgtcttgcctctctctctctctctttctttccctctttctctctctcagtctcctctcatcatctctctttaccacttccttctcctccactaatatctggatcattttattcagaatttatataattattttcccaataattaattgtattttcccaattgggtccccccactccctattagtgccacccaccactcctttttttttgttgtcggcgtctactgctgatcactgatcaatgaatggatcatccgcgacatccatcgcgcagcgtgccgcgcggtgctaggatgaagtgacaaaaatatcagtgttagaaataattaaatttaattattatttaattttaattgctacataataaatcataacttagcaaaatttatcaatcttggttttagaatgtagcttctacgtatcctctattacttatgtaattttttaaaaattagtaaaaatttacaaaaagttgtaactaacgaaaaaagctcgaagtatttagactcaacaattttgaccctaacttttttgaaattcaataaaattttttgaaattcaattgaatattagagaaatctttgagctaactaattatattaacaaaattaaaattgcttgtttttgaaaaaagttattaaggaattaataagtgtaatatttttatggtcgaccaaaaaatcaaaggtcatttaaatgcatgaaaattgttccaacttcaattaattccaaaccgtaattgatatgaaaagatagcccaaagatttctctattatgcagttaaatttcaaaaatttttattgaatttcaaaaaagttagggcaaaatcgagtgtcgctcgtaattgtttaaacagtcgagctgtcttacaagggaacatatcgaaagttgtcaatgtggtgctgagtcattatataaaaaccatatatgtatataaaaaaccatcaaatacataaagctgtctataattttttccaaagtcaatcaaatttgacattcttagtatcattcgaaaaccctaagtgtcctctattagcctgcaaaatttcaaaaaatttggctaagtttcaaaaaagatggccaaaaatgtgtgaaaacctggttgcttgtgtacttttagccataactttgctcaaacttgaccaaaatttttgtaatttaggtgagcttatagagaacacttaaggctatcgagtcatatcaagaatgttgaatttggttgacggtgacaaaagttatggacagttttatgttgaaaattttcatttgatggttttttatataacgccctttttgatggtttttttatataacgacatagcacccaccgtcaatgtacaaaaaatattttaaaagcacttttaaaaaatgctttttttgtcctcttatattttaattaaacatttttatcgttttcctaagaagcaaaaactttactcatctgatttatttgctcgaaataagcattttgttgaataatttatttaaaaagaaacggagtggagacacaaactctcagaagagagacaacaaaaaatggtttttttaaatgagaaaaaatcaattttataacccttcgggggtcactaaggaggaggagggggaagagagagaagtcactgtgattcattcatccgtccccccgggggacaaaagggcagaatgaattgcaatggcattttaaccgtaccaacgaccgatggaaagggaacagatgagagagactaaaaaggccattaaaa

SEQ ID NO: 12250 - DNA, 1236 bp, Heterodera glycines
ttccccctttaattcgagcaggaattttatgtataatttattaatgtttgctttaaattttaataattacaaaaataaaactttcgataaaatgcccgtaaatgtgaacagcaaagagtggagtggacagcagaagatggcacgagaacacagagatttgtgttcggtttgaatatgacgcaacgttgcacgaatgaaatgaacaagacaaccaaatacctttttttctccaaatactttattaaatgcattaatttcggcccgctcataacaatatgaattctctcgattacttcaactgtttcagttccccattgtcgatgaagctcatttaaaacagttttcgaaaaaagataaagtgcaatcaatagaattgataaaaggagattgtgggttcatttatttcataataattgtttggagaataaaaaattattttaatgtgctcaaatctcaattaaaattacaaaataaaatttattaaaatctttcccgtactgaaattactcgcctcttctgatcacccctcacccatacttttgacacttcggctccccacggacccaaattaaaaatcactattttggcattttgtcactattttttcactatttcgacattttttggaaaattccttaacaaaaatgcaataaaaacaaaaaaatacacccctaagaatcgacctaaaatttaaaaaaaatacacctctaagaatcgacctaaaaatttttcaaaaaataccagttagaattggaaaattttcataaaaatttttccccaaaattttttttcttgacaaaatttttggtttaaaaatttcaatatttgcttaaaaaaaatgtaagaaaggaatgtacctcatttgtaactgcaatcagtgaataaaaattatttttgaagactcgattaccttcaaataacgggttcgagaccgattaaattccaaaagaggactcatcggactcgagagaatttcccctcttaaatgaccctcaaaacaccatttgccgcccaaccctcattgtggtactgggagataatagaggctaactaatcaaccaacggtagacagacagagagcagagagaatccatcgaatagagccaatcaatacacatgtatgacactatgccacaaagacactatgccaaaaaatattaccccggcggcggcgggggattgtcccctcaaaggcgcaaaccccgcgggcgacgacgacgggcacgacgacgacaa

SEQ ID NO: 12251 - DNA, 3343 bp, Heterodera glycines
gtttagggggatggattaggcccaaaatagacaaacttattacatgtagtttgacaagtcaaacatttgaactgatcatcccctgaccatacgatcgagcattcagcgcacacattcacatgtgcgcaccattcacttccaaacatcggttcgtcgatcaaacaaaacatgcaatgtggctcccatttgggagacacatcggaggtgcgaactgatgttggttttgtcattgttgcggagcggtagatttgcagtgcgaggtgtcggcagcgcatatgttgctcctccactacagagcgtaactgttgttggcctctttcacgttcagcgtgtattgcgttgttcaaactttgtttcattttgcgctccgcatcagcgatggcaaattctgccaattcttttgcttcggcaaccttctcttccacaaatgtcttcattttggcttccaaaaaatcttttttgaagctttccattgccatcccatctgaaaaagcgcactgttcccagtaatattacactaccattaccggaagttgcggccgatgttgctggctcgtcgtccacagaaaatcgtttgttgcgtgttgtgaacgaacaaacattttgtctttaccctagttaaaaactgtgatcacaaaaaacattgaataccttacttcaccggcccaagcctcaagtttctcaagtctgaagcggtagttcacaaaatggtgacgcatctgcatcaattttacggactgtgcgccaataatttttttatagtgacgcaatttcactttcaaccgatgcggaatttgcactcatttttattaaccgtgaagagggtgggagataaaatgcaaaaataaggaaggaaaaggatgagggcagagtgtgtgaggatatgccgaacaataacaacacaacaacaacaactgatgcggaatttgctgccgacagatgggtacccccccccccccctcccctgccaccattgcgcaaattgaattagattatttttttattggttcgattgtaaaatacataataataataataaaataattatatcatgatctcattaggcttgatgggttaaaagtttacgtttctttgacggagccaatatgtccgttccgttgcaattcacacgcgcacaactttcgcacatttcgaaacttagggccacacgatcattgcccattcggcgaactttctctttgttgtggaactgattccgccagtcatcatcacagagataaattgctaacatgtatttgcctttgaaaattttcacatagctcgatgatcaactttgcactttttcggagacggaggttgagccaaaattttttcgggagatgatgatgacattttgtaaaaatgactttgggtttgagcgggtaaattaatctgcttaaagtggcggagtcctaagtcacttttttgtccagagattccgctaaaagtagatttccgaatacattgatcgccgttttggtcttcttccaacgtgcgctgtcctgcatggcatcggccattaacccagcttccactaagtcaagagctaccttcgcctttctcttcaagtcctgtttatcctcatcggtgtgcgtccctttggttggcgtagtggtggggtggtagtgcaagtgtcggagggcacgtcaccgtagggtacattgaacacgcgggccttgtttttcacacggaagaagcagtggcctggtagatcgtagacaacatcaaatgggacgaattgggctttgctgatccggctgcaccacatggtgatcccctccttggtcaccattatgtcgacctcgacttcagtagctttacaagcgcggcagcgaccgcactcatcgaatagtataaaacggggagtggacagacgaggaccgctcacggttataccgctcgttgtcacggttatgtcagattgggcaagaattgagcaattaaaatattccggcccggtcctaccctattattcaaatttttaaatattatttttctcatttttacagaacccaatatacgtatttgcggttttcttactaaaattatcaccccctaattataatcaaatgaaaaaattatgagtaatttatttcttgaatacttttgcatactattttaatagttgtattttggatacgccattaatatgattgagttaaaaaataatatttaataaatgaaaaattataaataatatgagaaaattataagaccttttatttttaaaaatttttatcattaaaaatatgtgctttgcgggataaatgttagcaaaaaaaccctaacatattagccgatttttatcgcttttttaaaaataaatttgaataattttgacttaatgagtagttagggcagtaaattccaccggattacggtagcctcccatacctatgggaggggtgcacggccaactgagcgccagccaggtgagcgccgccaagtgagcgcgggccaactgagcgccaaaattttcagtactgaaaccaaaacctattgcgcgactttttctgcaagcctaaacctattgcaggggggtgcgcgactttttttctgcaagcctaaacctattgcaggggtgcgcgactttttttattcgaaaaattctgccgcagactagtggcctcgaactttcgctctgccaccaaacccaacacactaccactctgacacgagaccagttgccagaaaaaggataattgtccactatatgctgcaaagatgatgacgtcaacactgagaggggtactgtagtccagggaaaatcgcaataaattagccgcaggcaagcggcctcgaacttttggtctgccaccaacccaacacactaccactctgacacgagaccagttgccagaaaaaggataattgtccactatatgctgcaaagatgatgacgtcaacactgagaggggtactgtagtccagggaaaatcgcaataaattagccgcaggcaagcggcctcgaacttttggcctgccaccaaacccaacacactatcactctgccacgagaccagttgccagaaaaaggataattgtccactatatgctgcaaagatgatgacgtcatcactgcgaggggtactgtagtcctgctgaaattcgcaataaattagctgcaggcaagcggcctcgaacttttggtctgccaccaaacccaacacaatatcactctgccacgagaccagttgccagaaaaaggataattgtccactatatgctgcaaagatgatgacgtcatcactgcgaagggtactgtagtcctgctgaaattcgcaataaattacccacaggcaagcggagtccaactttttgctctgccaccaaccccaacaca

SEQ ID NO: 12252 - DNA, 2959 bp, Heterodera glycines
  unsure (1)..(2959): unsure at all n locations
tttcagttttcgccagtggcgttgatccgctccatatccgtccatcatttaaaagatatcctttcaaataggcattaaaaatatttacatacgtacaacattttttaatgctttgcagggcaaatttaattaataactaacgtaattaattttgttaatatttcgcacaaaaattaattaatatagtgtccgggctctactgatcaaggatgaaattacgatgatgaatttaagaattggagtgttgaagcgattcccattattggggagacggcggcggttcagcagaagaagaaagcgaaaagttgggccatttacacagagtctttcagtattggtgatgccattgggtgagcagaaaggaggccttatttttgttataaagcacggacggacaggacagtatccactgtacagtacttgctcagaatcttggcaggcccaggggttcctattaaaacaggaattaagtgcttgtcttgtccatgccgttctggtccatctcggaaaccctggtcctctagttcgaatttttttttttaaactccgggctttacttttacaaaagtgttttcatccgacgattcaaattttgcttaatttaggccgctgtctgaaaaagtgttctcttttcccgggcccagtgatcagcggaagaaaaagtgatcatttgagaaatgtccgaccaaaaaagagctaatgaattgtgttaattgatactgtcaaatttaacgctgggtattaaaaataggaatttaagttgggctaataattcaaaaattaattaaattcagcgctttttttacttcaagtaatttgcaaataaggattagaaaatttatttgtgttcagcaaccctacctcggaaaatgaacaatgtcctaaatagttattggaacataataattttgtcttatggcaaaaatggcggattttgggtagtttatttttgtgggttacttttacggtttataatttttctgataaacaaagaaagctctaaacattcttctagagttggtattttgaaaaagcctggattcaaagttgggaggaagaaaagtcgcgggggtcgaagaaaaacaaatttttttatgagagcgttgttaatcttggtataaaatttattttaatccagcatttcgattttccgggatcccgtgcgagattgtgagctttttaaaaatcgcatattttcattgtccccgattcggagacaatgtcaggaagtgtggttggtgaccatgtatggatgggacgggacttaaacccttatagaaagttgttatttataaatttatatgatattttattaaattcaatttaataccgaatttcgaactcaacgttataaaaattcattaaatccgataaaataaaaaaatgaattttgtatttttgaaattattattcttattttttatctctaaacaagttcagccaatttcacgcccatcagatacaataacaatttaatggtgcatacaacctgaaaaatttaattgtctgttctcgaaggaaatggaaaatttgctctaaagaaaatagcagcgaatattttcaacaaaaatattttattacttctaataaaaaatttcgatatttagttaataaatattttttatgcatttgtttgtccataaaaagttgaaaatggaatttattaatttttttttgttttgttttgtttgcttaaaccacattcatttcataaaaattgttctcctttcaatgtttgaagaacaattttcacattccgttggcaaataaattttaaaattattattttttttgtttgaaaagcactttttgtgttttcaatatctgcttaattgattcctaagccgattaaccaagtattgttaatccagtaaggaattaacaaaataagtgttaatttgtacgtaattcgccaaataataaaaaacaaattaaaaatatatatttttggcaccctgaaatgaacaaacaacttgtaattataacgggcttatgcattaatgagatagcccaaatgaaattttgaattcactacctttttgtttttaacaattttataagttttgaccgattagaatgcaataaattctagggaaatttatatttttaattacgaattctgttttacatttattaataaaaaatttttaattttaaatttaattattatatatttacatcacattttataataaaaaaacaacattttttgtttcagcatttttcttttttttggcctctttgagatacaactttccgcttcataaagcaaattcattttttccattaagccaaaagggaggtggaggcggcttaatcactgaaccgagcttgaaattaaaaattcatattaattcttaaataatgtgttactaaatttgaaatcctttcattggcgttctaatagattattcaagttatttcaacagattttttaaatttgaaaatacataatttaaaaaaaaattatattttattttatgaaaaaccagcaacaaaaaaaaaaataatcttctcaaaattttaaattctctcatttccaattttgacttttatgtaagaattttcaaatattttttattggataagaagaaatatttttggcattttttttttgccatttttggcaaaaaatcatgtgggcaatgattaaaaattcattcacacaacaaaaaaattttctgctaaaatttgccgggccatttttgtccattgcatcagcaattctctcaccaatgtccaaagaacgaagaattttgttaaaaatatttcttcgggaattttatttaactgtttctttttttgtctaaacattaacaatttttatttcaaatttaatcttanactanatttcactaataaaaatctatattnttttatagattttttagctttttgcatgacccacatttgcaaagcgccaaaaaatatttaattttcataaatttttccatcttaa

SEQ ID NO: 12253 - DNA, 3883 bp, Heterodera glycines
  unsure (1)..(3883): unsure at all n locations
aataaaatnttgatttattaatgttagaattttattttttctattaaactgttttgttttatttatatttacttcacatttgaatagaaaaaagaacatttttgtttagtaattttctttttttggcccctttgtgattcatatttccgctccagaaagccaattcattttttgccattatgccaaaagtgaagcggaggcggcttaaatcagtgaaccgagctgcaattcactattcttttcaattttaaaatttttttatttaatattattttaatttaaatatttctattttagattatttttttaatgaataggcagcaaaagattaattattcttcacggaatttttcaatttttcattctccattttaccttttatgtaagaattttaaaatattttttttgataagaaaaatatttttggcattttttccatctttggcaaagaattatgttgtcgctgattaggaattcattcacacgattaaaatttcctgctaaaaatttccaggccatttttgtcctgggcattagcaattctctcactaatgtccaaagactgaagaatttttgtttaaaacattttttcttaccacaattgccaagcggcaaaaaaacatttaattttaataatttttttcatgctaaataaaattttttatttttgtgcttttttcactttattctattttatataatagaattatacaaaattgcttagttagaaataaaataattaatttttatctcctttcaccattaagtgtcgtaaaatttttctttatcgtgtcgattgattattataaaattgcgtcaataatgaatgggaacaataacataaattcacacgaaggcaagttttttattatatattctttaccaccttaataaaaccacaatttattgatagagcttgtggtttcggtaaaacagaaaaacaggcctagggtaattatttttgataatttaaattaaaacatggtcagttaaaaatattattataatgtaggacctcggacaatgcgccaagactgtaaaattggcacatttaaaaaaaaaagttcggtataataaattgaaaattaaaaatatttttcctctcagcgatcaaatcagtccgatcatcgaccagtgacggagattacgttcttaacaatggtgatcagcagcattgttcaattaacgaagaactgcgcaatttgacgctgtcgcacaatttgctgcggcagcaacaatcatcagccgtactgatttcgccgcgctgtcagccccgacgactttcgtccgtgccgcttcagcgccagcgctcgtcggcacagacgcgctgtgccaaaatgtcgacttcgttgggtaaatttcgaagttttttaaaattattttgaaaaatagatgtttgcgaactgttgcacattgtaacgcatgaatacatcggtgctgactgcgcactgcgcccgggcgaacgtttggtggtggtggacaacggggacaagaattggaagcacgggtttaaggtggaaaacgaaaaatttttagagttttttaataaattctgggggaaaaggactattatgagaaatttgaagaaaaattgtctcaattatttttagaattgataagaaattataaattaaaaaaaacatgctataacggattttattgtatttttttcaaaattttaagattaatttcagaatattttatttctttgttcttaaatttgtgtttttgttgttctctgaaatttaaaaaaaaaacaaaaaattattttagttatttttcattaattaattagtaattttgaataaaaaattttattaataaacaattattttagctgtcggattatatggaacggatggtcaccttcccaagttcatgcgtagcagcttatcggcctgaagaacgtccaatgcgtttggtgcgcaattgtaatttgttggaccagaaaatccgattgtaccgcgaccaggtggaaaaattaattgattaattaattaattaaaatgggtttacaatttagaagcattatcaaaaattaaaattaaataaattcccagcttgtaggtaaatataattgtgatgatattttttcattttttttggactgacaggaggccaatgttagagaaaaaaaacgccggaaaattggaatgtttaataattcattatatttttccataaaactttttgaatatcttttgctaaataaagccacaaaaaatattaaaaaatggaaaaatccatttttcgttttcggttgaacgattcgatcaaaaaattttctatccaagaaacagaagatggcgatgacttcttataaaaatgatttggagtcacataaatttcattaaaaataataataatttaatacaacaataatttattaaagatcgtcttcgttcaaccaaattctttggaaaccaatggacgtgtggcgatcagaaatgagcacaacaaaatcatgcattgcccaatacaatttttgacaaatttatcttgaaaatttgaaaaggaagcacaataaaattaattaattagacaaatttttttgccaaaaaactgttatcatttgcaatgatttatttttgtataagtaaataaaaaaagcaattgaaaagttgcggattttatttaaaaaatcatttggtatatatcgaacaaaaagaaatacagtagaaaaagacaaaaaatgccgtatcaacttaatcaatacccataaactaattggcatcatatgtttgagtcaaggtgtacataagcagtccgaatgcatcatctcccatgctttttggaatttctaaatatttaaaaatatataatatttttctaggtgagtgctaaacatattgaaaatattgtcatagtcttaaattgaggttttagaaaatttgtcaaaatttcaatttatttaatttcaatgtttactatgctaatttatgagcgcatgcatgtccattcactcaagttaaatcactgaaaatttgtttttagcccataatttagtaacagatttggaaagaaaacaattttaaggatttttgctcaaattttaaaagattcaaagggagaatggtccttagccaagacaaatgccgccaggaaaatttaaaaaaattttggaggaatttttaaagaaaattattaatactttcaaaaaaaaattaatttaaaaatcaatccatatagttagttacaaatttctcataaatattgtgcaatttttaaaacgatttgcctgttggcgtttcgttgctatgccaatgtcaaaaattgcagagggcacttcacaaatttgtcgtgttcattccgcactgtcacccgtccgtcctcacccagcgaattgggctgcacaaagacaaccttaaaatttgaaatttctaatttaaaaaaaaatttttttacctggtcacgataaagacgcattttttgctccattaaattgcatgtttggatcaatcgcatcggttgttcctcttcagttcggtaggcggcaatgcatgtgcttggaaagatgaacaagctttcagtgcggtcatttaacttaataatagaaatgaaatttgagatttataaatcaaaaaaaaatatgaggaaagcaagaatttataaattttaattattaatttaacttttcaatatataaattaaaattaatggtcttgatagaatgcatttaaaagagttataattaattttgattttcttgctcgatttattcgatataaaattgacaaaaataatttaaagacataatttatttaaattcaataagtgccgtttgataaatttattngtgaaatttataanaattanattaataatggaaaatttaaatttcttgagtttctccaaaattacacgaattaanaaagggcttctc

SEQ ID NO: 12254 - DNA, 821 bp, Heterodera glycines
  unsure (1)..(821): unsure at all n locations
ggtgggacgatgaaaacctataggaggaatcataaaaatttggcatttaatatttattggcacaattaaattatagccgagatgatgaaaaccttgaagggtcccttttagtgcaattttttttttatatgaattagtcaaaataaaatagctgccatgatcagcgagcgaccttgaaactataaattttattgttaataattcacttcatcttcatcatccagtcgcactatcttaagagcaacaatttgctcggtgtccttgtttcttgccttgaaaaccttaaattaacaaattctttataatataactttgaaattttatgtgtcactttttttaccgttccatatgtgccttcaccaattttccccaatttttcataaccactcatgtcgttgctgttgctcatcttcatgatatgtatcaattaccaatggctaattacttaattcttgaaatcttgcaatattttaaatatgaatttaaaattttctaattgtctcgctctctctctcttatttttaaagtcaagaattgaactgtttgatcaaaacaagtcccgaacataggcggccccagccaaaaaccgacatttgcggcgcccgatatttgcagatgatttcttaagggccattttccgatatttgcggccccacttttgcggtccagacatttgtggtctcagtcaaaaaccgatatttgcagtcgattttttaagggccatgatttgcggccccagtgaaaatcggacatttgcggcccgcatttgcggcccaaggcaaaatcggnttttttgcgaacaacggaaacgccaaaatttt

SEQ ID NO: 12255 - DNA, 2565 bp, Heterodera glycines
taccattacgagttgctttcgtccgtttctggtttttgcatattaatttttagttgaattcaacctttgcgcaatttaatgattttttctactcttacgtttgttctttgatatctgtcagtctattaattgcatcaaaatggtatgtttttggccttatggctgggccatcaaatgaaaaaataatttaaaaaattttttataatgtatattacaaataacaaaacaaacaattattgtagtccttctttggctttggtcaatcagcagagatcgcaatacgccttgacaatgaagaacaacaacggacgaccagaattcggatggaggatggcacttatgaggctagctcggatacgaattgaaaacacgtacataagcacgattttttttagaaattttttctcttttatgatggtgagaatgtggccggtgaaattgggatcactttaaagaagcaaggccaaaaattggagcaccaaggcattcgcatcgatttgatcggccaaattggttagaaatttgatcccccattcatttgaatgactcagtttattcagaggtgtactatgacaggggtaatcagcatgactttctgtatatgtccaaagaattggcacggcctggtgaattgttacaaaattccaaatttccattcaattttaccaatgtcagcaagccggtgagttctgctaattgagccggtggtaacatattttaaactgcattttagtacgaaagttatatgggttccaatgttaaattgcgctattttcttcgcgtcactgtttttcgtcgtcttaccgacattgtgcaagaattggaggtataacaaaaaccggaaaatgcgttaatagtttggtttgtcttccccctcccccatattacgcaaaaattttttatggcattgaaaaaatgttcccaagtttttggttgttgattacaatacatttgatacccttttcggcgaattccagaccataactcgaacaacaagtagaagtagagtttttaagtgcactttgaatgttcatcctttgcattattggtgctttttattttaatgtatttaaaaattttggcccctaaagaattttttaaaaatttccgacctttttgaattccgaaattgacagaatgaatatttttcgttgttatcgactaagaaacgaacctaaatatattttatgacagataataagtaatttgcataaaagaaaaaaggggtgagggggcgggggacaagccaaagtattatagtaccaaaaatacacgctgtgttcacggtttttgttttaacagttcgctgtccatacattagctgtctatcctgagaatgattgcaacatcaaaatggaagtgggcattgaggattgtttgcacatcgagttcgagtacaacaagtcgaggcgagcaagcacaaaaaatatttaaaaaaaaaattttttttttttaggtatcacctaaaggatgtgattgttgggaaaatttatttccttttagtccgcatcaaaattaaggtctgtagagctgttgtttgacacttggtaaaatgaatcaaaaaatggagtttgctttgagtctgtgttttagcaaataagtttttgctaaaaaaatattcggtaaattaaaaaatgaaaaaaaatccgagaagagggggaagagagttgcgcacccccctatctcctcaccaaaatttttaaagcgaaaaaggatttttttggtaaattctaaattcgacatttatattgttttaaaataaagcggcaaaactttggtggccgtgaagagcaaaaaagggtcgtcatctttatctccaagtcggaacttcctggaccttccctgcaaattatttgcacatttttttttctattacagcacatggaaattgcaattctgaagcgtgaatccgtgggcaatgggccaaatttgttcaacgaaaatgaaacaattgccaaatacgaaatcatggacggagcgccagtgaagggtaggattgttttttattatttaaattgtgaaaaaaaaaaatttcctttggtactttttgtccatacgcccaaaaattttaaaaaaaaaaattaacaaaggatgcaccgtgttttttttttgatggcataaaaggaataatttgccccaagacaattctgaggttttttttcctttttggggtaacttattcctttttatgccatcaaaaaactcagtgcattctaacatatttttaacatttgggggtgtatgtacaaaaccgaaaagtatctttcttctttttttattaaaggagaatccattccaattcgtttgtttttggccggttacgatttgacgccaacaatgcgcgacgttggaaaacgtttctcagtaaaagtacgttgttgaattcatcatgcatgggtcgggagatcactttttgcgccgattcatttactagctggttttttgtgacttttaaaaaaatgttatatcatattaaatttccaagcgcccaaacggcggcgctaaaaatttcctcgttccatagaattcatatatgtattccgtggagaaagtaaacaatttagt

SEQ ID NO: 12256 - DNA, 1259 bp, Heterodera glycines
  unsure (1)..(1259): unsure at all n locations
atttcatagacatgccccngcccttcaggaaatcacattatggcgacgtcttgaaaagccactgttgcgccattcacaacagcaacagaatcagaaggctaccgcccaattggttccctcaaccggcactgttgaaagtgttttatcacctaccaccccgaagggtatggagaaaatggcaatagtcacgtcactgataaaacttttcctaaagcgttgacattcaatgattccaatgaaaagccaacagaaacggaagaggaggatgagtgacaaacaaaataaacattttattaaaattactcaatttttagattgttttgtattgtttatttatttaggatcatttttatgaaatgacataatttttttctcaacgccaattgacttcacgtcatgaaatatttataactacataaattattaagtcttcttgcagtatttgatgcattcattgtatgtcctaaatatttgtgttttggagaatcaaatttaaaataataattatttattattactcgaaattgttgccatttccgagtgcaccgtaataagtgaacagaaggcaattgtcaatgtctttcttgtagaagtaacgctgtaaattttcagtgcagtgttttcaatttctgtccaaaatttaccggcgtatgcgacccctggaaggcgtatcgtcccgtatcatattcaataccgcagacaatttcttttagggtgttaattttgtaagatacaattaatttttgcttaaagcgcgcatcgtttggtctctccccattttcaaaagaaaaaataataattaaaaaattcagttgcaattatgttttccgagtgttttcttggtcatttgatcatgaatcaagcattcacttgtgcaaattctgaaccctggaccgggaccgaacaaaaagtcgaaatttctttttagtttagaattatttaaatgatctttttgttggctttttagtttgtttctttgtatttaatccggacttgagccaaaaaagcgaatttcgatatgaatttgaattttcgactttcttcgaatttggatctgatattaagaaatggtcaaaatatagtttcatgaattttgaaaacaattttgcatgatgcgccatttccaaaattatttgtttggaacctttcgaacctggacaacagtttttatttgcaacacatgtgaagccgtccgggcatttgtcagtgccggcacttcaatcactcctgcattagcgttccccgctgcgcgaacacca

SEQ ID NO: 12257 - DNA, 2480 bp, Heterodera glycines
cgcttcttcccccgcctcctcctccttctcctcctccgcccaattgtttagtttttagttgtgcctttctttctctccttttcactcgtaaaaaataatgatggcggcggctcttttctcgcgcttttatgtagcacagtaataattgaataaaatgtgtgctgtgtattccgtgtgctaagtttggcacttctgttgctgctgctgctgcacacaattatatagcgccattcctttccatttatgtgaattctaaaaagccatacagtaattcattgcaaaaaaaaaaacatttttgaaaattaattttcaatttgaatttatctcagcgtacaaaatctagtaaatgtagaataataatgaccggaaaaaattggcaatttccatttaaactctatgaagtccctcccaaattcttaaaaacaaagttaacaatcgaaattgagtctatgaaatttacaaaattgtttaaatttacttaaatttaatttaattctttaaaaatttgtttgtttcattttcggaaattaatttggttaatttgtttgtttgttttttgcatagaaaagctaatgtcaacctaacacattgacgtcggtcgtcagtcacttggacgccattatcattattattattattacacttttcttttgctacttaatcgccctttccccgttttttcatttttttgcctcctccccataaatttcccgttttattatttcgtccccaattttctgcggtgcaccggcggggcctttccttccttttgcattaatttttgtgttcgcttcgctcgtcggtgtgtacagcatttatcagctgctgctgctgctgctgaaaattggtgaagctgttttttgagaaggtaaacaaacaaaacaaaatgagagccccgccgggcaaagggttgggatttgggattttttggcattatgcgggggagagattgcccggcattttctaagcaaagtcttttcaagagtggcatgacggcatggccattacacaaaatttacacagtttaaggctatgcccataaaaggcttttttaagcattggaaaagaccgaaacggaacgatttgttaccgaaaaggcaaattttatatttatttcttggcgttttgtttcaatttaaattttttttgttgtgaattggcattttcacaattttcccgggctcaaatattcgctgactttatctaggatttgtctacctacatatgtatattctttccctgttccggttaaggagtccgggaaaaaaggatttttaactctgaaatccaatccggatgcaattcccaggactctgatctgaattcgggaatctcaaaattcccggcgctttaaaaaaatttctaccccggaaaaatctgaaaaagagtcagccctttgttagacccttcaaaaaactcacccgggttacccattctttaaaagtgccaaaaatatgggtttttttctgaattgccattaaaaattaattaaaattcagggcgcaaaacaaaatttgacgacattgcaccactaacgacaagcacagtgcacaggggtcgacaacaacaccaacaacaacaactgccaccagcaacaacaattacaaaagttcgaccaacgacagtaatggcggccacagcggtgaccagcaccgtagtcgcgccgcaggcgtactgtagcggcgtgtttgagcgccgccggcgccaaccgtccggcgttgtggtggcggcggcggcggcgagcagtgcagctgccggcgctgtgcttgagcagcagcgacagcgacggaccagcggttggttggagggcaaaaatttcatgcttttttttggagggtgatggattttaacggatttttttaatccaaattctttttttttgtgtcattaatttggtgtttttgtacagattttcactttaaaacatcaaaaaatttagaggatgccatggaaatatcatttttttgacagaatacagagaattttttggggtccgtgtgaaaattgcaattttacacggtttttcaaatttccattttaaaaccctaaaaaatatataaaattacattgaatttttaccgcctttcaaattttttttgcaattaatttcggttgggttttgcactttccaccactttttaatttttttactaaaaatcaaaattatttgttgccaattaaattcgcttcacttgggagagtacaattaacaaccaaacaataaaaaattatattgttgctaatgcgatacaaaactcagcaaaaaaaaaaaactgcacttttcccccattttgtagcccattgttttggcaaagtcacaaaaaatggcattttttttgtatgtgactacaatttgagtctcctcattttgctgaattgtattgttggataggcaaattttatatgaataaattggactgatttcggggaaatgaagcgatttaattcaattaaaaatgccaaaacaaaaatgggggagg

SEQ ID NO: 12258 - DNA, 1785 bp, Heterodera glycines
  unsure (1)..(1785): unsure at all n locations
ctaaaaatcaaaattantttgttgccaactaaattcgcttncacttgggagagtacaattaacaaccaaacaataaaaaattatattgttgctaatgcgatacaaaactcagcaaaaaaaaaaaaaaaaaaactgcacttttcccccattttgtagcccattgttttggcaaagtcacaaaaaatggcatttttttgtatgtgactacaatttgagtctcctcattttgctgaattgtattgttggataggcaaattttatatgaataaattggactgatttcggggaaatgaagcgatttaattcaattaaaaatgccaaaacaaaaatgggggagggcatcatggccttaaatggaatttttccatttttttgtcgcttggtttgtgcccaccatttttctttgaaatttcagcgcggattaacggagtcgcaaagcgtgccgccatttcaaatgcggcggacacaccgtcggcgccgaggcgttcaatggtggccagacatcaccggatcagtctgaagccgtcgccagccgaaggtattttttggcttggccatgtcacaatttgttttatttttggagtggaaaataaaaaaatattttattcttgatttcgaattagccaatgcatacctaaaacatttgatgggtcaatattgaattttttaaaatttacaataatttcctcaaattttagcggaaaaaatggggatttttttatatagtaaatctaccctcccaaaacgtcataaaacggggattttttgtcaaatttttttataaataattcatcaaatgttcaaattggtccgttaaaatcaggcccacattatatgtcaaccaatttttcagttttttgtcactttttaatgaaatattttgaatttgttgctctttttaaggcactgttgacattcaattcgatgacaatcagcagcaaatgccaacagcaacaattggtggtgctgctggtggtgatcagaataagcaaagctgtgccaacggttcttccaacacttctcctccggcacggcatggacatcaaactcagagccaacaacaaaaaatgacgacgacgagtcgaagcagtacaacgccaacgccaccttccacggcgccgtcgttgtgcccattgaatggcgtcggttgtgacggagaagcggcgcaacaaaaacaggacacaattcagccagcaaattgtgttgctggtgcatcttcatcatcatcatcctcgtctttttcagttccgaatgaggtaaaacaaagaaaaaatggggccctaaattatggacgattttacttggttttgtgagcaattttttgcgtcttaatccggctcaaattgtttttttttattaccctaatggttcagacttcttaatgaaaaaaaagcattaaaattttagcatttcgcttaaaaagcctcaaaattttgccaatctttgtccaaatttgttaataaacgggctaaaaatggaaacatttggacttttttgtgtgccattttacggttgtgccccatttttcggcacaacaatcgctgcggacgacggaaagccaatgccaaccgatggaagaagccattgccgacatgccaatggatgatgatgagaaggaggatgaagaagatgacgacatcgatgtcgaaagcgtgttggtccacagaaactgncacaacnanncacaccaaattgcatcaccacccaccacacttatatgccgtcaattgacaccgactcgtaatcccattttttaattttatttaaatttcgaatttgatccgc

SEQ ID NO: 12259 - DNA, 1744 bp, Heterodera glycines
  unsure (1)..(1744): unsure at all n locations
cggaccccaaagaaatggcacatgaatgatgaagacaaggcgattgtaatttggcacaattaacaaagctactggcgcagaccttgccactaattatctcctcctttaattttgctttttcgcagggaaatattgccgacaaatgccaaagattggtttctttaggatagggcctaatgtaatgaaaggaacctccgactcattcagttacttaaatgggcatttttcatttggccataaacccaaaaagtatgacgtgccgtcgccatccatggcttaataagtgttattactcattttgtttgcgtataaattggtagtgccctgctgaaatttgacacagcttttaatctcttctcgcgtggacatttaacaattttaattaatttcttcccccccccccccccacaaaaaaaaacggaagaaaaccatttcttttaatgccaggacgaaacgctggtacactgcagtctcagcgagttgccagatgcgacaatgcaatttgaggtggaattccaggagactgtgtatcaggtggggaaaaaattgcatttttttcccggaaaatgcaaattttttggatggtttttttgcaggtgttcgttagagtccgtccccatcttcacgagttcctcgaacgcttgtccaaccattttgaaatcattttgtttaccgccagcaaaagagtgtacgcggacaaattgctggtataataccgtatatttttttgtgctttttaatgtctgacggtgtgattttttaggattttctcgaaattttttaaaatttttggtttgcttttattttgggatgccgttgaaattcattgttaattactaatagtatcctttttcaaaataacatccaatatgttttcggggttaataaattcattaaaatcatttgttttccattttttgctcgaatttgccctgatttttttggaaaataaatgagaaaacaaacttttagtggcaaaaacacgaaaaaacaatccattggattaccctaaatatggagaaaatggacaaattaatttgttgtactgtttgtttgttgttataattggacagtttcacttttgaaaatcattcataccctccctaattataaaaatgctcaaattaaatgtttttttttgaatttttcagaatttgttggaccccggcaaacggttcattcgccatcgcctgttccgtgaacattgcgtgttcgtctacggcaattacatcaaagacttgaacattctcggccgggacttgtcccgcacagtgatcattgacaactgtctccaatcatttgcatatcaggcaaatacaaatatttaaacttttgtcaacaaatgttttggatttgaaacatttttcaaaaaaaaagggccacaatttttctcactttttttgtcgaaaatctgtcaaattttgtgtcttgataataccgccgccttttttgtgcagcttgacaacggcattctcatcgagagttggttctcggaacagagtgacaccgaattgctgaaactgatcccgttcttggaagcgcttagtcgtgaggtcagtttcaaatgatttaattgttaataataaataaaaaaatttgttggtatactgtgcataccgtatatttcttcctaccatttttctgtaattggagcctccaaacgacgttttggtggngctctatttccggggatcagttcccttctccccgtcgtttttttgaaattttccagcggatttttttt

SEQ ID NO: 12260 - DNA, 1510 bp, Heterodera glycines
cgtggaatgccattgcctaagacgttgaagccacaaaaccaatgaaaatacttgtacagtgtgacaatcacaatggaaattgaacatttaacgaattttgttggcccaatccacagccgtgccttttacacttgtggccttaattggcatatgtccatcgctggtgtcggtggctgggcagaaaacagaaagaccttactgtggaactctcaactgtaaccgggacgaaaacggtgggaatgaatgatgaatctttgtctcaaaaccccctgggggagggcggtcaacagaaaattttgccatttcaatccccagccatgaattcatttattttttggaattttaatgaatttataaagagaattagtcaaattttcataaatttctctctttcctttagcttatatgtaagcactgtttcccaaaaaaacaaatttgttcccatttaaattgtatattctaattaagagccgtggttgatgtactgcaacttttgggtcacgccgcgaattgattcgcaatggtttgttttggcagatgatcatctgcaggacagattcttgctcggcgcatttgaaggagaaattaatccaaatacaaattatgtgcaaaaccgtatcttgattgaggtcactttagtgtacgatagtatgccaatccattaaaaaaaaattcaaaattttagcgtcgtgttccgcccacggcgtccgtgtgccgacacgaggaagaggacgcaatcacgttgggcattacagtgtcacgtcaaaacaaaatacagtactataactggttcgggtcctttggccatggagggccacatccgccacccggtgcattggccactgactgagtgaggagcggagggaggagttgtgccgtgccgtgccgtgcaattcattgacagtgccgtaccatccattaacatgttcaaaattttgatccaaatgatctctgcacttttatgtttgttgttgtttatccgatcattttaattttacggggacaatttgcttatttaaatgaaatttaaattagaattaaatttggttgatgtgcatacagttcaatgcttaagagtatttgatcgtttcaattagtcttaacggctgcttctgatcagtggcaaaaagtgtgttccgtaagagagcgctttttgtgccatttcctcggccgttgacacgcgcacaaccaaacggaactctaatatcagtgtgtcctcctccgcgttgtaccatcccaagtcccggtcccacaatttcttaattagcaattaaattgacttaattaattttttgaacctgggcgaatcacctccattattctatttgtattttaaatcttcgagctttacttggattgcaaagttaaaattgtaatagaaatctcgtgttttttgggcaagggttgcgtgcaatttcgaaaattttcccccttttcgggatttttggtatcttttgccttcgatttcgtttttgtgtattgatcattgatcactgatcacatttttcat

SEQ ID NO: 12261 - DNA, 3031 bp, Heterodera glycines
aaatttttaattcacaattagtcatgttgctgatgaatataattatttttttttattattaattcgccaaaaatttaaaaattttggccatttgttaagtgacgtatttccgatttccgacatatttttgtgagagatgagaggtcgaaattccgattttcgatttcagaaatttttttcaggtatcgaagagttcctattttcacctaaaattttacgaaattatgtacccctataactaaactgaaattttaatttaatttatttttatttttacgagagcccggatcccgtctatctttttaaaacatttatccgtgagcatgtgtggttcagtggatagcccttctgctttttattattttcgcttgggttcaattccccagtggaatatgaaatatttcattttaattaattaaatattccaacttaaaaaattattattgtagaatatgctggaacacttttccacgcgataattcttttcatcttgttgcgaacaaattcgaaatgttgtttcaaagaacatttctcggtcggaaactaaattttatttgaaaaattaggcaaatggatgaaaataattattttttcattattcacttgccaaaaatttagaaaattttggcatttgctaaataacgcggacttacggttttcgacataactttttgggagggagaggggtcggaattttggttttccaattttcggtttcgatcaaaattccgatttccatccaaaatttacgaaattacgtaccccttgaactaaaccatgaaattttaaatttttgtcttttttttactcacaaattttgctgtccgtgtcacaatcaatatcgaaacgaaaactgattagtttttcaccatctttcaccatatgatcaattaacacacatgaattcagttgccatttaagtccactaaaaaaatttaaaaaaataaactttaggacaaagaaatatgcttaaaaacggtttgaaattaaattttagaatttttcaaaatttcaggtcaaaaaaatattttaagggtctgggatttccctgtttttgtaaatcctttttagcctccgattacgcccctgatttcaacgctgtcaaagctccgtttactgtcgccagcaatttgtctcgccaattcggcaaaattgtcgattttctgccgaagcgttgcccggcattcgtaattgcgtttggtggtgggaaattgggccacaaattggaggggacggcacagcgcggccggaagagtacggcacgtgggcttgggacgagaacggtgccattgcaaaatgctggacacctcacactcggtgagcagaccagaaggaactggcaaaaaaaaaaggcattttaagtgtaaaaaacccaaaatagtcacaaaaataatatcaataggtcattcagtaaaaaaaaaatatcaaattttctggggccagtaggaatacggtattttatatgggcggaaaatggcactttgttgaaaaaatgctctaaaaacggtcacgaaaataattgaaaaagccattctatgataatgtctaaaaattttaggatttgagagatacggtagtattcggggatacggtgtttttaattgataaacagtccaatttagtaaaataaaattctttaggtccgtaaaaatacggtatttatgtgggcggatacggcactttcgttgataaaaactccaaaaatagtatttttagtgggaagggtaagaatacggtgtttttggaggagacagtatttttgtgttattgtaaaaatgtagatcgtataagtgattttgaaaaagcataccgtaattgcatctaattgaaaaaatgagtatcaacactagctaggtgtacggtatttgagtataattttaaaatgctggctacagtattgaccaatttgagtcgaaaaatccgtttcaaagatgcacgggaagcggattttgtacagtgccgggccaagcattgcacgacgattctgtgccgaacattcagtatcattttgacggcatttttcgtcggcccaacggagagcctttttaattaatttaaaaggaaataataaaaaactaaattaaacaattacagcctcccaaatgacaaattctccagcaatcagcagttgatcacgcgaaagaatgtcgcacaataagctctgatcaatttgcaaaaatgcgtccgattgaaacaatgcgtccgcgttttgatcaatgtaagccaaacattggtcggcgaaatgccaaaatgggaaatgtcaaatataaatttaaaagaatttgaattaaaaaatattgggaaaatgtagagtatcactggccaatgataagataattatttaacagtttcttaaatatttcaaattttttaaatttggatttggctttaattgtttttttggaaattaatcggtaaaatgtgaaaaaataagggtaaatttgaattctgctgcttaatcccagagatattgtcctgtttccccattcaagaatttctaatcctgatcgaaaccctaaccctaaacttgtgatccgaatcccgaaaactcctattttatccctaaaattcttctgtcctcgtccgattccttcccaagttttgtgatcccaactttttcctacacacattttcaccaagaaagtgcgtctccgcaaatgcgaagaacacattttgcagctgaccaatgggaaagtccaaacatgctctgatcagtccgatcacattatattttttggctaaatttatttaaaatgacaaattttaaataattttaaatttattttataatgcttttttacccgcataaagcacagcaatggcattttgaccattcaattggctcagatcagccgaataaataaagcgaagcatcgctttgaacgcttcggccggcacatcactgatcggcaccacatttttgtggtcatttggaacagaaaaagtcaaacatttattgataataattttaattaataattatatatgtataaattaatattaatacactttaatattaatttttattatt

SEQ ID NO: 12262 - DNA, 1034 bp, Heterodera glycines
tggttcgaatcaaacggcaaatgccgcgggtcatatggataggaaattttcaaaaatttaaccttaaaaaactttaaaattttttattatttgagtaaatttaaataaattttctccgattatgtggccacctcgttgaaactgttgacccaatcgaagtttgattgtccgttcaactcttcgtaacaacgcaattgcttggccatcagtgcgcggaatgtgcaaccatttggacaacgcttggccagcatttaaatttggcccagcattagcgttcaaatcgggcaaaagataattggaattgatccaaatcaattggtggcaatcagtgagaattgtcggtgaaatcagacaacgcaaattgtccaaatgatcgccatctttgaaagtgaaatgttaaagcaaattttgttcggcatcggacggtcgaatacgacggatgattgcgccagtggggaggggggggggggggggtgtttcgggaccgatttttcatacgaatacattcaaaaccgacaagcaatttaggttttggtccaatgtccttgtgaattttaatctctctccaaattctcaattctctgcgatcaaaatgcgcgtccattaaaccatcaaaacggggcgaaagaagtgccaatttgaggccgagttgaggacggcgaaaaagggggaaaatgtccatccaaacatcgtacaaatccaactaaaatttgttaaaaatatttttcaatgagttttaaaaattaattgttttccatggttgatgtaatgattttccaagttcaaactcaaaagggtaccccaccccccccccccccccccccaatacggttttttggcttgggatacaccggtgggggctatagtttttgttattctatttaagataatattttttgtgcacaataggttaataaaaacttttttttattaagggagacgcatttgatttctgatgcctactggtcacaatcaaattaattaatgatcatttgcctcaaattttcctcaaaattcaattttccattttcttt

SEQ ID NO: 12263 - DNA, 1323 bp, Heterodera glycines
  unsure (1)..(1323): unsure at all n locations
ggggggggggagttgggaaacccgatttccgaaaaatttcgctaaatttgtccgaaaatcaacaaaaattagcaatcttttgatgaaatttgctaaaaatatgcaaaactttatgtacgnccattagcccatttttcatggttgggaaatgatatttgaatgaaacaacaaaagggtaccctcattacgtttttttggctttgagtgcactggtggggggccttttagggttgagtccgaaatcattaacccaaatttttttattatttatcatttgtctcaaacggagagacgatttaaaattagaagagagctgcagcagaagataaaaatataaaacaactgaactgaatgagaatgaatgatgaaaagagggatggattttgggactgaattggatgtatcttgaattttactcttttcttgtttcttggcattttgttaccgtcaggcatttcttcttaacactttctttgtcttttttcttttcgttttctttgaaggtaaggcctcgatccctctcttggtattttcttatcgcacagcgtatctttggtattatcttgtttcttggtatttcttatggcccagcgtgtctttgaattttactctttttcatgttcattggcattttcttttggcatatagcatttgccttgtcttttcttgtttcttgcatcttaccgttaggcattcttggaaggtacaggctcagaagcttcgcggcctcgcacctttaagatactatttttcggcggttcctgtcggcatcgccgcctcctttgatttgaaataaagtagagagcggtattttgagaaaatacggataagggcaagggttacgggcttgacatcaatacgggttacgggcttacgggctaaaaacccgtaaaacccttaacccgtaaaaacacgtatcggccgaaaaaaatacgggttacgggcccgtaaaaacccgtatacgggtccggcccgtacccgctctctaaaataaagtatttttattaatccgttggcacaatggcacgtgatgttattggcattggcatggcctagcccaggatatctatattcttggtattattccatgtttatatctcatgaacacaaacacggaaaaaatttttgattgtataattaagcctaaatataaatttaatataggttttccgaaaaatagtaatagttacaccgttatttctacaaggactcgagatttttaattacgaatttctttttatttaattaattaattttacaaaattttctagtctatattaatttttttattttttcattaattgaataaaatcaggcgtgaaa

SEQ ID NO: 12264 - DNA, 658 bp, Heterodera glycines
  unsure (1)..(658): unsure at all n locations
catgaggaggacgatgacgaatttgcggcaccaccggctgccgaggacgccgtcaaacttctgaaaattaaaattatatcaaatattntagttgaatttttaagatattaaatttatttttaattttttagtttataaattttacgccattatttggaattttttcacccttatttcacgattttttcgcccctatttaggtacataagtatttgggttttttgcccctgaaaatccgccccaaaatggtaaataaagataaaaaacgataaaatgaaaacaaatgaattaaaatattgtattgtctttaaacttaattgataaatttaaaaaaacaaatttaaatttttgcaatttaggtaaagcacaatttttatttcattaattttcaaaatgaaaaataaataattaaagaggaaatcattatttttattttaaattaccttccgatttgttgcgacttttcgtccacaattggctccggctgcttgcagatcagaaatggtacgtagaacatttttgagcgcagcagaacaccggacaccgtctgaagcattggaagccttgaaaataaaaattaaataaaaaaagaataaaaaaattagaaaataaataaatttttagcaaattagttagtttgaaaacataattgactcta

SEQ ID NO: 12265 - DNA, 2831 bp, Heterodera glycines
  unsure (1)..(2831): unsure at all n locations
cggcggaggcgcggaagcggaaggggaggaggaggaaacgccggaggaggacgcggaaagggaggagccggccgagagagcgcaccccgcgggtgaaaagcactgaaaggccggggaaaaagcaatgaaagacaaagttaaaatggcaattgtcggaatgattcgcaaatgatacgcaattaagtcgcccctcccttttgttgttgccgctaattacctctcttttttgttgtcgcgcaacaattaattgattgattatacctcaatttgctgttggccttcgccggccccggccgcctcgcaaatggccaacaaaagcacgtcccaatagctgggcggtaccacttggccattgtccagcccaatcgcgtgctgtgccccaaattcggccagcaattcggcgccgggcgccgcgtcatccgccaaagaggcgcaaagggcggacaaagcgtaggaaaagcgctgaaaatgaatgggaaattcagccaaatttcgatcggaaaacagttttcaatttaccattgtaagaactcgaaattggggtaaatttttccaatttctgtcgttttgtcggaggactgtccgagcgaatgattcattgcggcgaaaggtccgttcgaaaatgttttcactgagtctgaaaaagagagtgaaaatgctaaaacaaattttattttatttttatgtacagtaacattttcctaccgtaaaatgtccgcggcggacaattgtcgccaccgtgccagaatcagccttttttgtggcaatgtcagtgcggtaattggacaaagcatgcccaactgttgttccatggcactgtttgccatcgcttggggccgcagacggacgccggcgggggcggtggacggctgagaggggccaactgagtacgggtggggcacactaaaaagggcacatttggcattttgtttatttatcttatggagaagctaatcaacggaccatctgccgtttatgtgttggagtcggaaggattttgcgcgacgtccgtcgaaggaacgccccgcggggcgttggcggcgaatgccatcgcccaaacggccgccagtgggtgcgacggcacaactgctgaaggcactaccgcttgtcaaatttgcctcgtcaagcgaagcgttgtcgctcatggcatcggccaaaactatcgctaccgcgtcgggacggtccgcggcacagccaaaagcgacggatggacgcccatccgaccgagcggaactgaacgaggccaaacgaatggatgagaggaatgtcaaactgatcaactgatgaccaacaactgatcagatcagatgccacaccggtcgcttttggttgagccgccatttcgttgggcgccgctccgaccgctgccgccgcgccgctttgactttgccgtgccggccaccgcggcggaaagcaccgcccccgcggttgccaaactggccccgttcatgtcatgccaccggacctccaaaagcggaaattgtttcatttcttgctttcaaatcataaaggcgtacggacgctgcgactggggcgacaggacggagaggagtcagtctggtcaactgatcgctgtccaccgccgcggagcggatcttcacaagcaacaagggatcagcctggtcaactgatcacctcacagattttacgattaaccaaaatcaaccgcccgcctttctcagcacagacaacccggaatgaggcataataaataaaacaacaacatacaggcagacttgcagcaactgaaccccccgacaactttgctgtggggagtgtcgcgactcacgtcacgagaaataaaatggaaatgataaattttataagcatgatgcaatttcattaaaaatgggaaaaaccttaatttaattagaaatgttccccctcttcgtcgttctattcaaaaaatatttgtttgtttacattcaattcttattcatttctcacacaaaaatgtattaatcagcgaatgacaccctatttaagtcgtggaattgttattgaaatcggttcagtcggaataaaacatcattcccctgcttgtctactgtttgtcccaatttctattttgccaaaatttttgccgggccgaatttgcctctgtttggtcccgacagcgactcacgtcacgagaaataaaatggaaatgataaattttataagcatgatgcaatttcattaaaaatgggaaaaaccttaatttaattagaaatgttccccctcttcgtcgttctattcaaaaaatatttgtttgtttacagtcaattcttattcatttctcacacaaaaatgtattaatcagcgaatgacaccctatttaagtcgtggaattgttattgaaatcggttcagtcggaataaaacatcattcccctgcttgtcttctgtttgtccccctttctcttttgccgcnttttttgccgggccgnntttgcctctgtttggtcccgncnngtggtgcnncggccgggntcctctgccctgntggtngcttgtgttcngcgggtggccgtcgctggtncncgggcgnccggncggngnggtccgtctggtcngctgntcgctgtccgccgccgcggggcggttcttcncnngccgcggggggtcggcctggtcngctggtcgcctccctgtttttgcggttnncccncgtcggccgcccgcctttctccgctcagacggcccggnntgcggcntnntnnntnnnncnncnncntcccggctgncttgcngctnctgntccccccgtaaaggtgctgtggggcggtcncnnctcncgtcnctgcttaaatcgaggaaatgataaattttataagcatgatgcaatttcat

SEQ ID NO: 12266 - DNA, 1434 bp, Heterodera glycines
  unsure (1)..(1434): unsure at all n locations
tttcaaatcataaaggcgtacgcccgttgcgactgccgccactgccacgcgttcctcacngatgcggaagtacggtggtgcggctcatcgccaccgtttcctcggccatgcggggcatccgctgggcggccaagcgtgtgcagcagcaagcggaagcggcggtgccttcggacgatttttgtgttagtcgacgcggcattcgaatgaatttggcggaaattgactgaaaatgaggaaaatttatacggatgtcattggtcttaatcatttcttatctcccttccatctcttccccttttctctttccctcgaattttctctttccccctcccatttctcttcctttctttccctctctctttttctccttttctctcttcccctctctctttctctttcacctcttcccttctctctttctctttcacctgttccttttcctctctctttccccccccttctctcctttcccctcccttttctcttcctctctttccctctctctttctctctcctcctttctctttctcttcacctcttctttttcctctctctttttccccatatttttcttctttcttctttcctctctttctctttcacctcttccttttcctttttgtcccccttttcctgcttctgcttcatcttttgcttctcctgttccatgctcgtgttcctctgctttatttgcagctgttccaagtgttcgctgcaacttcgcttttcctttttcgcctttttcgactgtcgcaattttccactgcccacgtgccgtcccgcggcatttgactcggcatttcccatcaaatatttatttaaactaaaataatttcctttataaaaattattttgttccattccatgttcaaagtgccgcaaatggcgataaactcccgggggcaaatttattccatcgatttttcaagcggaaaattcccccgggcgttagcatttttaagtgcttaacatagaaagcaaaagtcagatgaattacaataaacaaaaaaaaagaggaaaaagaagaaaaaattaaacggaaatattttgatttaataagtaatattttcgaaatatttctttttaattagacaaattttgatttattttatttgtttcttttattttattttaatttttctcattaatttttgccctccgttcgttcaaatggcccataaattttgccatggactgataaaaaattcttttacccaaaggaaacgtaaaaccgtgaagggtttcgcgcccgcgtcagcacatttaatcctttcggaggaggacaataaaaaaggggggcacagaacaaacaaagaaaaaaaggaaaagcattgaagggaaaaaggaaaagaaagcaggaaaagaagcaaaggaaaggaggaaagggcttttgggttttgcccttatcgcagcggatgaaaacgaagccttgaa

SEQ ID NO: 12267 - DNA, 1550 bp, Heterodera glycines
tttgtggcactctaggaagaacatataaatttaaatggaaagataaattcttcatggctctttttaagtagtttgattttgtgtcataaatatttttattttatgtataatataaacaaaataaataaataaataagagtaaaaagacaatattttgggtagaaatttaaattaattagaaatttaaatgaaaatattatttaaaaatagaagtacaattgatttccaaaattgcaacatcacaaatcaaaaataattttttgatcaaaaaggacatttttaaaaacataattccaatagctaataattattttattcaacttaattcaatatttttttttactccaattcgcaataatctgattattttaggcgttttggatgaacttgaaatttggggccatttttgatttttttattttaattttagaataaattaattgtgctcgtccggaaaatttttgaaattttgcgtagatttgtcaacagttttacctcttttcgctcctttttaggtcgataaaacagcgctcatttcatacagaaatttatttttacgtttcgtgttcactaatcaaaaacaaacaaagaaacagcccaaaataaaaaaaagaattggtattttaagtttaaataggagagacatgagagagatatgtacaaatacaacatataaaatgtcaaattgagagaaatgaaacaaaaatgtcagaattatttaatttgtgaattttctctatttatctgagcttaaactcacaatgcaaatttcaattatacaattatatttaagaatatatttattagcacaatattcattataaatttataatagtaatttttcaaatgtttggcaattaattttcccattttctcgactaaaaacccttccttataattcatcatcttttttctgctgcttctcattcaaaagaatttttattttgtggcggtgacggcgataaacaaatgcaaaggaaattttgaagaaaaaggggggaaagggagaagaggaagaaaaagggagggaagaacctgctgagagggaacgaaattggggcggagagcgccggggggcgagcgaaggatgcgggggatagggggtgcgggggggcattctggtcggctccgtccttttccctctctattctctgttgcccaattggatgatcggcggattaacttttttcatcgccggttacactttccaggccaacaatttagccaccgctttcatccttctcaaccgacttaccgcgattgccgtcccattgaaacatgacaaagtacaggacttgtcccaagtctccccggacatacatatcttgctcataactagagcaaagatttttaggagcgacaaagttggggggggggggagagtggaaagagataatgagagaggaagacaaagagatggcgagagagtgtggcgacctttctcatctgtgcccctcttccctcatccttttcttctttttctacagggtgcctccagcacaaccaccgccccactcatcgacgagtgtcagccggcccccccccccccc

SEQ ID NO: 12268 - DNA, 1210 bp, Heterodera glycines
ggttcaaattaattttttgcggaaatgggaatcgtaatttttttccccaaaaaatttgggaaaaccctaaattctggccggtcccctcgtgatgtccccaataaaatccatgtccacattttgttccctctgtactacaatatacaaaaaaattcttgttcctactataggcccaccgaatggatcggctttttgattaaatgacaattaatttatatttcgtttccatgactatatgcaaaaaggcttcagttttaggcacccataaaagcgccataataggcacaaaatggagaatcaggcattcacccccccccccctcttctcattccattctttcgtccgcccgttttgctcccccccccctcccctctctttcctccgccagtcgaaggtgccaatcgataattgtgcattgggcgggggaggggaggagggatttgtgcgtactttttgtccacgacgaatgctgctgatcatcgaactgcaccagcagcagcaaaagcgaaggtgtgcagctgcgacgggcgggcggagaatggctttgtttggtttcggcttcttttgttgttcaaatgcctttgaacaaatcgcaaattgtcctcccatcgctttggcaccgtttttcggcacacttttgctttgtttgtttgttcactaattgtccatttagtacggtcctcccctccctccctccatttccgtcattttttgtccactttttctctgttggtccttctcactctttctctccccccccattccttctcactaacccaaggacgtccttccgtcgctctctcctccgccttctctcccactcattcccgtcaaattccatggcggtatcctttcatttttgtctctgttttataatatctgattagtctttgatctaattgatattcatattaatctgatctcctctcatccatcccttctgtcccccacctctcattcacttttttttaaactttcccttcttttttgattgagtttaactctctcctaccgtacccccgctcccatcctacagtactcttctgagttttccctctcattccttctcccctcctccctttcccctcacaattcttctgctgctgtgtcgtcgtcttcgtttggaatggcccttctcttctctttggttgggcaaattttcccatcaatcagtgcgacgggggggggggggggggggacaccccccccc

SEQ ID NO: 12269 - DNA, 3419 bp, Heterodera glycines
tgactttcccttcttctttcccccggttcaatccctctacagaaagtaaaatattttgaattttctttttgtatactcatggctttcctatcgacaaaatatgattcctcatagttttattttaattgacacatttttatcattttttaaatgcaaatcctaccaattgagcttaataatcccaaaaacctgaaaatatggcaatttgtgagaaaggcttaagaaagtttaatatagtaaaaaatggttacgtgttatggagggcgaacctcccattttattcactgcagcaaatacaccgcggaccgcagcacatttgtggcccttgaattgaagggaaaaccgttttcataattaatcatcagggctgccaaaagtatgcaaatgcatatttttttcctggcttctccatgctctaaatagtacgaaaaacactttcttttttgtgtttgcgtataaaaatcgggacttttatttgcatatttttgcttgttttacattctcatgcatattttaccattttttgtgcatattttccgattttttgcatattttgacatttttcttcaaatattttccgattttttgcatattttgccatttttcttcaaatattttccgttttgaatatcccttaagtaaattttggcagacaataggatggagctttagtgccgaaaatcttgaaaaattattgattttcaattgcaaaaaaaaccgataaaatttatgaggaataaaaattttttattggatttgcacccctaattttcaagtttttttttgtgcatatttggtgcatattttgcgatttttgtgcatatttggtgcatatttcacgactttatttgcatatttatgcgcatattttggccacttttcgtgcatatttttggcagccctagttattactgtacgttggaaaggaataagaccaacatggtattcaatatcgtgggaaatgcccccccccccatgactaagaccttgaacaatcttgtacttatctcccataaccaaaataattgaagcatttataagtttacaagactgaaactttggttggttttaacttgatcaatgaccaataccctagaaatcttgtaaatattaccatggtcaaaaaacttggaaaattttattaagcttgtacaaacctatgaccaatattttatctatataattgtacatcatatataatgagaatacaaatgattcaatggcttttgataaagcttaaatcttggcgctgttaaattgcttagttcttgaatctccgatcgtccaactttcagatgtactggacagatcgacggctggaaaaagtgtttgctggcagcagcaaacccaaccaaagctccatgatcctttccccggtcactgttgttggtgatctgcaagatctgactgatctggcggcatttgacgcgttggcacagccaaaggccacttcgccgtgccatatcagtgaaagtcttcgaaaggtaaacgaaaaattttttggaaaaactttagtagttcatcagaaaattttgaaaaacaaaaacgctgaaaattttcaaaattatgaaaaaatttactaagaatttttctttgacaaatttttatccattcataaattttgtttttcgatttgtcccaaataatattccaacaatttgatgccattctttttggttttttatatttgactgttttagtcaccttgtcaacaattgtgcctggccattccgggctcatcatcgccaaactgtgcatgtgccaagggggtgccgaaaggacgaatttgtgacggtattatataattattaaaaatcattaaataattcattaaattccaaattttagagcccgacacattcatggtactttattattttaattatatttaatgattttaattaattattttatactatacaatgaatttgagtttaattgtttgtttgtttgtttttggaaaatgcgtcagtgatactgtattcattaggaaagggagacacggtaaaatgttttactgtttgagaagcagctctaatatctaataaatcatttttaaacatgtcgttataaaatttcccaagacacgaaagatttgggtatactgtagcggggtgtaatataaacaataggttatcattgcggggacccacgcgtttcggcgctcccgtttcggcgccgcaaattttgaaatgctataacttttttatttgtcagtcaactttagccattctggcatcatttgaaagctctatgtgtgctctatatttacatgccaaaatagaaattaatgattcaacaataaaaaagttatggcacgcggcgccgaaaaagccaagaaaaagtcaatttttgaggttttttggccataacttttttataaacggatgaaattttttgaaattttgcaggctaatagagaatctcaagagctatcgaatgataataaaaatatttaatttggttgataatgaaaaaagttatttgaatcagcgccgaaatggtccgcgccgaagtggccggttccccaaatacattcattatctatggaattaattgcagatgttcattgatggggaccgtattgtggacgcaacaattgtgccggacataaaggctagcaggtgaggggaatggcattttttaaatgcacaaaaaagttattgttttttttaaatttaattaatttcttttttttaatttccagccctttgcgcgaacaattcccgcctttcccgtccattcaaatttttgatgttgacgtgaatttgcgacgcatttatgtggccactgatgcgccaaatggtgctaatataaggtggaaatttattttacattgataaaatatgctatttttaattttcttttttaattcaaaaaaagaatatttaaaattttattattatttaagaatttaaatttcacaattaaaatcatttttttaatattgcatttaattaaacaataatttttcaaatcattaagcaaattatatcaaactaagcaataatttgttttaatcaattcaatatattatttaaaataaaattgctgccagtatttaaaataatttatcagcatttaaaaaaaacaacaataaaaagttatttttaaattatacaatcccattaaaaattatttttaaaacttttaattcaaaaaaataaatttactgtttgttgccagctggttcccaatgagtcagccaaagcaaatccgccaattgatcaatccggagcgtctccattcgttggaaatgcaaatgggcagtcgccatgtgtccgacatgcgctatgattgggtcacacaaaagctgtactggacaaccggaagatcgggtcaataattttttgttaaataaattataaaattttatacaaaatttttaaaaacattcatcggatcaaaattttaaaaaa

SEQ ID NO: 12270 - DNA, 3457 bp, Heterodera glycines
tttttataattataattacgaaagtctctgtggagctcatacgatcacctcaaattggcacgtaattgaggaaagaattgccgcaatttgggcagccgtgcgctgctcaaatttgttgtccaggatcagttcggtgatcagaagttcctggaaaagggaagatactttaaaaaaaatgaattaattcaaaatcaaaaagtggacaaagaaaatttgataaacatttgaatttttaaaatttatttaaaaacacctgtgaaatgaattcaatttttaaaaaataactttaaatttcactccattttggggcccacaataatttatttctcacaaaaaaacatttaaaaattttatgccaggaatttaatttttaacaatttattttcttcatcttattgttagtccaacaattttgattaaaataataactacaaatttggaaaattctacagaatcataaggggaaaaatgtttaaaatttaaaaatttccatctaagaaaatgtaatttgtttaaaaaacatttaaaatttaaaaatttagtgccaacaatttccccccccccccctcctcacttggttgctgatttcgcacgccactttgcccttgaggccgaccatgttgtgccggtcaatgtaatgcaacgcttggagcaccttcagccggtccacgtactccttggagaactgcaggttgttggaggacgtctcgaaggctaaccgccgcttttgctcctccaatttgcaccgatgggccatcagacggagctgaagcacaaattttgaaaaaaatgaaataaaatttatccgcctcgtaagaattgaagtttttcaaaatttatttgattttaatttaatttttcccccctaacaaaattgcatttgaaaacgtaatttatatagatagtatttattcctcgaaaaggaaatgattggaccgtctaaattatgtgatttctcacatgttggccaattagtggacactttaggcaggggaacagcgcctcgggctccaccaccaattgggcacggagttcgcgcacctgtgcaacacaattacatgtaaagaaattagatgttttattattgtagaaaaaattaaaactgaaaaaattttcaattaaaaaaataatttcggtggaggggggggggggcgaacaattccaaaattaaaaaaatttggggacgaacaattccaaaattaaaaaatgttaatttgttcggctcgaggcgagagagagtgagcgctaaaacggaggggcagtctctcgcaatgcgattgaaaattgaaattactcccccccccatttcggcacagttatttattttacgataactcacttcgcgcagccggtccaccaggtccacgtcacgccggtcggtgtcctggccaagcacgtagaccagctcggacatgtctgatgaaaattttgttttttcgatacagagtcttgaagccccgagacttgggactcccaatcccgagagagaacccaagactattccaagggacgatttgtacaattaggaattcaaaaaatgtttcaaaatttttttttgacagttttccaacaatttctgtgtcgtccgtcgccgccaagactgcctacctcgccttttgagctgttgctgctgctgctcgaagcggtcgctgagcgtctccaactcgacgagcagtcgccgcaccgcgcggtccggcgactgggcacggtacggtccgctgatgcgcctgtgctcctccagcaccgtgtccacgctcagcttggcaatgctgcgacggcacacggcggtgagactgcaaaaaatgaattttcagggagtatttggacattcttacagccgtagaaaatttttaaaaaatcggaaaatttccaaaaatttttgttttttccgttttcagtatgtacctgtccaggccgacgtcctccagtatggtgaaaggtgcctcgcgtgcaaatgcgtgggccggcacaacgccctcggggccatgcagcgcggcatggctcaacaggaggccattgcggtgccattttttgtcctaaacacacataaaaagaaattttgtggcttctcgcattcttaaaaatccaaaaatttgtttttttatgaccattttgttcgaatttggagggttagacattcggaaatcggttgaatggatgtagggatttatggtcagcgaccccgaaatgcccaaatttctggaccccatccaatttttcttttagaaaatcaaatttaagtcatttttatggcggagttttcggttttctgaatttttttattcttggaaaaagggtaaaaattccatgagaattttttacaaatttttgtttaagtaaatccctttcccgttaatccttaagccattcttcacccccccccccccccttcacctcttcgctcaacgcgtcgtacgctttgtgccgttggccaaactcggaaaatttgtcgccactgttcggcacgaacagcgtcagcaggaagtgaccaccggtgtcagtgaaacgggcctatattttgtggaggaaatgaaaatatttcaaaaaaaagaaaatattatcaaactctaaaagcaaacaccaacctttaaaacaacagccaatctgccgacaatggacaacggtgcgtaatggacaaccacctgccaaagcattgtaatcagttacataattaattgccaattaagcattggaaataattaatcaactgattaatggagaaggaggcaccaccatacataaaataggggtggggtaaatggagccaataaatttttttttgatttttaaaatttttgggggacatcgatttttccatttttgggcaaaatatccgtgccatgatggagtcatgaccaagcatgttaactacacgtgtgccaagggccttggccccctaaaaccgtgatgagtgagcattaattgtatggcactgaccactcggccaggcgcgaacagtttgtcctcgcgcccgcgctgcaccaccaggggccatgtggtggccaacgcgtcggcatagcccaacaccgtctcgaaatacaggcgcacggaggccatggaggaggaggaggacgacgatgtggatggcacgctgtcgttatcgtcagcgggtggcattgttggacaacaatttgtggtcgtggcactggctgtgccgtcggcggcggcaggaggaggagagggagcagcagcagcacaatgggcacattccatggggggcaaggcgtcaatttggtcatcaatctgtaagtgcaattgtgctgtttatggatgagtttcaagcaatttttttgtcacacagacaaattcagtagaattttgtgattatttgcacccctaaaaatacaatttttttaatcaaaatgtagagagagagagagagagagagaaaatggaaaagaaaggaagaaaaaagagctggagagaagagaaaaggtaggagagagagagagagaga

SEQ ID NO: 12271 - DNA, 1599 bp, Heterodera glycines
tttttttgaaattttcaagcatttggtggtgtttttctacctgcacatactccgtcgggttcagaaaccgcttctggttgccgtcaaatttttcgatggtttcaaacgcgacagttctggccggcatattctgcgcaaaaaaaaattttggttaaattttcaatttacaaaagtagcaaaatttaaatatttcaaaaaaaaatgtaaaaatattggaaaattttttcgtttccagaaaatattgccggaaaattttaaaaaatatgctcttcttttggctttgccaaaaaaaattgtaaaaactgtgccatttttatcggtaaattttttcggttttctggaaatttatctgtgtgtcccattttcattacccatttattaataatggttttttgtttgactgaccacgcccattgcaaatgtttcggtggcgaacaaaattttgacgtagccccgctggaagagcagctcaacgacctccttgacaatgggcaaaatgccggagtggtggacggcaaagccacgcttgcacagctcctgcatcagcaacacctaaaggcacacaaaaacgattaataatggcgcttttcaataattggtgggtaggaaacccgaaaaaaaccaaagtttaatgccaagattagagtgaaaaggtaactggcccaaaaccggcatcaaaagcatggaaaattttgaaattggccggtaaaagcgtggataaaatgccgcgagcgcatttcctccatcataaaaaattgagccagcatttttttttgttggaaaaatcacaatttttagaatgtttccttatgaagcttttttaggatttcagcaaaaaaaaaaaaaaaatacagccctatcgaattttcgctttcagccttccacccccccccctcccgcgaagccaagggtttggctggttacgcccttgggcatatttttcaaaaaatcaaggacacctgatacataccagggatggggcgaggtttcgcatttcgcattattcgcattttttagcgtttcgcatttcgctttttatttttcaatttggcccatccctgatacatacctccctccgccggtgggtaccgatgagcggacaatttattttttaggattttaacgatatttgcaaaacaaatttttgcccataaaaaacgacgggtgataataacctgcggcaacattttgtcggtgcccttcagccggtcaatgcatttggtgaagaagcggtggatggccgacttctccttctccgtggtcaagtccaccgattggagcagttgcgcggtgtcgtcacagcgttggcgcgaaaaaacgaacacaaccttaggggggaggaaggggggaatccggcatcagaatccgcgaatttgtaacggatttttgggatttttattttccacgcctcagcctcccccccccccctctccgctcttagtggtcccaccacaccaaaatcatataaaaaattgaaatttcacaaacatacattttttaggggggggttagcagcgaagggggggcggggtgaaagaggtggcgtgagagggttcgcagcgaggtggggggccgcacattgtggaaattttcttatca

SEQ ID NO: 12272 - DNA, 3224 bp, Heterodera glycines
acgcatgcttggatatcaatttttgacaagaaaattcgttgaaaatattttagaaattaaaatttttatatttttgatgcggtggaagcgtgggacatcgtttatccgttttagttttacaatttgtcaaacaaaaagttgggatggcttttaattgcataatcataattcagccacttcacggccaccaacactgcaacaacaacaaaatacgccttccacaagcggaacaacaacttcttgcattgtcaaaaatccgtcatcctttcacccgaaatctgcaccgcctgctgagagaaagcgcatgaccggtctgccgccaaacgccaaatcaaagtgcaaaaaccgaatgagcaacagcagcgccagcacaacatggatgccgaccgccagtggtggtggtggtggcacgcaatttggtggaccaatcgcaatgccaacgacgacgacgatgacagtcggtgacggcgcacctccaccaacaaaaattcggcgtaaagaaaatgatgggggagcgacggctgcagcaacagaaacagaaaacatattgtaattagacaattagtgggttctattagcacgaatattttgtggtgatcccggatttggtggctctttattgggttttaaattgttgtaattttttgattttcggttctacgaatttcgttcatattctctgatatttacaaaaatgtaaatcgggatcataaaattcccgttcacctatgcgaaaaatggggtacaattctttaaaatgccacttttttctctgaaaaattcttgtctttgtgtaatgaatggatgctaaatttttaagtttcgtttccagcggaactcagcagcatgctcaaccgtctgctgcaaagaatgtgatcatcactctgaatgatgatgacatctttccgatcaaccgttcacatttcaccaaacaacatttttcaaatgctcaaaaaacgctggcatctccacgacaaaaggcgccgcaaaaacacactcataccccacagacgacgacaaatactgctgctggtacaggctgtcaaccaagcagcgatacttctccaatgcctccacgaccaccaccaccttcattcactggcacttcatcatcatcattgtctgcttctgttgctgctgcagttcaccatgatccgtgtgccggcttgccacggtccgctctctccacaatgatcgctgcattatcctcacaattaagccatcattatcctcatcaacctcaacaaccgtctctcgctgtcattaattcgcatcagttacataaacaacagcagcaacaccagcaatcgtcgtcaatgacgagaatgacgacggcggtgacacagccaacctgttcttccccctccattgcttcttccactctcttccgacaacaagcacaacaacaacaacaacagcatcatcagcagcagcaacatggaattcctccgcttcaaggccaacaacaacatgttgttaacccgcaaatattgtcgtcacaacggaataatgctgaacagcaacaacaacagcagcagccggatttgttgcttagtcatctggtgaatatgcaaacagttgaacagcttcgactgcttggtgaacgttttgggcttaactggagcaatggcggaaaacagcgcaaatgagaaaggaagctggacaaaagccataattgtaagcactgaatgaattcaaatgactttttatatttgtattgtttatttatttattttttttcatataaaaatattcaggtcgaacaaactctttttttctttgtatttgacacagcgtccggaaactgagcccctgtaccaaaaaaggtttgcatgtgtggctcagtggtttttagaagatagtaaagggacaaaggacggaggttcgaatccgttgtgcaacatgaatacctatttttatttattttggtccaaaaaatttaaaaaaatacaattttcagtaattatttttgaaggtttttggcaaccaaattggacaatcttggtatcattcgaaagctcttgatgaggataaacttactaagcaagtgctaagcaatttgacatctcagaaaagagtagtgagagtttcaaattttcataatggtttcatgcaaaaacaggatgtttaactcaaaaaagtatttgatacgttctatgcaaaaaatttttctctatcggtgtgcaaaatttgaagaagatttaacaagtagaaaaaaagttaaacaggatgaagtaaattcagtaatatagataaagaaatagtacgctaaaaagagaggtgttttttctctgcactctctatttattgttacacatctcgttttttcggacggtgtgttgagtaggaagtaaagacaatgcgacagacagttcattatatttgttagcatgaaaaagatgagttggtgcatttaaattttagtacctcatatttgaaataacttatacacacacatatgtaacatattaaattgtcaatcccgtggaaaagaaaatttcgtacccatcaaaaccaatttctggtgggtagaaagcacttggtgtgaaaattgaagcttgttggaaacgaacgcagaagatatgtatagagagggatagatagtggtagcaaggaatagtagagaaaatgggcttagaaagagggaaaggatggcaaagaaagcagagttagcaagatagtagggtgagagaaagattggattgagaatcgacagtaaagcagagagagtgacagttgaaaaagttggcaaaatgaaggaaaaggaccgcagagaaagcagagtttgcaaaatagtagggagagagagagagagaaagtgtaaagagccagagagagggagagtaaagaagcagagaaagggtgggttagcaacttgacggcactgccgaagagcctttttctcctaccgcccccgcctattagtcagctatgtcttctgccactcatcaaatttcttcattttgctatcgacccggcaaattcctatcctttttctatttccgaaagcattacatacatacatatatgaatacgaatttaccgtattatctctaattatcccccgtctccattaatccacccggggggataaatggaattttaatttttttgaaaaaatcatttcttttaaaatttaataaaaattaattaattcaaaatcgaaactcatttaaatgtttaataaacatgaaaaaataatacagaaaaattacttacttcac

SEQ ID NO: 12273 - DNA, 1603 bp, Heterodera glycines
tcttaagatttgccaaaattttcaataaagacatcccctatcaattgtggcagaaaaatttttgaaatacgcgcctaataaataaaaaaatttcctcctaaaattattaaacttttcattattttctaaaagtctaagaaatcatgcaattgttttttttgataaaattttttttgtccaaaatgctaaacttttatcctttctgcttatccagcccgtggcacatgcgctgcattgagcacattttgcaattgggaattcaatttgattgtttcgctcacttttcttcaattaagccaggcagttaccagattcggtattctcttctatttgctgttttaataattattattaattagtctttttaattggtttgaattacaggcacattctttatctatgcgggtgttactgctgttgcatttgctatattttattttgtggttcccgaaacaaaaggattaaatctcgatgaagtgaatttctatttaatttttctttaaaaacttttttttaagatcattttataatttcttatatgtagggctaggaatttaagtcaaatgacttttttttgctgatttataaatggccttagaatgacttaaaaagggttttctacgctttgtttgaaacttctaacgtgcatttttatttgacttttttttactttagggtttttatgaaaaatttgaatttttgcaaaaaaaaaatgccgaaaaataaaggtttgatgcaattgaaagccggcaaaaaccttctataattgttgagaaaaccccgagaattgcgctactttgtccgattctttgaggcaaaaatgttactctgttgaagtctcccccaatcatttcctcttttacaatgagttttactatgacaaatttggaaaagtacctttttttcaattgatactaaaattaatcgcttttgtaaaatgctattctgtaaagtgttaaaaatggtattcttttccctttttttacgattttttatgacttttttgaagactttttggcggtatttttgtgacttaaattcccagccctactcatatgctgttttaggttcaacttttgttcatgactaaaagagaacggaaaagggcagtgaccagcctaaagatgaagcaactctccggcttggacttgtcaacagttactcgatgatggatgtcaagtaaacaaaattgatcaatttgatcccaaactaaatttgaccgacataataaacaagtgaacataaatcagtgatcaaaaaaccatttatttatatatttttgtttttatggtatttaaatgatataaatacttcaaagccacccatacaattggaaaaggaatatgcatcaagtttgaatttgatctcgccagagattcgacaaccagcgtttttatataatcaaaacaatgtgtgcgactatagcctacccttaattaaatattaatggatcctcaattagcatttgttaagagcattcgaaaattttctaatccctatgcgtttccgcaggcgatcttttaaataaattcgcagatgaattttttatacgttttattttaatttttaaattattttcgcctagaaaattcacttttccaac

SEQ ID NO: 12274 - DNA, 3383 bp, Heterodera glycines
  unsure (1)..(3383): unsure at all n locations
gcaaaatctgagatttaaagatgctaaaaagaagacaatcagtntaatccctgcctcattacgggtaaaaaattttatcnttaagccagaatttatttatttttattaaataaaaaaaagattaaattgaaaataactatgcccacgcacaacacattttatttgtcatattttaatgaaaattttagctttatgttttttaattgtattcccatgtaaaatatttagcccctttgaaaggccgaggcagggcacagaaagaaatagtggaagaaattaaaaataattaaattttagtccaactaacttttttgccatgaccaaaacagtgacagtccaacaaacaaataacaaatgattgacatcccattaatgaccagaccatttctcaggagcattgtggtcatgccaaaactgaacatgtcagaatttgtgcataaaactggcctaaaattaaatatttaaaaaacgaatgaaattttaaattttcaaaaatgagctttatttaccagtcggggtatacaaaaagtggccattttgcagctttctgaagtccaaagatttatttatagatttatatttttaaaacaattattttagtgaaatattctatgattaaattcgtaaaattccactaaaataatctctaaatatcggcagggtttttctcgtacattaccttaatgggagaaggacagaaatcagtcgatcaacgccaacaaagaaaacgatccaaccggaggagaacaggccaaagtttggcaaaaactggaggaaaaagcagccaaaattgctgatcatgttctggccaaccaacgaaagggcaaaagggaccgaaaatgagagcaaaaagagaaagtcaacggctgagccgatggccaaaagagtggcacaagtgccgcgcagatttctaaaatagtaaaataaacacaatatttccataatttagtgccacaaccttataattaagccaccccccccccctcgaggcagtttaaatagatacaatggggcgctaaaaattaaaatgagacaaaaaaaaaattttaattcgtccgccaattttattagacggatattagaagattcgaaaaaagtttctattttattttctattatatttacgtatatataatcataggccgttaaataaattaatttatttattacttttcgcttatgattgtgtacaaaagtgcagaattgaacactaagccgggaagcgtaatgagccaacggcaggaatttgacaaaaccaattccattgaaaaggtgtcaacaccgaaacgattgaatgccttaaataccaaaaatatataatattaaattgaaaaaataaaaattattttaaaatgaaaattatgaaacaattgtcctcaccaaattaaccatggagtagttttgaaaagccattttaaagggagtttattctaaaaagaaaattaatttttttaaatttgtttttatgaaatttcttttattatttgctttagaatgtcactttcatttgattgacccttttcattattatcgttgtttcggagaagcaaaatttaaaaatgcatttttcacgctaatttttttcataggataatgtgattttatatattattgtaagcgaaattataaacgcatttttcacgttaataattttgatcgtagtaaaatataaatttatttgaaagaaatattacttttttatataaaatattcatcaaattatctaatatgaaaaaaatttaatgaaaagcatagttttcattgttagtggaccatttattttcatgaaaatgatttacgtctttgaaagcggaagctttattacgtttataaattagctgaaggtgcctttaatttttccgtggctgataaccaacaggttcacaaagaacgcaacctaattagtgggcatttgttaaactaattttgcaaattagatttgagcataacagtgacatcaaagattttaacaaactaattaaataaaaatatgtaacaaatgatttaaattactcaatcagaataattgtttttgtctaaataaagtcaataaagttaaaatttttaggatagataacattaaattttctatgtaactttaaaaaaaattgaaataagttttttatttttcatttaaaaaagaaataaataacacataagacgaatagcaggaaaatttccatcaaatgcttatttttaatggctttagaatgctctaaattcccttgatacaaaatcgcttttttgaaatgccaaaaaaatttattttttatttattctaaacaatttttagaatttttattacaataaatgaatcagatactttcattggcgaagggcaaaaaaatgtgcatagtccaattatcggatcagcttcctcttgtcgtctttttgagcacaattgtgaatccgttgccgactttgtcgtcaatgtcccgccattcggccactgtccaattaaaatgtcggcaaagttccagcaaatcttccgtaatccaaaaagacacatgggcatgggccgcatttgcattgccattcgttggccgactgtgccgttcgagcagttcggacaaagcggttcgatttcggccctgatcaaaagtctggaaaacggttaaaacagaatgctggattaaaactaattttgaagctgaaaaattttgctagtaattaaattttaataattaaaaggaaaatatgaaaagttaaattaatttaatttttttaattaaatttgtcatttgcccaaattttttgtcgggaaacgggaacgggattcgtgggttttcccgcgggaattctgttcccgccagggccctacttatcagtggacttggagatgcagaaaatagcctttccaaaactaaaggccaattcccaagcacaagaataatagccgttctcaaaaaaaaaaaactaaaaattaaaattaattacccgctctttgtgtgggatgtccatatagacgaagccacctttataagaataattacttgaagttggttataaaacaattttgacctggctttacaactcgtaaccattccttaattgctttgattgggtcaaaaatgtgttccaacagatgcgcgctgatcacaaaatcgacagaatcatttgcaaatggtaatttgtcacccggggctattatgtgaacttttgcaggatttccttaaaataattgtcatacataaatgttttttactaattaaaatttctatggggttgaattgatgaacaaatattgtccggtcataactgttttgtttttcttaactattttatttgccataaatataatattttctttaaaataaataaaattaaaaatatcaggcggaaaagatacttttgaaaaataactaaaaaatcacttctaatcc

SEQ ID NO: 12275 - DNA, 1437 bp, Heterodera glycines
tactttcatatactaataaaacacaatgagaaaattggaataaataaagaaatgagtaaatgtattgtattatttattgcttaaattaaattgaggaacaaaaataaaaatacaaataaaaaaaaattaaaatttgaacgggtgatttaatgataagagaatattaacaatctgtttgagaaagtgttttgattgacagaaacagccgaaggatcatttaccttgagtggattgaatgtgtccactcaattcgatccaatcgaattttatttgaataagcgcccaatacccatgaataaaatcattttaaaacatttgcggattcaaaagggtggcggacattgcgcaaacaaaaattattggtcaataaaatatttgatttggtgggaagagaacgaaaatgagcaatttgttggtagttaattactaaaacagcgaaaaaaagtaaaattaacttattagctaatcattcattaattaataataatgaaaagaagcgatattcgcttagacaaaacacaaattaaatgctaacgaaaaagccaaccaaaagcaaaaaaaggcattccattgaatgagaggtaattaaaggaacaaccggctggggagaagcaggaaaagtggtgtaagaagaagagaagggctaataacacagaaaaaatgtaataaaataagaaagataatttataaggacagggaaaaggagaagcgaatcgaaagacaacgaaagaaaagagaacagaagggatcagcagaagaagaaaaggagcagagaatgggaattgtaaaatgatcaaatatccttcaaaagtaaactggcaaaaatactaaccaaccattcatttttgacctttacgtacggaaattaaggacactatggtcaaaataagatttaggggatctaaaaaaacgcaattatgaatttttgaaaataaaattttcgacttcaaataaataaaaattcctatttttcgtgcgatgactatttactgttgaactataatatattagaattaattttatttaaaaatcactaaaatatttaatttctgaccaaaatatgtcaataaagaaagagagaaaattaaatcttcaattaccctcaaagtgcttattaatgacagaacaacaattgattcggagcctttgggttatacgatttgaaaaaaaaaactaaaattcaaattttgtataaaaatcattcgctcggggggaaaaacgcattgaattgagcacaaggacatcatcaaatctaagggggggggggggaagaatgaatgaattggcgaatgattcgtttgattggcgcatgagaaaatcaattagcgaagaaaaagcataaaatgtataaaaagggagaagaaaatagcgaaaagggcgacagggacagaagaaaataagcgaaatcgaattgagattaaaagataaaattttaca

SEQ ID NO: 12276 - DNA, 1583 bp, Heterodera glycines
ctgtcgaaatcacttggcaccgtggcaactgcgtctgtgtaactttaagaagccaccataacttttttttcattaatggttaaatcaaacaaacttggtatcattcgctcctgagggaaatgcaaattcgatcaaatcagcagggcgatagagaaatgtacaaatgtttaatttaaatatttccttttattttgatgtacaataacataaaagtaactttttgttttgctgtttttttctgtgcttttctaatgcttttgctgatccttcagttcgcttttgtgccatccgcgggactttcctccgactgcggcacagaacagtcccacaaccgataagtttttcattgcattttttacgagtgaacaaataaaattcaaattcaaataaatatttttaatctgttacactttttcagtgatggtaaattttcattcattcattcttttatttatttatttttgaagacgctcaatatgaaattagcttaatttaactttcacttggcaccttttgtttgatttgtgtaaaaaatgaaatcaaaatgaattggccgaatgttttgctgaggggggggggggaattggtcacacatttcgacacttttctaagtggccaccaaaggcaatgaatgccttcccccccccccccccccaaaaaaaaaaattcattcatccgatcactcattcattcgattcattcgtcagtccgtccctccctatcccaccattgtttgagttatgatgaggagagtgtggttttgcaacacaatgaattggggggggggggagaaggggtgcaaaggcaaattcattttcattcattccgccggagggcaaaagtttctgtgacaaatgaaagcgtcaacagtcagcaaaaggggcgaggagcaaattcttcacccccgcccactttcatccatctttttgtgggccgtccgtcttcgacacattttagctgcccacccttaagcaatgtttggcgaccgatccctccccccgcccatcgaaacgtcgttttattgcctctaccgccccgcctaaacacagtaacggaaagtgcgcagtggtcagaattggcggcaatcaatcacaaagtccgtcagctaattccgcgccgggaagactccgcgtgcccttagggcaaatggcgtaacgacagaggagaacagaagcgaacaaacagccctttcaactgattgagctgtaaggcttttgcttttttgggcgaaaagggcgagaggggcgggggagggaaaattggggtggcgaggaatggggaaggaatgggggaaagggggggggggaggaaggcgatcaccgcggtccgtccacccagtgcagttggacgatgctgaaacgatgaaaagcacagagttgcccctccccacctcatttgcatgcaattacggattacgagattcataagtacggcgtttctggacccctcgcaattaattttttcgatttttccgtaattttgatcaataagatgaattctggaagtatttctagatgaatccacaagtgcgtaatattttaataatattagaaattaaaattaaaagataataataatttact

SEQ ID NO: 12277 - DNA, 926 bp, Heterodera glycines
  unsure (1)..(926): unsure at all n locations
cccccccccccccccccccgctggcgatgtaatacgaccccaactctctccccttctccccttttcccttttctccctcccttccgctctctctctcggcttaacaaaagaacatctcggctaatattcaatgcttttttattctaatggaagcgtagcagtaattaattaattcactttcattctggccaccaattgggttcgccaatcgttttggttttttaagtcggctccttttttcgcccttttttattgattttgttgagtttttcagttaattataataattaattttggttgtataaatgcataaacttcaaaaatttatttaaaacaaataaatgccaatcctaaatgtcgccccatcattgtcctcccccnccccccccattttcccctatttttcccccttcggtgtcccgttacattttgcatatcctttttccctcttcgtcttttgcttcgtttcgcccatccaattttcaattcacgcgcttattgctatggaaataaataacactgatgtctcccccgaggaccgatttaggaaaagcgaaacgattgatggtcaatggagggggggggggggaatctccggccgacggaataattcaaatttcaaatccgaatcgattgggtggtttaataataaaaacttttaaaaaagatttaaaaaaccaaatatttaaaaacttacacttctcaattgtacgattaaatacgcttttgcccattggcccttttaatgaggcgacttggcccaattttgggctcgtatttgaatgattcgagaaagtaaacaaaaagtcgcgagaagtgactgacaaataaagcctccatccctcataaagtgcaccaatttattgcctttttcatttttatttactttttttattcattttaataattcgttttgattttaaatt

SEQ ID NO: 12278 - DNA, 3587 bp, Heterodera glycines
gaaaatttacaatttttggcgaaaattaataaatttttgtttttttctcttttttgatggatgaatttttttctggaataacatttttcaataaatcgtttttgaaaaaatggtttagtataaataatatatgttcaaataaaaaataatctgtgatctatttatttttacgtatatgttttcaaattaaaaattttaattttttaaaacaatttactaattttcaattttaaaaattgtacttttacgccaattttattacacaaattattgcaaaaataaaagtccgaaaattttatttttatttgttttcgtgctgcgcattttattgtcaataacaacattttactacaacatacaatacaatgtttgaatgatgtgaatgaatgcaaaaatcatttaatggagacttatcaaactcatgaattttcgtagaaaattcctcaaaatttggccaccattttttttatcaaatttttactttccccacctcgtgagctttagggaacagcagattgaagtgataaaaatttaattttggtcaaattggactttacatgctcatcaaattttttatttgtcacttaattaatggcttaattttattttttaattcttttctctttagttttacataatttgatgtaaataaatgtttatttattctttttaaataattaaataaaaaagaatgtttttttttgttcaaaaaatggccaaaaatttttgtccttcaaaaatcgtaccattttgttttgttttttattctttacgcagcattttcctggtgataacaacaattaggaatgttaattccaggaaatttcacaataattatattttatcacataaaattaatttcattggccttcatttagaaattcattgaaaaaaaaattttgtataaaaaatatttgtaaaaaattaggcaccaaacattttgccaatcaaaatttaatgcctttttaggcatcggaatgcctttttcatatttatataaataaggcgattaattggcgggtttattcacattgcaatgaatgaaaatgataagaaatcaaaaatcataatagctttaacaaatacattttattgctttattccatataaataacttgtgcatttttcgcatttttcatcaaattaaaatgaatttttaatcatttaaatttaaatttctaattaaataactttgagctcaacgccaaattaaatgattccaaaatgtccatccacaccttcttcaatttcaacgtcacagaatgggcacgcatttcaaaataaagtaattattaaattaaattaatttaccgtattccttaaaatagtgcgagccctcgggggatttatttcagggagagagggaggctctaatttaaggagtgaggggggcttattttttttcaatccccctcaacaacaagggaggggggggggctttattttaagggggggggggctctaattattagggagggggctctattttgcaacccccttcaaaaggggggctttatttcagaagggctttaatttagggggggggctgtattttaggaaatacggaaatttataattttatttttgcaggatggccgactcaccggcattttggcattttctgtttttatggcggctttcggcagttcattccaaatgggctatcacattggctgcatcaatattccaggctcggattttattgcattttatgatgcattgacaaattaagaccattttgaaatttttgtttttgtttttttttaacattgtccggaaatatttaatcaaaattttatttttttttaaattttagtgaaaaaccgggaatttttcacccatttctacaatattttttaaattttccagccgacttaatcaaagaatggttcactgaatcgtacaagcacatgaaaggggttccgatatcagtggaagagatggaatcgacatggtgaaatttttattatttatttaatattttccagaaaattatttggcgctaaaatttctgtttgggggttttccacttgaaattttttgattatttaaatattttttatttccaactctattatatatatttttttgaattttaaattttttttaaccaattttttttcgaatttctgaatagggtatatcaattgcccagggcatttgccgtcggcatttttgccgttggcggaatgtttgtggcataaattttttaatgaactgtactaattctttgaaaaattatcattattattcaataaattcatttcattaatttattaattaattgcccagggcatttgcggtcggcatttttgccattggcggaatgtttggtggcattatggttggcactgttgcggacagattagggcgccgtaaatcacttctgtacaacaatatattggcgataattgctgcggcactgatgacactggcaaaatatatgaatgtttattatttgatcatcattggacgattcattattggactgaatgttggtaagtcaagcgaatattaattaattttttaataatttaaaaactgaaatttaaaacaatattaaatgaatttttatgaaatttttgtccaattttttgtccgcttttggtcatacataatacgcttaaacataatttaaaaaacaatcttaatataaataattgatagctcttgatttgctatactagcatgaaaaatttcaggaaatttcattcatttttcagaaagtcgaaaccaaaaatgttgataaaattgacataactttttgaaaaattgaataaaattttatgaaattttcaggttagtagagcaaacgaaaagctatcatatgataccaaaattatttaagaaaagttatgagaactttttcgcaaaatctgtaaaaattggcacttttacaaaatgccacgtgtgcctaaatttttaaaattaactctccaaaaaataaataaaagactgaacaaatgcatgcttttacttcgattctgtatttgtattaatttgtttcaatcggatctaacttttttaaatttagattttaattataattaaatcattaaatttcgttttaaaatttgaagggctcaacagcggactgtccccaatgtatttgattgaaatttcaccaaacaatttgcgtggctccatcggctcgcttcatcaactgtttattacaatttcaattctggcttcacaaattattgggcttccccaaatttttggcaccacaaatcggtggccactgatttttgcatttactctggtaaatgtttcaaaaaactttgaattttatttaattaaagtttacggattacagcggatccgtctgttcaatcctgggttcagataatatcaattttgccatattttttgggattatgtgccatcttttttgtaattaaaaaatccgtaaacttgattagaatattttgttaagaaaccattaatgggaaaatggtgtgccaaaatgtgatcactttaaaaaaaataattgatttaaattgatcaatttgaaaaagtggaattcgggcaaataattaataaatctaaaaaaaaaataattaaaattacataaattttattatatt

SEQ ID NO: 12279 - DNA, 4670 bp, Heterodera glycines
  unsure (1)..(4670): unsure at all n locations
atgataagtgaaaggaaaattggctgaaaaattaagtctctacagaaagaatttaagaagatggaggaaaaaattcggcaccaaatcgaacaattaggtttcgatcatttatcaattcggaggctcaatattttaacttttttttctgttactttattttgctgagaaattcaaaataatgtttcactattaaaaataagtactattttgattcagaaatatttctgtaattttatgtattttttaaattttttcagaaaaattcataacaaacgaaattcacccctatggattgccgccttcagacaattttcaaaaattataaggctaagaaaaaattataattagctttgtgactatttatactcaggtgcaaaagcacggaatcatgtaaatgaaagcaaaaaacgaattttatttttcttgtttaattggcatttatgttttaaaaaagatagggctttagcatgctaattactagggataggacgaacatttatatttcaatattttgggggttttgtcaatgttttgtaaatatttggcatttttcggatttttcatgtgaaattcagaaattctaacaaaaatgcaattaaaaattattatttttttgacacacaatatataagctttgaaactgtaaagaaaactgaaaatggttttacattcacttaatttgctgatttagaacaagaaaaacccagtgagtttttttgtgtatttttaaaaatatttttcaaaaaaaaattcactacaaacggaaatcacccctatggatcgacctgaaaaagaatgttaatgatttttatgttttttatgtaaaaagggctaattattgttttttaatttaattagtgaatctatatttgtgtcccgattgctctggtcgggtgcacaagtcagccggtggcactgtggttggggcaggcagggacgagaccaaatatacacaaagaattacaataattaaaaaataattccggggaggacctctaatttgggtaattaaaccgaacaaattaaaattacaaaatgagaaatgaaaaaaatgcaaaaatgggcccatcaccggggaaaatatcacagaattgggaaaagcacagcatagagggacagaaccaggagaaaatggaccagaaatatcacataaaatgggcacgcaatttaccgggaccggggcaattttcacaaaagaaatggaaaatgaagggccgatcacagatcactgatcacatttgggggaagggatcggggcaagagagctcccagaaattggggaaatacatttgatcggatgggaacaggggcggagtaataacggtggacgaaacaaagaacccgagcctcggtatcgctatacttccttttcttttggggagcggtttcgtccatgaaacaaggcgccagccagcatcaatcaccttctgatcacatattgtcaatgaagcaccaaatagtgggatgagtacaattcattgccgcagttgtcgattcgatcggcattgtccaagatgcgctgatgaacattctattcgttagggtcgatgtgaggcaacgtcagtgcattattgaaactattgagccacggtctttctcatatatttttttttataagcatttttaaagaactatttatttacaatagacacataaaattactcacttattgtctcggagtggaagcatgtgaatggggtcaaatcaaaagaattacaaaaccctaacaaaaactatgtttcaacactaaaacgaaaactcgactttttgcatgactaaatagcgcgtattcgattgaatcttgcaatgacgtctgtcgggtggcaaatgtgtttgaagatgtttcaatttccttgaacatatttttttttacaaaagcatccaatatttttctattgttatatgtaggctcatcatattttgacgaataatttgattaaattcattgaatttatattattttgtactatggaaaaataaatatttttgccttttacctttataaaaaaattttactttgccaaattcataataattttcttggctttattgtcactttatttatcattatcggagaaataaatgccaaaaatgaagaaattattgataataaagtaaatttgaaaaacaaaatgttaagaaaactttgataaagtatgaagatagtaatttttatgtttatacaaaaatgtaaagtcgtttaagtgcgaaaattgttcataccttcttaatatcaacagatagcaagcatgccaatttaagatgctagacgaggaattcggcaccaaaccgattcattagcattgttccaaaataattaaccttgttacagtagggtcaaccttcacgatttaaagaaaagcctagaaaatctacaatatttgtttttttaaatttatctcactttggcgtactatctttcgctttttttaagcgatcctcctcaaggatcgccatcattacctccggggattttaacaaattccctcgaattaaaacgccgttcttaaaggatgactttagactcggcatatttatgtaaagcctcttctgcggattcacactaaagtagagtgttatcgacaaattattatcgggcctctatacaaccaggcaagagactgtttgtccctctggtgtgagcactcgcgtcgtaaatgacgcgtatgcacaacttgtgcttgctggcctggttcggttgaaggattgcttccccagattcgaaagttctaaagccccttcaattgtgtcggcagccctcgggatttgtcgccccagtgcataaaagttctcactttccggcttaaattcccagtagttttctctcttcatcttggagagcctgtcctgttaccctctggaaaatggcttgccatttttctggaaaatgtctaggcatcaccattgatgcaatggaatgcgtaagagcttactcattgctcttacgctttaggaaaatgcaatatatcccttagggttgcgttttatccaagcgctacggccccgcttttttttttgttgtattatccaattaaatttccgtatcgtcatctaaaatttcggcaatcggagttttgactgccaaaaaaaattcggcaataagaaataagaacacaaaaatgtctgtaattggcataccgatacatccctatttaattcattgacaatatatttaattttttagaattctaaaaattaattttttcatatttacaaacatggaaagagaaattatatttcgtctttttaaatcaattatttcatcataaaagcaagacaatcgaaattcatttctaatttatacttaaaaaatatatttttttataaattttactttaaaaaaataatatcctaagctgaaatcaaaattatcattttatgatttattactaaaaaatgctaaaaattaattttataataattttcttcttatttctattcgtaataattgatggaactgatgaagatttaattgatgatttatggaaaaacctaaaatcaccgaccccaaaaaacttcaaaaatcaaaaattcggagaaaataataccataaagcaagaaattgttgaaaaaaacgatgaacaagaaaatgccaataaaatcgaaatggaagacataaagccaataaaaataaaagaacccaaaattgaattaggacaattgaacgaagaatcatttggaaatcaatttgatcagcaggctgatcagaatgtttcgtttgcggatctgagcaattctgcaaatgataaggattacaataatatggtaatataacagataaaacagcattattcctgaaaaaaatattttacaaatacactaaattcttagattttttttcttaaaagtgaattatttctttagaatacagaagaaataaatgaaatggaaattttaaataaatttaatttgatgaaaaaggaattgcgaaaagaaaatgcttataaaaatttgacaaatgttcaatttgagtgcgaaattgcgaaaaagttgggcacaaatcgaaacaaaatttatgaaatgaaaaaaaaattaggacaaaaaagagagaagagaacagaggaaaatgaagaaacaaaaaggaaactgatcagaaaatttgatcaattgagaaaagaaaaaatttgtgggtataaatatgacaggttgaaaagaaataaaattgagcacgaaattgccaatgaattgggagttacattcaataaattttaccaatggaagagggaattaggtaagaaaatattaacaaaataaaatttataattattgtatcaatttaaggtataataaagaaatttttatttacaaacgaagaaaaaatagaaaaacttgagcaatttgaaagaataaaagaagaattttcaaaaaaattcaatttcaaacccaatagaaaaattgaatcaaaaatagctgaaaaaattgggattgtgtggaacacaatttataaatggaagagaaaattcggtttaatcactcgtaatattttaattattaaataaaaaataaattaatttgcttttcttttaaggagaaagaaaaatttattccgttaatgaaaaattggaatatgtgaaaaaaagtgaggaaatggctgaaagaaatttaacgatatgtgagaaanaaaattgccgaaactttgggcattccaaatgacaatttaagacgatgga

SEQ ID NO: 12280 - DNA, 2363 bp, Heterodera glycines
ttaggcaaacttatgtttttttacaaaattgttttgactttatttttttaacattttttgaatttttgcatatattttggtattttttgaattttagcgcatatttttacattttttggatttttaacctcatattattatatacatatttatgttattgttttacaaaacagactggctcaacttatggcgaaatgttttcaattgcgctcaaaaggcatggccaactgtgcattggactgtaccgtctgcatgaccaggcttcgttggaatccaataaacgctatgtgagttaagcgagcacaaaattttcagcgatttttggaaaaaattttttttatactatttcctttttgatataatgtcccaacacaaactgatccggggtgggggaaacgagttgctcacacacagcaggaatatcataactgtcaattaaaatcattttaaaaccacttttatcatgtagagcatggtcgatttaatattgccaactttgggctttttttgctccggcgccaaaaatgatcagaaaaaatcgatcaaaatttcgaaaaaagggttattttttaaattcataaaaaatttccagactcatgctggagccctaagctttttttaaaagttcagcgaaatttctttacaaaataatatgataaaatcaaataaaataactaagtcaagtagactcacgagtaggatcattacaaattttgttttctttctagttgagtaaatttttgcaggtgatcaccaatccgccagcggagcttcgcctactaagcagtgacaatgtcggcaattattcaatttatcgcaaaaaaaaaatcataccaaccaaatcagaccgacatttccatatatatatggtattatatattcaggtgtatgtgctggagcagttcgactttggctactcaaaattcgacacatttggcagtgaagcggggggcgctgggggtggcacaagcattggctccgatcgtttgttcgcgtaattgtcgaacaaagtggtagaatgcatttgggatatatgtgcttttcccagtcagttccctgactctatggaatttcccgctcttttcgtatcgcgcgttctcggtttcccgtacatctctcgaattcatccgggctgttagtgatctgaaaattttcaacactcgagaaccgggatcgagaattgactcacaaggagtcgagactgaaagcagaaaaccctgggaatttttgactcaagaaccgagactctcggacatcccatagcatttcaccacatttcgattgttttgttactgtttacttttggcgtgcctgtttcattttttttgattgattgatcaattgattgatgttgggctcaaccaaaccgcgaatttatgttttaaattaatattcagttatgcaaaaaaatttcttttttaaatttcacacattttaagcaacaaaatttgttcttacctgattttaaaactcatgtcgaacttttagctctacacatcttcggcgtcttagttttttagcaaaaaaatttgatagttaatatttattgagatttaggcccattaaaatgagtaattttaaagggtttttttagtcaatttttgaattttccgaccggcaatagcaatcggtatgccgggaaaaaaattgcaaatctataaattaattcctgaaaaatgctgactccgactcaatgttatttcgatatttttctataacatataaattgttgaatttgtttttcaaaatagtttctgtgttgtgctatatgtaccaaaaaataaactatctattttatttattttctgtgaaatctgattctcaatttgcaaaaaaaaaaataatatataaattttttagaggaaattattttttgtggtgtcaaattacacaatatgtaaatgcatattttaactgggtaaaatcagggttcccaggttaaaattttcaaaagcctcatttggcatgcaaaaaagcctcattttgggtctaaaagcctcatttttataaattttttcaaaacacgtttaaaatgttcagatgttatatgtattttcaatttattgttagaaataagcattttgtgaaattctaagcatgaaaaaccaaagttgattttttgcggcgctttttccaaaaaaacttttggggaacaaggggggctggcggtaccgataggcgccgccaggtaaaaattttgtaattttaatacgatttgttaaccgatttgtcagggctcgcagatgggtctaaaagcctcatttttacaaatttattcaaaacacgtttaaaatgttcaaatgttatattttttattgtcaatgataaatttgagcaattttttggttagaaattagcatttt

SEQ ID NO: 12281 - DNA, 873 bp, Heterodera glycines
aatagcaatcggtatgccgggaaaaaaattgcaaatctataaattaattcctgaaaaatgctgactccgactcaatgttatttcgatatttttctataacatataaattgttgaatttgtttttcaaaatagtttctgtgttgtgctatgtaccaaaaaataaactatctattttatttattttctgtgaaatctgattctcaatttgcaaaaaaaaataatatataaattttttagaggaaattattttttgtggtgtcaaattacacaatatgtaaatgcatattttaactgggtaaaatcagggtttccaggttaaaattttcaaaagcctcatttggcatgcaaaaaagcctcattttgggtctaaaagcctcatttttataaattttttcaaaacacgtttaaaatgttcagatgttatatgtattttcaatttattgttagaaataagcattttgtgaaattcttgaaaaaccaaagttgattttttgcggcgctttttccaaaaaaacttttggggaacaaggggggctggcggtaccgataggcgccgccaggtaaaaattttgtaattttaatacgatttgttaaccgatttgtcagggctcgcagaatgggtctaaaagcctcatttttacaaatttattcaaaacacgtttaaaatgttcaaatgttatattttttattgtccatgataaatttgagcaattttttggttagaaattagcattttgtgaaattctgagcatgaaaaaccgaaattgatttttttttttgcgacgtttttcaaaaaacttttggggaatagggtggggggtccggctaccaaagaggcgccgccggggaaattttttgtaatttttaatgcga

SEQ ID NO: 12282 - DNA, 965 bp, Heterodera glycines
tttttgggtatttgtatataaattgtaaaacacaaactaaaaatgtgcatttccgctatttgcattaaaattgtaaaacacaatctaaaagtgggtatttttcagtatttgtattacaattgtaagaaactaaaaatgtgtatttttcggtatttgtattacaattgtaaaacacaaactaaaaatatgcattttcaggtatttgcattaaaattgtaaaacacaaactaaaattgtgcatttttcagtatttgtattacaattgtaagaaactaaaaatgtgcatttttcagtatttgtattacaattgtaagaaactaaaaatatgcattttcaggtatttgcattaaaattgtaaaacacaaactaaaattgtgtatttttcagtatttgtattacaattgtaagaaactaaaaatgtgtattttccggtatttgcattaaaattgtaaaacacaaactaaaagtgggtatttttcagtatttgtattacaattgtaagaaactaaaaatgtgtatttttcggtatttgtattacaattgtaagaaactaaaaatgtgtatttttcggtatttgtattataattgtaaaacacaaactaaaaatgtgcattttccgctatttgcattaaaattgtaaaacacaaactaaaagtgggtatttttcagtatttgtattacaattgtaagaaactaaaaatgtgtatttttcggtatttgtattacaattgtaaaacacaaactaaaaatatgcattttcaggtatttgcattaaaattgtaaaacacaaactaaaattgtgcatttttcagtatttgtattacaattgtaagaaactaaaaatgtgcatttttcagtatttgtattacaattgtaagaaactaaaaatatgcattttcaggtatttgcattaaaattgtaaaacaagactaaaattgtgcatttttcagtatttgtattacaat

SEQ ID NO: 12283 - DNA, 1664 bp, Heterodera glycines
  unsure (1)..(1664): unsure at all n locations
caaggggtggcaatgcgctgcagcggcagccaaacatttcccggaatattgtgactccgggaaactcggtgacaaaaaatgcgccgattgcggtgcacatctcttctcacatgaagacagtagcatttgctgccggaagggaagagttgtgctgccaatgcttaacccgcatcctgatgagctcaaacagctgattgtggggaataagcaatcccgtgaagggaaagaatttgtgcgacacatgtcgcgttataacaacctgttccaatttgcgagcgtttctgctggcaacaaaccaagccctgctggcggtccgatggccgttattcttaacggagaattccatcgccgcataagcagcatgcaggctggtacaactcagattcctggctttggccagttgtacattctggacccagtcgaggctatggaacagcgtcgaaacaaccccaggtttactggggaaaaaatcacaaacgaagatgagtttgtgcagggtcaccagctaaatgagcagactcttgagatcttagaacaaatgatccaagtgcatcatcctgctgcgcaggcatataagcaggcgcgtgagcagctcactgagcttctccaacaacaaaatcaggaagagcttcgtttcttccgcatgactttgttggatagccgcagggctccagctggtcttaaagacccaaaattgcacccacaccaaataatcaccccatctacgggtgaagggatgttcgctattcatgcggaccccactggtgctcctccgcccaaaggaatttgggtagagaacaaacaagggcaattaaatgaaattgctcctttcagtccgtggactgatagtcttacgtatccattaatcaagccaatgggcgatgatggatacacaactggcattaaatatgctaagccaccatcgcgtaagcgaaaaggtgctcagaatgcatctggcctatttgactcggaagccgagtcagataatgagtcgtgcgagactcagtcaattgcatcatctgatgcggggtcagtcgcagattcagatgctgaatctgtagcatctgtttcatcgcagcaccggcggattgacaaatccaaacaatttatctccctgcgagattattgcaagtattatctcgcaataagggatgaaaatgtggagttgcaataccaccacattctttcatgtggtggaggacttggtcagcgctggatccttgaccaggctgcaaaaattgattggcaaatagcaacatttttgcgtagacctgacatggatctgcggatcagcactccaaaaaatctgctgcagtatttggtcaaccaatacaacaggcagcaagcacggcaaaaccccaatgcccaacagaaaactgttgatgacattggcagtgttgttcggctttccgaacacaacgtaaattctctccaatattggaagaaaatgtatgaggattgcaacaccgtttttgcacggtgtcatgacgcgaaaaaggcgcgtctcttcatcacattcacgaacaacagggaatggcctgagttcaaagagaatatatataaaaacggtcaagtatttactgaccgtnttgacatgtggatgcgtgtctggagcagcaaaatcgctgagntccgagaangactttatgacnaaaaagtcttcg

SEQ ID NO: 12284 - DNA, 2402 bp, Heterodera glycines
tataaattttatttcacatttttatctctcttttgcgaattgttataaaaataaaagtgattttgtgcttcgggtccaaaggggggtgaccaggatttttgagtggaaaaatttttctcacaaaaatcttccaaaaatatgtctttaggggttatttgggccgctgatcacgaatacgtgatcagattttacttttgacatcgtcaagacctcggaatccctgtgtgattggggattctgggacatgttctgagggggggggggcaggttcgaatccggacggtgtaacattatttttctatttatttttgagttatttttcaatgcttttaattaatttgaagattggttgtaaattttaaatttttttttaataaataatttcattattattttttatctgtaaaaaataatatcatttcaaatttcttaaatattcaatgcattcaatttttattctttaataaaaaacttttccttatttatataattttaaaccatgttgaacctcttctatcactgttgtacctcttttatcactgttgtacctcttttatcactgttgtacctcttctaatcactgatgtacctcttttaatcactgttgtacctcttctaatcacttttgcacctcttctatcattgttgtacctcttctgatcactgttgtacctcttttaatcactgttgtacctcttctaatcaccgttgtacctcttctaatcactgttgtacctcttctgataactgttgtacctcttctgatcactgttgtacctcttctgatcactgttgtacctctttaatcactgttgtacctcttttaatgacttttgtacctcttttaatcactgttgtacctcttttaatgacttttgtacgtcttttaatcactgctgcacctcttctgatcacaattgtacctctttaatcactggttgtaccctttttatcacagttgtacctcttctgatcactattgaacctcttctcacttcacattctaatcaccgttgtacctcttataatctctgtaaggccaacaaaatttgaaaagcgggcgcgaagcgcccgtcttgagcctcgatgtggactaaaaacccctaataattttttaaaaattagaaacgggcgcgaaacgcccgtcttgagcctcgatgtggactaaaaactcctaataattttttaaaaattcaaaaaaacctctccaaccaattcgatcaatttgaatcgcttcacagtctaggtagcgaagctccgaaagcgcgaagcgctttttcccataagcgcttcgcgcaaaggacttcgtttataaatattagataaacatttgaacaaaacttggcacaaaatgtaaaaaaaataggtttgagcaaatcccgataatcccgcgggatcccgaaaaaaaatcttcgggattgatcgggattcggtcgggatcccgacccgggatccctcccgatcgtttttccaaaatgttcgggattgatcgggatcgggattcagtcgggatcccgactcgggatccctccgaccccagttgtccggtctctagtgaaaagtgatttggttgtcaattcaaaataaaaattcttttaaattaatttagtaaattatgaatttattcaaatatttgattgactccttaatatttttgttaaaatataaattttttaatataatttttatttcttacaatgcgctaattattttttataaattcaaaaattttgtcaatttttgttttttgaaaaaacattaaaattacccatatttttatcattatttttgttttatttatttttctttggtattatatgtgaattagtttaaattcctattattattgataataggtcgatccttttatcgcttttgcagggaacttcaaatcattatttgattgtttttattataacaaattaattattattctttttattttcgatttctatatgttaatttttcaaattattttcaaatatattcaaatttatactttatttatctatgaattactaataatcaatattcgactgtatatgattaattttttatgttaattttcatttggttattctccactagttctgtagcatttgttatatttatatgaaaaagatacaaaacggcattaaaaaagctaaccgcttgagactgtcatcgccatttccagccttttaatttttatgtttttaaaatattattgtattcttcttttatttattaaactcatcgatatccgaaatcttcttgttccaagcttggtgcatcccaaagtttaacatttaattttgaattttagtttgttatttaccctaatcaatgtattatttttccattttttttaaatatccatttccttacctattgaagggctggtttggtgcaaaactattcaa

SEQ ID NO: 12285 - DNA, 1381 bp, Heterodera glycines
  unsure (1)..(1381): unsure at all n locations
aatgcttcaacttgcgctactacgaaagctatgtgaccgggatgtatttggtgggttggccgactcattagcatcatttgatgcgcttattcaggcaacaaaagtgttttatgtgggcaatgtgctgacaaatgtgagaaagggcttattaattgaccaataattagccaattactgacctaataatttattgattggtttatgactaattaataattggttaattgtcagtaattatctgatgaaaagaataattatttgctaatatttttaaaattaattaactgattaatattgactaattatttattaattaattgattatcattgattaattaatttatttcaaattaatccccaattgatttgtctgatcagatgaatgcttcttgtctttagcttttgctggttaataaatttctggagaccaacaattattccatttacgggttgggtgtgctgtacgatttgcttctgctcggcaaatcttggacacaatcaggtggacgaacgcgcaaaaccaacggcggaccaaattcaaacaattttgagcaaaaacgcaatttcagggaattttcctcgcgtcactttgtgcgacttcgaagtgcgcgttttgggcaacattcaaaggcattccgtacaggtgaaaaaagtgaaaagaggaggacattttgaaaaagagagcaaaaagaaattaaaatcgaattgatcaaaacacaaaataagaaataaaactgaaattaaactttaaaaaagtgattaaatgaattagcaaattaacaaataattaaatgttttttgactgtcagtgtgtgctggtgatcaacatcttcaacgagaagatcttcatcctgctttggctttggttctgcgtcctcttcttcatcactctcttcgatgctctttattggtttagcgtttcgctttttcacagagaccgtttccgatttgttctccgccatttggaggtatcaatgccaatttcaatttccaactttgatgaatggcacattaatcagctcacttccgacccggaccggcccgaacttttccggaaggagaagcgcaaacaagtggagcactttctgaggacttacctaaaggtgaacaacggcgcttggtgngtttggtgtttgtggtttttcctcggttggcggtgttttggtgctgcggntgtttgccctccgcgcgggggttntgttctgtcctgtggtccctgctgcgctgtggctgcgcttcttgtcccnccgtccggtgtctctgctcgtcgttgcttcttttcttntcnntttccctcaaggggtttcnctnctcnttnntnttgnctncttnccctcttataggtgattgattgattcctcttcagcacccaatccatccg

SEQ ID NO: 12286 - DNA, 3331 bp, Heterodera glycines
ctgctcattagtattggctaattaccgtcaattaattcctttattgattcctcttcagcacccaatccatccggcgtcggattggctgcagtgcctcctcctcgtcgttggcgcccaatcacaacggaacgtcgggcggaagtgcgggacggaggatcatccaaaggtcaacagaaaaagatggaagcaaagttatcagcaaaatatttattgcagaacagcccatgcccgactttcccgctttctttcctaccgccaatcgcctggctcccccggcggttctccgtcgcccggcacagcggtagcgaccacgggggtcatctaccggacgccacgacactcgggcggagttgagcaggtaattaagaataatcactacctactggcttaaatcgcatttcgccttagggccgtctttcgcgcggctcttcgccgttgccaatgatagggcgatcagtcgctgaatttggtgcagacgcacacagcggacagctgagaagggtcggaggtcggttgccgatcagtagcgacagctccgcagccaacacccaagtgatcgtcactccatcaagcaggtcagccaaaggtatccccctaaagttgctcgagagtctcgagcatagtgaagtgagtaaaattcatttattttttatgtttttgccttaactgattgaaaattaataaaaataaaagttcattaaggccttcttcacgacaggaaaacaaattgaaaatgaatcataagaatcagaaccgaagtgagggggacgacttggaattctgtggccacagaaagggcgagcggcagggcagcatgaccaattcaatcgcttctctgtcaatgtcgcccacagcaaagcgcaaattctcctccaaagccttcggccttaaagtgattaacaattcggattaataaaccaattagggaaatattccgtcgtcccctttttattctcctgccttttttggtccatcatttaccaaatttcgtccataaattccctccccctttcactcatttcgtcccattaattttcatcttggactctctctccgttaaagagtccgctgaaggcactccgttccgccgttctgtccaaaaagtcaaccgcctcggcgggcagcggcatttccacggaggagcctttgtcggcactgccaaaccatattcagcagttccaccagtcgtctcccactttgccatcctcggcaccagcccaataccggcgaaagatcagttttctagacaccgccgaagagggaggcgcactggcggaggaagaggagaacagacggtcccctgttgatcagaatgccaaagtgccgcccgacaaatgaccgaccgaccgatcagttggaatgccattgatgcttttcatttcactgtcaaagcataatgatttatttgctgtttaaattgttgttttgctctatctgtttgctttatcatccttttgataacattttattcgctgtacttttccagaattttaccgggaaattggtcctttgattttgcaaattatcttttcggctttattatttatttactttcaacggttcagagtccgtgcaaaacgattcgggtcaaaaacaaattgactttacccgcccctcccccattttttgttaattttgctaaatgagtgtagcaccttttaacggccatccctttttgtcgcttacaattaattaccttttgacacctgcacaacaaaacaagtttcgtttcactaattgaacaatcgatgcttttcgtggattcagctaaaatggattcttctatttaattatgggtcgtttcttcaaatctcccaaaataaatttgcaatggtgtgggcttttcgcgcactttttttcgtaagttttattattattaaaaaaaataatatccttttgtgttatttttagcttttcatttttctcttagccgtgccatcgttcgcatttgcaaaggcactttttccgcttgggcttgatgtctgcggcaaaagtcgcgcgtgttggtccacgccgccggggtgcgactcggctgccaattgccaagcggtaaatgccgcgatttaagggccgaattatttgtccattaatagctcatcgtttccagttcagattgtgagatggcgttatgagaaaagcaaattgcgagttgaaatgcaggtcaatctctccccaaaactaattattattaattattaattaatcggcagtttctcctttcgcttaaaataattttttttcattttgcattcttattttttattattatatttttattttaataaattcttttttgtttctattcgctttttactaaaggccaaaggcattggttctttgggtgcggcagcgcctgtcgccgcccaatggatggcacttggattcagtgacgacgcgcacatggcaaatattaattaaattattaattaattcattacacttttaagggaaatgatactgttttttcgtgtctttttggcaccgaaggtggcaatcgcgccgaaatttcgtacaatcaatggactgataatattccgttggtcgaagtgagtgaatttggaaaattaatatttataaatttaaataaattggcaatttattttaggcatcaaaacaaatgattagcgaacagacattttcaacgggaaaagaaacgaacggatgcgcaattagcataaattatgcttataaactcacatcaaaagatgagcagaaaatggtaaagaaaggaattaacaaaactttgaatattaaaatgctcagattttgcgtttgaatggcaaagattggtggcacattttattcgcgcaaggcccagccgcgcgaaacagtaattaggccaattaaagggccaattaacaattcaaaatcacacgttcagccggccaaaaagactttcatacgacagtgcacaaaagtgaacaattggtgaaaatttgtgagagttgttcggacaaattggccgttttgcaaggagtaatttgaaagaaagggaaagtggcgaatagaaaaataaattaaaaataaaattaatgtaataataatttgttgttattccatgccaaaagtgttttccattgtaagtcataattaattaattaatcgcttttctttttcttttgcccttttcaattgttttcgttcacttcgacaattcttcgattcgttttcgttctcttcgattggcgttctgaacaaatttgtctttttatgaaaatcaatttgtttcgcttgaacgattttccccataaattcttaagtttttagatgaagtttgtgactttatttttctcgcaggaaaattaatttaattatttttatttttgggttt

SEQ ID NO: 12287 - DNA, 1085 bp, Heterodera glycines
attaagatttcctaaaaatttgattttttatttaattcgtagttgtcagaatgatttaaaattttgcagaaaatccttaggctaagggctcagtctccaaaatttcaaattttattcacatacaacttctaaaaaacctgcttttttataaacttgaaaattatatttttgactgtaaattttcaagttttacaaacacgaaattattacaacaaaaaaaaggaaaagaaatttgtaaaattttgcagactattagcctttatgctaatgtatttctttcaaaatttcaactaatcattctgatgaccactacaaaatgaataagaaataagattttttttcaacttcgtcataattatttgcatattttttcgaatcttattaattaattaattaattaatacactcatatacttactctccctccccccccccctttttgtgacatgaagcggtggcgccatggtacacaacaaatgactgaaaatttgcttgaccaacaattgacccaactccgtccaatgttcaacagcgcagagaaacagtttggcactgaattggatgccatttggagcaatgaaaattgtgggcagaaaaaagtgccaattgtttgtcaaattttggcggaactgcgcaaattgggcgaccattggcatggactgtttgtcaagctgtaccttagcagtgtgtgctgtaagacacttgaacttggctccacttcacaacgacgacacggtagtggcacagtgtcttaccgtaatcctatgttctaatgaaatgttttccttaatggacgacatatgttgatcgtatgaatgaatacatacgcaaacaattaccatatatacatgtaaatgtagaaatctaagacacagtaatttttgattacgatatattaaaatgaaaaacatattttatttttctattacaaaatttgttttggccaaaaacatggtcatcaaccgccacatttcagcatctacaatttcctactcatatttaattatgcccggcttttttccgcttcatataattggcacctttgcttgctttttaaatccaggcccgtatccgggggggggggg

SEQ ID NO: 12288 - DNA, 1737 bp, Heterodera glycines
tatttaaaaaaccaatcaaaataaaaaatttcgcttaaaattttgctctaaagcaacaaataatttttagttcttatatcattcgattaacctaaatgttatctattagcttgcaaaatttcaaaaaaaatcattgccaaaaatgtccgaaaaacaattttttttttttgagttcctctggccataactttttttttttaaaacttaacgaaattttttggaattttccaatctgttagagaacacttagggctatctaattataggatcaaattaaaatttggttctttggagcgaagtatgaattatggttttttaaatatgtaacgccctttatgatgttttttaaaataacgactccacaccattttgttgatttcatagatgagcttttttgtgggctgaattgtctgctggcgagagactcaatcgtgtgggactcagccgggtgagtcccaactttttggcgtggcggcggcggtggtggtgatgctgcagcagcttcatccatgtaccattagtacatgtgtagttagaagtacttttttaatgagaaaatttttttgtttttacccgccagcgcccgcccgcccgctaatgtctcctcccgccctaattacgtctccccgtcccgctaattccccaaaaattcgtccgtcagtccgctttggtccccctcgcccgcaaatgcgtcgtcgttgtcgtcgtgcagcaacagcaaaaagtaacaggagaaagaagcaggtcacatgagcgcgaccgataatgcaccgctgataaaatgcattgaaaaatccccccaaatattatgaagaaaacatggagacgacgacggacatgtttttctttggcatgtgaacatcatcataattaaccgagcaacagattatgacagcgaataattaacagttggcttatatattagggattaatgctgctcattcatatgccagtctcactcatcacacattgatggatttgttgtccccaaagccaaaaattctgataatccttggtgaacaataccttctctgttccccatatacggtgctttaccgtagtctgtaatatactttattacgacatatttggatctaaatattctgattaaaagcatatttattctttagaaatttgtttgtaaaatttggtctattcaattcaatgtccgctaattgttatatgggcagccgtgtgctgatcagtgtttccatcggcgggacggcactgatcacttttgttacactgatcacactggtcacactgtgccgggacatcaactcgctgtacgacgagatcatttctgatcttgacgagttcaaggacattgccaaccatgcatggaaaacgatgatggacgaacgattagtgaagggcggcgtcgctgaacagtttgggagcggtgacgcggagttcgttcggcgtcagccgcgtcagtcgtacgcggacggagacgctgccgcaactgccactggcggcagtgcggcacgagtgagcagtgcgagtgccggtatttgcaaatgtgccagacagccgaacaactgccctaaaggaccgcaggggcccaagggacagccgggtaagaggaaatcatttttaaaaatgggcattttgtcgggcaattcgacaagttgtcgacaagacaaaacgccgacactaataaaaccagggttgccaattctgttgatttatcatatcactttgctgcttttaaagaaatttgctttttccccctgt

SEQ ID NO: 12289 - DNA, 2341 bp, Heterodera glycines
  unsure (1)..(2341): unsure at all n locations
gggcacgaagtcccagcgggccaacctggacagccagggccagccggacagcctgggcagagggcagccgcagtgcctgggcccaaaggaccgagtggcacagctgggcccccctggaccggctgtcccaagcggagggtaattaaaatttcaaaaaattntcattcaattttttgttaagctcctcacccggccctccggggtcccaagacccgccgggccctccgggtctgttggccaacccggccacagagggcagcccgggaaggctggccaagcgggacccccctgggccggatgccgcctactgtccgtgcccaccgcgcaccggcgaagtggcgggcaagcagcaacaatccgccggtgccggtggataccgtcgcttcttccgcgcattccattcacgtcattgagaaatgggcgcttgtgccacaatttgatcaaataaatgtccgtccattaattttgcatttgtttcactaaaaattgtgataaaatggaaacaaatttttagtgattagtagggcatcaaaaaaaaaattaattaaataaaaattaaaaaattggatttatttttatcactaatcaataaaacatattatgtaattccattttccaccatatattttttgcatcatttgtatgaataaaacatattctcattcatattcgccaaatcaatgtaataaaatgaatatttctcaaatccaatgaaattaataataataatttttattattatataattgaaattccattattttagattatcgaaggtattttatttacaatatattcttgtatcataaaaaatgcaattgctaaatatgaaattatgtgctttttacataattattttctttttaaaaaatgaaaaagtccgcacaaaaactactgaagaaaaagttttcggtataaataataaaataatttaaaatatttttaaacattatttaattaacaaaaatttttacattttttgtatagtaataacaaatttaaatgtttgaaggaatccgtccaagcaatcttgaacaccattatgagcaacttctgttcaatgccgaactgagttcttcggaccgggaattgttggcccgtcggatcattgccgttcatttccatttgtcaattatggccaaattagcgctgcccaacgagtccagcagcagcagcagttcaaaaatgaaaaacaaaaaaagtcgaaaacccgaaaaatcggacggtggccctgttgattatgcacatgcatatcaaactatcagacaaacaattgagctcgtaagtgccaaagattttgtgccaatggaacacctatgccatttgtggcagttggaacgtttgtttaatcgccgatcggacaccgaagacaaggccagagacgaactgataaagtacattaattatcaccaagaagcactcgcttcgaaaaggctcaggcactgaatgccccggggggtcgggcatattgagcgtgctttcgtcttcccgtcaaacccgaaaatgagtgttttttaataaaacaaaaaataaacataatttttagagcctgtaattttgtaaaagtcgtgctcctgattggggaatcaggccaggataggattacggggattaaaacaccggttttaacgggatttataccacgacatcggggtttgctcaaagtcaataaatataaagcattatagagttcatttcgatagctagaagttttgtttataatgcctgcaaaatttcaaaaaatttcatcgtttaaaagagttatagaggaaaaactaaaaaaattttaaactttaatgaccacagtttgttgatataatctggataaatgtttttgaaaattttgcaggctatatataaagtaattatggcaattgattttgaaagtggctaggacaaatatatatttatattttttttgtaagctttagcaaagccaaatgagcattaatatatgcaatgatactgtaggatttttgcccacttcttactgtgctcattatgaattttcaaattctgtacataaattattttacagcgtaaattgtgccaaaactaatcaactagaagacactcaaaacgagtcagaagtggccacagattgggtgtacaaatttcagttggttatgtcgcgtaagcacttggattttctgagaaacttattaaaattggaacgaatgggagggcaattcaaattttggcgatggtttgacattggacaccaaattcagggcgaatcgtcgctgngctttaggtttgttgaacattcgtcggacaataaatcattttatcatagtttccaccgatatgagaggctttagcctcatttttgggttttttg

SEQ ID NO: 12290 - DNA, 1053 bp, Heterodera glycines
  unsure (1)..(1053): unsure at all n locations
cagggctcgcagatgaaaattttcaaaagcctcatttntgggtcaaaaagcctcattttacaaatttattcaaaacacgtttaaaatgttcaaatgttgtatttttgactgtccatgatcaatttgagcaattttttatttgaaataagcattttgtgaaaatctgagtatgaaaaatcgaaattgattttttttttcagcgctttttccaaaaacttggggacgggaaaaattttgtaatttttaatgcgatttgttaacagatttgtccacaaaaatgaccaaattttgtgattttgagcaaaggaaaaattaagaattttgaccctattttcattaaaaaaattctttattttgcggtttttctcaaaaaaccgcaaaaagcctcaaagcctcattttgaaaagttagcctcattgacctatcaaaaaaccacaaaatgaggctaaagcctcagatctgcgagccctgatgaaaatcccgctcaaaaaaccaaatttgcggatctcgcttccccccccccctttatcgaaattttttttttgttttcataagtcatgaaaacatgtttcagtgggttttcggggtcgctgatcagtgatcacgaaccggcatccatttcgaacaagagccgtttttagacgaaaaatgcgaaattcgaaaatttgtactttcgactttttgttcgaattatatttcttttgtgtgctatgctgctatgtacaaacaaatttctgtttttagtgaaaattttacagcaattataaatatggacacaaccatggaacaaccggctgaagatgttgaggacgtacagttggatttggggaagaaaaagaagaagaaaaaggcgaagaccacagaactcaaattgtcagaagatgagcatgaggaggaaaaggtggcgaaaagccgttaaatattgaaagtgatagtgaaatccaaattttaggaagtcactgcactcgccgaaggcgttggccgtacaaatttgctcgacgcaaaaaacccccgacgcgtggacggactacaactacgacgagatgctggaca

SEQ ID NO: 12291 - DNA, 1425 bp, Heterodera glycines
agcaaaaagacggcgttcacaaatttcactgaaatttgtcggctgctgaagcgtgacccgaagcatgtgctgcaatttcttatggccgagctgggaacgacgttggaccattttcatttggcaatttacaattttttatattttaggggctcaattgacggcaatcagtgtttaattgtcaagggcaagttccaacagaaacactttgagaatgtgctgcgcggttacatcagtgagccaatttctagtcatttatctcatgatcattgaaatttttgatatgaaaaattcgggtgtccttaattacactttcaccggcgatgggaggagtcgcaaaatgaacagaccctacctaaagcgccaaatttaattaccgatacgtttttaaactgtggcaaacaataatatttgtttttttgacactgagagggcttggttgtgtttgtatgttccggaaatggcgggcgtcaatttacaaaattttgtaccacctcggattctatgtatttttttgagcttggctcgactccgttccttgccataccattcgggcctaaatctaaatctcgggctgtccaacaaatatccattattgggacagaaggacataacccgttttgatcgtgttctcaaaaatttgccatttttagaattatttgataaccctcttcccctgctttcagatgaatacgtccgctgtcacacgtgccgctcctcggacaccgagttgaccaaggatgtgtcccgcctgttcttcatccaatgcaaacggtgcgggagtcgtttcgcggtgtcctccataaagtcaggctacacggcaatggtgggcaaacgggcggcactccgtcgggcggccgaagcgacggcgggcaaatgaatggcaaaaagcgaatgtggatgggaaaggaaagagacttcttccttttgttgtttccttttttgtcatgtaatttaacgcatcaaaatccgtaatattacctatatatcaaaaaaaagtcaattttcatggaaaaaaacattggtgccatggaatttatattttgttttatattctatttatttgttatccgaaaatggtgcactgacaactcgaacttaattttcatcatttctcataatgaagaggcggcagtggtaaagaattgtggtcccggatttattttttaaaaattttattttgtattttgggctcgaaaccaactttaaggggttttcgagggtgctgattacgaatctcaactcagatttacccaattccgaactcgaacaaaaagttgaaaattttttccagtgattacatttttcgtggataaaagcttcaaattcatttaacactatttattttgatgtaaaacaatgcttaaattgtttaattaagtaaagtgcacaatttgcgccaaaatttgaccggttttaaattttttt

SEQ ID NO: 12292 - DNA, 1122 bp, Heterodera glycines
tcactcaaacaggaagaaaaggtttttggctcatcatcggcaccaagctttcgatcagttcttcgtactcgtcgtgtttgtcgtgcacgtacggtgggcatgtccaaaagaacttcacttgcgggaatcggcggcacaaattggcaatcatctcgtattgctccatcatcactgcaatggtttctccgcccaagagtgaatctcgtccgacaatgatcagtgcggccttcactttgctggagagcaccacgggcttcaggcttcgcactgtctccgccaatgttccattttttgccccgatcaccgccgtttggtccaagatttcgcccaattgccccataaattaaattttaaaaaattttaaagtacccatggtcttctcccacgacgaatggtttgtccaatgtgtgcccgccctgtgcgaacagcttgacaaacttttgctcctgtcccaacaccagcgggaagaggaaggaaactcatgcctccaacaacgacggaatacggacgacgacggggagtgtcatgtgcgacgggtgctgcgccatttgctcgcgttgaccacccgaattccgatgcggacacggcccaggactgaaatgggacttttcattgtaatttttttggggttgtgatttgtggcatcaaaatgccacacaataagtcgggactttaccgttgttaaaccttaccgaccaataaccaacaaaaagagctttcggaggagggaatccggcgacttctttcttggtcttcggcccacaattttttttgccgtttaaaatttgcccttgtggatcaatggtaagaaaagcctcgtcaaaagaaagcaattctttttttgttgttcatgaaaaatgggaattatcgtacggcggcgccataaaatctcggcaacatgggaattatacgcaatttgttttacacccgcataaattaaattccatttttgcattcacccccttactttttaatgcggttttcggcactttgctccgctggtcggcccatgcgacgggcgaacatacgagacgcttggggcaaaaagtgttcatcattttgctgaaccggttcgagccgattgcccaatttctgttgctgtgccgcctttttcaggtttcg

SEQ ID NO: 12293 - DNA, 1625 bp, Heterodera glycines
ttttcgctgcgcaaactctccggtcgaaggtgcttcactctgccagagagctccccaatgacgcggtcgcacctttgcgtgactctctgtttaatcggctgaggttgggcgagaccgaaaattgtttttccttgtgtcctttgccttttattttagctccatcgaggctggcttaggccgaaactcaacagcaattatcactcagctcagtgccgccctctgtgacttgtacatccatgtggtccactggaaaggcctcgtcgctcaaatactcgtccaattcgattcccccacttcatcttcaaactccactgttcttgtcgcactgtttaaagcactccccgaagaattatacagtcataaacttaaaattggcgaaaacagacgaactgaaatcgaagaagaattggcgaggcatatggaaacactgctctctaaattggtaatcattttacgactttacaaaaacgtttcatcgttgctcttgtggcgcaatcggttagcgcgttcggctgttaaccgaaaggttggtggttcgaatccacccaggagcgattacatttttttaaatttgtcagttgttttttacaatttatttagtttcatttgtgctctttggatacttctttgtctgaagaaaatggatttcgaacgaaggtttctttttttttctcctttagcattttcaataaaggccgtcgactgcttggcttcttggctgctgaacccccgttgtcctgttgccgtggttcgcctctccccccctccgaatggcatttccttctcttttcagctcactcgttcccctttcttccgttcggttctttccgtgctcagccaacccaacacttcgcagcatttgcacgacgcggccacagaatgtgcggttaatgcgttacaattaatcgacgattcgaaagttgccttgacaatgagcggagagctgagcgaatttgcccagcttttgcagcagagcatttttgaaactgccgacgcatttcgattggccatgcgggaagaagactcagaaaagtgtgtcaattatgcgatttaattatttgtttttctgattcaggctacaaaatttcactcgcctttacgctgaacagtccaacgcatttctttctgcgatggccaataatccccgcaagggatttggcgatttgcgaatgttggatatgcttttgatggccaacgattaccatgattacacggtgattagagggcaatgggatggcgtgataaacagcgcattgcttttttcagctgtgtgaaatgagtttcaatgtgtggtaccaattgtccgaacatttgtatcagtgcaacgaagccgagttcgatgaactccaaggcattttcacgccatatgtggaaaagtacccctattttcttcatttatcccacggctgcctttctttcctttcagacatattctttcgctctgcaaacattgtcgggtggagcccgattcccaagatttgcttgacaaaaattcggaacatgccgattttcggtcaaaggcacaagaaagtgttaaggacgtggtgagttaattcgttaatgagtgaatcaaaggtcatattaatggtatgactttggtatctcgacaactgaaaacataatta

SEQ ID NO: 12294 - DNA, 2363 bp, Heterodera glycines
tggagaggtcagtgataataccagaattcttttttccatttcagttttgcgagtttttattttaaaatttttactttttcaaaatattattttagatagaaattttttggtttcttatccaaaaagacgatttaaaaatacattacttataaaatacgtttcgaattttcaaagcaaaaagtagtaacttactttgaaaaaagagttactcaggtttggtcgcaattttattcaatgaaagaattcttataacaaatatatacacaatttttaaatcgaagaaaaaacgtcgcattttccagtttcgcatttttatggaatcattacaaatccccgaatggcatgccatgaattgggcgggttgaaattcaattccacccagattagctgattattcactgaccttctctggccaactcaatgctccacaggtcgcttcatcgtcggcttcgtttgacgacaataaggagaatggtacggacagctgggccaagttgaagaccgaccccgtactttggctcgacagaatcgccgacgtgtggcgtaccctccgtccatggcagcaacaactcgcctataaacaggtgttaacacctatggtccctgattcattcaaaatggtcgaaaaatggcttagttttccgtgttttcccaagtgaccaaaagcggcaaaaagaggaaaaatggatttacagctttgcacttttataacttgtaatttatttgtttttttaatttgaacataatgtagcttttcattggaagcgttctgccccctaaaagaggcaaatcgcatactcttacattttcaattcacagatggccaatgaacagcaacagattcccccggagtgcccttggctttcgctctgttcaaatgcgatggaatgttctcttaccacgctgcagcgccaccaatcgcagcaaagtgaataaatgactcatcttcggccattcattcatttcccaaggggtcgttgaacacgcgtgccgtacaattcgttttttgatccgttcgatgggtgcacagtccgtcgtgttcattgagccggtggcaagccaaattatgctcaccttcagccaatttccacattcatgtcttctctacttgtccagcattatggtggatgagtacggctcaatggctcaccttcagcccggaatgctccaattgttggacgtgagatcgaaggcatggcttagcaagtcctttcgttacttcagaatttggcgaatcggtccctctctcttttggcgactgactcggagaacggactgcgcgaccatccggacacggtggacgacctgtacagattggccatccgtttcattcaggtgatgatgttctgtgttgtaaacgatgccaaatgaatattctgtgaatacagcgttctccgtccactctcttttctcatcccatcgtggtccaactcttccaaggcgcaatccatggactcgtccttaaccaccaagatgccaacagatcggttacaaaatttgtgatggaaataattgcagcagcgaaaggaaaacgcgtaatttttttttctttattttatacaaaaatattatttctgcgccatttttacaaaaagatgttttttggtgttttagagtcagtcactttcgaaggagcaaactgaaagagtgcgccaaatgcttgccgagaacggcccccaactgatgttggcatgtgtaagtgccgcgctgttccatctctccaattcgctgtgcaaagaaatggccgaaattgtccatgcgttactcaagacagacaaaatggtccaataatttctcaccgatgcttaaatgctttttttatcttaaagaaagcagaacaatggctccattttgtctgtgtccaattgccgcacgacgggggacacagcgcaaccccgcaacaattgaacgactttcgcatgaaaattctggagtaaccttcctttgatcgggttattgtgctaatgcatgttttcaggtcggttcgtcctagcgatgttttggaagcaatgcgcgaattgagcaaattctatgcttaatacgaaaaaatgtgctttatatgcgggtcgtttcgatgagaagacaaccaattttatctttcatttcgataaatcgatgaatttgccagtttttattaagtaacagcagaaccacattaattcccactagagatcggaaattttttttttaaattttttcccggctgtgttatgtgtcggctgtgtttcggcgcgctgagggattggcattcaaaattttttgcagggcgggatcacgtggtattaatcccgcatttaaaatttgcgggattttagaaatttcgaattaaaattaataaagaaaatcgcaaaaaaactaaatat

SEQ ID NO: 12295 - DNA, 1365 bp, Heterodera glycines
ctgctgttggctgaccattgttggtcccccgttcaatgcgtgttgggcttaagtacaaaaaggacacttttgacgtagctggcatccaatttttcgtgtgttccgactgtggcaggctccaactgaacagtgcgagcagcgaatgaccgcgggcaaagcaattcacttccgccgaaagtgttgttgtttgtgttatcaatttgtgtcattgtttttgcatatttaatttattcttttcttttggctgatctgtcgcttctctccgctcatttccttttctgtttttatttgtttacgcttcaggaacgatttattacttcttctttaattggtaaatgaatagtgaaagggttgtcctatatctcctcagatttatgattttgtcgttttcatcttctcataaataaatattgctttatttttcaatcaaaaaatgatatgcgttttacttttgatcactgattttgttccgacaaattcgattgttcgcattttcttcgtccgtacccttctgaccaccgcccattctgtcacgagtgccaaaagtgccgcacttagtgcgacaaatgccacaatccatgcccaatttggcacggcgtgctgccgcagtttccctttcgttgaatggaagtcgcggatggcaaagccaacgcgatttgtcagatcgatcagaacgtcgacgagccgattcccttttggggaggggggggattaaaaagacggggaatcgaaatgaatgttttgttcaccttgcattagcaaattcgaacattcgttttgagcattgacgaggaaagggaaaagggtcggattgtcttaatgagtaaatgaaaatgattattggctgcgtcgttagtgaccagtgtgcaaagtgaccgatgaaatctaaacggacgaatgaatgcttttccattgaaatgcgacgtctttgtccccccccccccccccccccgaaattaccctctttgggttggtcgtcagtccctccagcagaaccaaaatgagaagcaaaagggtctttattattattcgacggaaaaggcgggtcataccaatggcgagaaccattggacaatgggcacccaattcacgacgacgatgttcggaccatcggttcaaaaggacgtgcgcatacagctgaatgggacggggcaagtgccaatgacagaagggaaggtgggcaatcgtccccttcttttgtgccattgccaattgtctcccccttccatttgcccttttgtcgttccactgacccgcatgaacactttcgtgcttctgacaaatttctgtaccatttccgcgctcattgttccgcacggaaggcggaaaagacagccgaactctgtgctgtttctggtaatggaa

SEQ ID NO: 12296 - DNA, 1656 bp, Heterodera glycines
gcagggtcgccaaaaagcgacacgcttcagcgattaggctgaggtctgccgaccttaaaattggcgttggcagtgccaaatggacaatacaaagcccgtttcagcagaaacccaccaattcctccgtgtaaagcgtcaaataagcttcatatgctttggcggcgttttgctggttttcctgttcttcgtaaagtctgaagagaagtcaccttcaattggcggactttgctttattttacttggccaaatgcgtcagcgcatttccctccacgtcgccaatttgaaatgcctttttaaagcatttttctgcatccgatttccggtcgattttggagaaaatcacacctaaaaaagaaatttaaaatgacatccgaagaaaaggaaaattaatccgaaaaagtctcgcctaatgcgatcaaaattctcgagtccgctggccgacatttgtgcgccttttggtaatagtaaagggcggtctccgattgtttcagtatttcgtaaagttggccgagtccgtaccatccgcggtaacaaacggaatcgatctctgacaatgacaaacaaaacagttaaaagggcgtcgtaaaaaaaagtaaaaatgggcaaagattgaccaatcaatcgcccacctgttgcctttttgtacgccgttgaggccaattggtggtttttcgtctccaaatattcgtgtcccaaaagcacccaaatggacgcatttgtcgggcacaatttaatcgcccgcttcaaaaattcttgcgcctgctcgtgcatgttccgtgcactgtagtaattggctgcaaaagaattgaaaattgagttttgcgctgaatgccttttcagtgagtacaccccaaaatctcgccgcagaaattaaaaataaaatttttcaaggaaaaaacagaaaatttttttataagaaaattaaaaaaaaaaattttttacaactttttttttgaaaattttacgaaaaacagtaatttattataaaatttcaagaataaatcgctgaaattttttttgattttcttataaaaaatttctaaaattttattcttgtgagcgagattttgtcccgtccctcttttcagtaccgacgatgcaacacgtctcccagtggaatttgtgactggcgtaaaaccatttggccagcagcgaaagttccacgacattttgctaaaaaaaagtcggatggagtggagaaaacgaggaaatgattagattacccgaatgtacagcgaatccgagtaaaagtgcatctgccaaaaagagtcaagaaataatgccgtacaatgggacaatggaacagcgtactcactcagcagaccccaccaccccccgggttcacttcatcccccccccccgccagtcgtttccaaccaaaaaatcaaaaaaaaatcaaacagaaagtttaaaaaaaccttagaaaatgttttcatatgaaatttcaagaaaagtaattttaaaaaattttcagcgctttttcatgaattttgtgattaggaaacgacctgctccgacaaccgcccgccctacatcaccatgaattacccaatttgagaccatttccaacatcatccccaatttggacctgctcaattcggtacgggtcgatcttgcgaacccgggcgaaggaactgatcgcactgtcgtgctcct

SEQ ID NO: 12297 - DNA, 1716 bp, Heterodera glycines
  unsure (1)..(1716): unsure at all n locations
atcactatttttaaatataataacagcagttgcaatcaaatgtttttcttttttatttcttcttattgataaaaatctttaattttttaacaatgttttttgcttgaaatttatcattcaacaaatctaaaaaaacttacggcgttaacggataagggaagccacatggtgatcagctgtgatcacaggtatctttcaaatttgtttatttatttattttttatttcatcttgtcacacaattacagctaattgatcaatcgcaaaataaattagttagttataaaaccattttacataatgatattaattaattaatcttatacagcagataattattactaatcgtagcatttaacattagtaattacaaaacgaccgcgaacaggtgatcaagaaatgattgaatagagaatattttgcatataaaagaccctcaaatttgtctgtaatcagtttcaaatcgtattttaattccaaaaatcaacaaattcacctcccatttttacaaaatgtcccccctccgtttcttcgtcgccctttttctgatcactttggcaattttggccgggacccacggcactgttgagaactcagtggatggtgggccaaacatggcatcgccgattatccgtgaacgccgtaagttttattttattttattttaattgttgaatttaattaaaggttggggccatggcggcggaggccattggggctgaagaaaatggtggaagagataatggaaaatggagaacggaagaagcgataaacgatgaaaaacaagaaaaaataatttgtggtagaagaaaaaatgctgaactcttgttcgaataaagtttaaaagaatttcttattttttactcaaaatcgtcaaaaaatttgggctttgacgcaatttaaaatttaaatagtatttaagtcgctgatttctaataaatatgtaaaaaattcgataatgtaaaatatttttatcaccgatcatcaatcattaattatgatcatggttttagccaaatcgttgttgttggtgctgatcatgctgtaaaatcatggccacaagctccgcttcgtcaattccgctgatggcaatgcgcgcagcggccggtccgttgacgaaccgtcgcggcaattgcactcgcgcaccagcagcagccgaattgcgccggtgccgacgcccattggcaacaaatttgaagacgcgacgctttccctgaaaactgaaaaaattttaattttggttttgaatttttagaataaaaaaaagttttaattttttgctaatttttcaagtcatccttttgaaaatattaagaatttttcgagttttgctagcagaaaaattcatttcgattttttaggaaaatttctagattttatttgaagagtcaaaaagtttttcaccgtctccaaaaaaactataaattaacaattctggggataacactttttcgccaaaatgggcaaaaaaaatttttaatttttccacggcatggctatttgcgacaccgggatcaaaaatgtttggcataactgaattcacgtcccgttttttgaatctaacttaatttcccataaatgtcagtcagcacagttttgattttcgaatcgtataagaaagtcattgttgaaaattgcctgaggcgataattgttttgaaccgcgccgcgttgattttgtgtcgccacgctttcatcgnnttgcgatgcgtgccatt

SEQ ID NO: 12298 - DNA, 2241 bp, Heterodera glycines
tggaaattgtgtcgttgacatatgaataaagtggtcgcaatgggccataattggcctcataaatcatttcatcggtgctgaacgtttctttaaaattggcattttttaaaaatttaattaaaatttcgaaaacttattttaccaaaaaatgtgacagcaacttgtaacaccttggacatcaaatacatgctaacaacagcgatcagtgtccgagtggcagccttttgtaaggattttttaattcttgattaaaaatgaattttttgggaaaagtaatataaattgtacaattaataatttccgttagcaatttgattaggttaaatttttaatttaataaaaaaagtttaaaaatatatatatatatatatatataaattttcaatgcgtcccgaacactgggtacaaaattcggaattttagaaaaacctcagaaaatttttttctaaattttaaggaaaatttttttcaaatttttctatcaaactttttgacaattttatgatcaattattaagttttttcaaattttccaaaaaatcgctgaaaatttttcaaattttctggaaacttttctaataaaaaaaaatttttaattgattttttttaaatttcctcacccgcaaatttttcttctgcgcgttgtcctccgccaaggttagcgcgtgccgttgcagtcggcgaccactgcctttttggcacaaactttcgcgccgtgtcgccgccgctgcggcggcactcgcgcgtccgtcatcactggatgcgctgctgccgcgcaatgtgagggcggacgcggatgcggcagcggtggcaaatgaatgggtggcacggatgtgctcgcggttgagcgcacggatgatgaaaaagttgaggatgatcagcaaaaagaagggcacaatgtgatcaatctgtgaagcaaagaggagaaaataaaattgaaaaatgataaattgaaaatttaaaaagaaatatgaaaaaataaataaataaaataataaattgaaaaatttaagaattttataaataaatatttaatttaaatataatttgtatttaaaaaaatacatatttaacctaccacattcctgaagacgaacatccaccaaaacctatagaatttccattcttctccttccactgctgaacggacttcgaacctgtggattttattataggtattctaaagtttgaatcattggaaaactaaaaaaaatttcaaatcccaaaatttaaaataaaaccaactaaaatgggtaaacttagttcagaaatagtaaaaataacattggttatttattattaatttgttttccccgaataaattcaccgttcaaaatctgtacagttggcaatctcgatcacctcaatctcgaaataaatgctcattttgtaggcaaatgacacgcacatcaccagaagggtcacttgtggccgatgcctttgcaaaattctgaaaatttatggccatagattttcttagttataatttttatttcaactggtttttgttagtgatttgctcgactgatgaatagagacgcaaattttattgaaaaatcgcaaaaaatatatacttaaaatacggtaaaaaatccggaaatgttacaaagtatgtaatataaaactccaatattatatatatatatccaaaatatgtaaataagatttttttaaataaatatgtttttttggactaaaaattcttggaaaaacgtgaaatattggacaaaaagacataaaaaaaatcctaataaggtttaaaataacattttggtattttaaaataaccacaaaatttgcgtccgtccctactgctgatgaataacagagaaatttgtaattttagtttaattttcaaaatagataattcatattttttcctttttaattattttttaatattaattaaataattttatcaaattcgcgagattctgccagccactgactgaccttcgtgttttgacaattttacggcccgaaaatgtttgtagcagacgttcagaagtggccaacaaaatcatgaacacggaggcgaacatggcaaaataggagaaacacaacatgggccggagataagccaaaaacaaatggtaaagccacaggagacgaaattggtccactaagaagttttaaattcattaattaaaactcattaattaagattcttctgcgcgttattagcgggtggggaaaattttcaacaaacaaaaaaaagtacaaaaattcattttagtttttg

SEQ ID NO: 12299 - DNA, 3494 bp, Heterodera glycines
ttggggacccgacatctggggatccgacacttagggaacccgacatttggggacccgacttttaggggcccgacatttggagaccgaacgacatttgtggatccgacacttagggaacccgacatttggggacccgacttttagggacccgacatttggagaccgaacgacatttggggatccgacacatagggaacccgacatttggggattttaatgaaagaaaaaaatattaaaaaatttaatttatgtccaaaattaaaaaaatttacatctgctttagccagagttaattcctttgcaagaaaaaacaaaataatagttttaatgcaccgaacaaagtcactcgaaagatataaaacagaaaagatgacctcggcatttattgcaattagacagcaaaatcgtctggaactttttgaatgcccttgaattcctgttcacgttcgcccttgggaaagacgttttaaataaaaattggcaagaggtgtactgtgcataaaaaatatattgtgatatgtctattgtgttgtggttagtatgtatgtatgagatcaaaattaccgtaaatccgctatttgaatgcccctctctggtagaatgccccctccaattaaatgcccttttttggaggggttgaacaatacaatgcccctctctggtagaatgcccctctccaataaaatgcccccctccaggaggtatcgagtatatccgcagggattctggggctttgtcgatgccgaaagcgaaatctgattacagattcgttatcaacaccctaaaatacctctaaaaagtatttttcagctaaatttgggtgaaaaaatttttcccactcagaaaccatgtggtcccccccctttggtcccaaattcccaaatcaattttatttttctaatcttttccaaaaaaatagtagaaatatgaaataaatacagttctatagagcaaaaaattgcgggttttttgagtatattaattttcgaaaacatcctttaagaaccgagttctgattttttgtctgaaaattcgaatttttccagaatttctggaaaaaatttttcattttgatgatagaaatttaaaataaattcataaaattcttcttatttttctctatttttaaagctttattgtacttaaattgatccactttgaaatgagttatgaattttcaaatacgagtccaaattcccgagggccaaaattaaaaattttcgaaattttttaaaaattaaaaaatttgtaaaacgtaaaataatactcatattcatgctctgcactataaaaccggttagaaaaatggttttcacccctttttgactcgcaaaaaaaatttccgagatttgaggggttgaacaatacagtgcccctctctggtagaatgccccctccaattaaatgcccttttttggaggcgttgaacaatagaatgcccgggcattcaaatagcggatttacggtagctatttccttgcggtgagtccggaaacagagttaatttaaaaaatattattatttttttcttgcaatggaattaacgctgcctaaagcagacgtagatttgtttaattttggacataaattaaattaacatttatattgaatcttcaacaaagttttaaatttttcatgctgtaatttgctgaattcgagatttccattctaaattgagcattaatttttgtgctttttggcatttggtgtgataaacaataaattgttccatatttttttattccccataattaccgatttttaaaattatactcttttttggattaaacattcgaagaaatgaagctaatgaaaaatcaacatataatatattcaaactgtgcaaatataatttaaaaaatttttaaatgctattttaagataattattaccattgatttattcatttaattgcataagttgtccataattgtgtgatgcttgcctcccctaccatacccatttatggaaatctcaataattcatattataaaatttatctcataaacaatttgaaatgggaaaattatcctttttcaaaaatagcattcaaatttttgttcgtaaacatttaaatcccaattttaatcaacaacacattttattggtaaataaattgaacattatttaaactcacctaaaagttattcaactcaattgggattttttatgaaataatttttatttaggaaaaaatgttcacattcatttgcttctttatgcttttgatttcgccaattatttcagcacaaaactccaaatgccaagtgagcaaaaaaactaacaaattatttggttaattaatataattaagatatttttatttttaatgaaaaattttagttggatttttagtggcaaaaaattaaattaggtaaaaaattgccaaaattgcgacacaatggaaaaacttttctgtacataaagtaaagcaacagaaaaataaatgattttattacttcaacaaatcgctttttaattaattaaagatgagtttattttttaatttatcttttgtttcagtgtcctaaaaatgagcagcccggccaactgaagtgcaccggatgtgagccgagttgtgacaatcggaaccccgacggcgcgattttgcaattgctcatgtgactgtgtgaaaggatatttgcgcaacaaacagggaaaatgcgtgccgaaagaacaatgcccgcacaaaaagaattgaaagtggggaaatgatggagaactgatggaacttcaattttccaagtaaaaaaaattcaacatttaagtttttggggggttcatttgtcgagatacatttctttgtttttcattttataatagctttttttgatattcattttgataaaaaagtttttgggtgttcgttttgcatttaagaatatataaaaagttcaaatttaattacaaatatgaattttgtttaattgatttgaatttgaaaaaaaatattgataaaagatttttttgtccagtaacatcaaaaatcagcaaaatccgttctttccagcaaaatagaaacccttaggaaaatccattttaaagctttcataataaatttttgaaaaatcttttacacggtctttatgcactgactaattgaatggtgactgaacatttgcgcccctacatttgcgccccgcacatttgcgcccctacatttgcgccccgcacatttgcgcccctacatttgcgcccctacatttgcgccccacacatttgcgcccctacatttgcgccccgcacatttgcgccccaattatgaacaaaaaaaaatatttataaaattgcctttcccaagggctaacgggagattaatatgattgtttgtttattcaatccaattatcaattcctttggtggtcagacgaaatgaaattgcgtgcagatgtcgtagccaatgctgttcattgcgatcattggatcttgctcgtcaaattgggcaaccaagtctcgaatagcacggtcgttttcaagataatgttcgaacgagg

SEQ ID NO: 12300 - DNA, 2356 bp, Heterodera glycines
gacggtgggggggaatgaagtgcacccttcaccccccaccccgtttaagaaattagttcctagcgatttttttggagaagaatgcctccagcagatgaatttgcactttaaagtgccattaattggtaaacaaatgccaatgtgattagtcagtccattccacacaataaattaaatgaaaattttaagggaaacagatcaatttcattggtatttcgttaatccgtgatcaaaattgctttgctcgagtcgagaacgagactctcgagcagcactgctggacatgaacttgcccgaggccaacacaaagaagcaaaaataataatcttggcgaaacgttctgcccaaaaaataaaactcttggcgaagtgcccaccaaccaatcacacccatttttggggctgggttttcccccaaatgctaccgagcggcacgatggtggtagcaacagttgtgccaccggcggctgtcaatgacgcttttctgccgccaccaacaaagacggtggcgccgacagagggtgccgtcatcgacgacgacgatgccgtcgtcgtggtggcgacggcgttcggcaacaacggcacggcggtcttggcaccgcgcccgctgctgctgcacatgatggacggcttgtgcaacttcttcagctcatacgcgctgaacacgccggtgccccagatgccctcgctgctgtcgtcggagacggtgccatcatcgatgtcatcattgtcgtcgtctttgtctgaaaaatggacggatatcgccatcggatcagatcgatcccgggtctcgagactctcggtgttttatgaaaagttaattttgtttatgaggggaataatgcaagtccccctccgcatcagcaggaaatgtttagaaaaaagaaaaatgtaaatttttcaacaaaaaaaacttaggaaaattttatatgatttttttagtgtaaaaaaaaatatttttttaaatttaatttagttttttttaaatttttgggaaaggggccccaaaaaatttttgacgatttttgaaacaaaaaattttttatatttgtcaacaaaatttaaacattattgggaaagttcgaccgatagttagttgtatgtgtttgggtttacaatttttattcggcaaaatttcagaaagtttcaaaaaagtacaaaaaaaaaatttgtttttgttttgggaaatttttatcttattatatacaaaaaaaattttgctgctccgacttggaagccatctggaaacaaaatgaatttttttttttgaaaaatgccaaaaaaaatttgtgagttccaattcggtcggaggtgtgtgtttgcgaccgacgcgacgtacccctgggcctgcgccgcgtctccggcttgtccgggtccgtggtgaaaatgtagttggccaaccacaggtccagctcgcggatggcgatgctgatgtggtaggggttgacgcaaagggtgggaaactgcggaaaaatttttgtaaaaaattaaattaaattaaaaatttttttttttgcaaatttttctaattttaatgccctcctctcttctcactcacattgcatgtgccgcatttttctagccgttcgccgtcagtgctctccaatggaatgccctaaaaattcaaaaaaaattttttttttttaattttgtataaatcgctcggagaaaaattttcctcaatttttgggggtttatgccaaattatttcttcctttttttggggtttaactcattttccggcccttttatttttgatttaactcatctaatcctctttttttggggggggggggagttgccaaatattccgtcatttttggattttcccccattttctttgcccaatttaacccctcgcccccgattttttcgtttttttttgccaatttttccccatttctggcttttttctccttggcatttccattctcaattttcccgaaggattttgtttgccttgaacaggatgaccatgaccaggtccaagcgccacactttgtccgcctgccgcaaacagtcaattcggcgcattttgcccttttggtccgggttggacagcacacagcacagtgcccgccgctgtgggcacgggtcggcgatggactgcacgaaagtgtcacggcactggggctggatgtccttcctgaacaatgccaatgtcgaaaaaataattttggaaaatttaattgctaaaaaaggcccaatttttgaatttacggagggttgtgacactcaaaaaaattttcaaattaattgtgagggggctgaatggcttcactggatgtcgggaaaaaaatccaaaaattgacatcgatatgaaatggaaaatgacgaatttcgcctaaatattctct

SEQ ID NO: 12301 - DNA, 1363 bp, Heterodera glycines
cccaatttttgaatttacggagggttgtgtcactcaaaaaaattttcaaattaattttgagggggctgaatggcttcactggatgtcgggaaaaaaatccaaaaattgacatcgatatgaaatggaaaatgacgaatttcgttaaaatattctctgggggcatttcggaaaaaatttttggatagaaattccaaacccaaaaaattacaatttttaatttgtaaggggctttctcgcaaaacagcaaacaaaccggagctttcccaagaggcgagcagcccatttctgcttttcatcggcactttcttgctaaaatgggaaaaaattaaaaattttctgccaattttttttcaattttttttactgagtttttctcagtaatttaaacccttggggggggggggtgattaacggctaattagttacccgacattagtgtcccgggcattttccatttttctggacaattaccaagattttctattagtagttcatgccgaatttcgtgctcggttgtgccatgtatgaatgacattactctaatattttctcgggcaacaaaaaaaggctccaatgatctaattatatcatcataataattgcaaaaatttcttggacaataaaaaagctataatagcatccaattgttccatggtacccaaattttttgggcaaaatcaaagtttgtcccgattttttccataattgccaagatttcttggacaagcaaaaaaaaatgcctagaattacaacccgaatttgtgccatcggttgccaagaattcttgggctaaacaaaaaaaaaatgccctcaaattttgtccccattttttccatcaattgctaagaattctcgggtaaaaaaaatgccatccccccccaaccccaaattttgtgccgactgcttggccagcagccatgccaaaaagccaccgaccatcagtgcctctttggtgtgccgttcctcctccagcgtcatgctctgatcacagcgtttgttgtgccgccgcttggcggcctgcaaattgaaccacacaaaggcaaactcgcgcacatggggcaacaagtcctccacgaacgggtggaactcctcctgacaaacagcagcaaaattcatggcacggaaatgggtttttcaactttcccccctacgcccttctttttctcagaaatttttttttaaaacgacgaaaattttagtttccgaactgtcttggaggaaaatggtaattttttggactccgagaaagtgtaggtaccccactcccacccccaagacccctccatactcaaaatttaaggggttggcaattttttggtgaaaatttgttacaaatagaaaaattatttttaaaaaatttttt

SEQ ID NO: 12302 - DNA, 2139 bp, Heterodera glycines
  unsure (1)..(2139): unsure at all n locations
ggggggggagggggaccgaccccncagaattgaggcctcgacaaatcaaaattccgctttaactcgaaacttgattttcccgtaaatttttgcaggctgctaaaaaaaactagccagcctctgccccatggaattgatgggtcttcaaaaccaaaaattttcaatgccaaaaaaaatttttttttttttttgccaataccgaatggcccactgatgctgcttcgtcctgctgttgaaatgaattgtgctgctggtgatagtggccattaactgtgccggtgaggacggcacaatgtgccgaatttggcggagagattgccgctggggtccgagtgcgccaccgatttgtgcaagtgctgctgctactgctggcaggccccagctcgtcctaattttttgcttttgaaaaatcatatattttacacagggttagtcatcccaaaccacgccctctcccaaatttgtaaattcttaagatttttataggaatttcaaacccaaaaagcgcaataagattttcgaatttaattcaaaaaaaaaaattcttttttatatagtcaagccttaataaatttacaccaggaagtttagcccggaaacctccaaaaaaaccggaatccgtcctgactcttaattaattttcggagtttcgaaccacaaaaagctcgcaaattttcggttcccgggacaggtagctagctacaccttattttgcatttgttttatttttctaaaatttcgttggcgccctcggcctagaaccttcattacacaattcgagtaaaataaaaaaaaatttatacaatttcatgtgattgtattactgtgtcattattattgtacgactgtctctgctgctgctgttgcttatggttgtggtgcctttgttgttgttgctgctgctgatggccggccgtggaagaggccatccaattttatattttgattttttttaattttgctcaaaatactccacaaattttcgtctttgattggcaccacattaaaaaatctcttggcaaaaccttaaacattggacaaattatcactgagaatattttccttaattactaaataggatttcgttagtcaattttccgtttaaggctcacacatttttaagacatagaaaaaaaactttttttaaatcttcatttttttttgtatttttggctttgtataaaacaaataaaaattatatttaaaatgtcatggcgcggagtcgaacctccaccccttcctttttcctttggctgtcttagaaaaccactgagccagatacgcaatttcttggtacaataaatacaaaagtctgcaaaaggttcgaaaaaatttggtagacaaaaagaaaaatggcaaaaaaaagaaaagaaaacggaaatttgtacataaattgtcgccccaaaaactttttaaatgcctccaggattaaatttttaaattttgggacacaaatttaatggactgactgacactgactcattcatttcatttcaatcatcagcaaaaatcgattagcaaaagcaagaaagtacacacataaaagataaaactgctgatgaataacgaaaaacccatcggttgtttctttggatttattggaaaacgatagacaataataaattaattttcctcattctcattaataaataataataataaattgcccgacaacctaattactgctaacgaaatgataaagcgataataaaagtgattaatgtgcgatgcatttgcctggagaaaatggcgtggtatgaagtgttggaaaatttattaaattaagaattaaatttgcgaatttttcatggtttcaaaaatttcacaaaaatacgaaaatcaacaatacaaaaaaaaatcaattattaaaacaaaaagccttaaacctttcactcgagttagcggaccagtaccggagacggtaattatcgggttttcaggttccaatattcttttttgaaaaaattataagtaccactatgattttggagtgatgctctacataattttcatggttattaaatttaaaaaaatcaaccccctctcaaacaagggctgaacctcgccaaagcctatataggcacataaaaattataattattaagcaaaaaaaaaaaaattagcagcagcaaaagaaaa

SEQ ID NO: 12303 - DNA, 2562 bp, Heterodera glycines
ccggcgtcgattgtgccgataatttccgatttccgagcgttattttttccttttcattttcgctatttcccaattcaccgttcatgagacataaaattgtgttaatttggccacaaatttggacggcgattctctgaatggccgagtccatctgatcaaatttgcaattgtccattgtctccaattcgcgaaaaagtcgcagcaaagagtcggaaaagagttgtgccgccttaattacccatttagtggtgcccttctttctttttccttctattttcaccttttccatcagaatgtccgtctctttttcttctctccgtccttttttcttcatcttttcgttgcacttcgcttcttcttctttttcttcgtcacttttttcatttattttaatcgcagaaattaatttttcgaagcgaatttcgaatttaaattccgctggaggctgttggaaaagatttaaggcggtggagaactttaaaagccgctttttaaaagatttattgcttttcgtccgaacgtgccattgctgtgagtattctgaaggaagcgtcaaccgttcgttggcacttcgacacgccgcactcctccacacattcgaccaacgcataccaaaagctgtttttgccagtgacaatgcttaaacttagaagctcaacaaatcgatgcccatcgccatttattcgtttggctaatcgaagcgcttccgaacgctttgagagggttggcgaaagcaaagcacaacgccacaattcttcaagcagtggaagaagttcaacagcagagtctgacgaaagttgaggcaatgaaagtgccaatggagacaaaagacgcagcaattggtcaatgactctgatttgtgagatgggattaattgggaaggggtgaagaacggcacaaactgatagaaggagtgggcactttctggcccctccagtgccattgacacaggaacaatgcccgatggacgacaatcggtcgcagagggagtgcccgcccttttcagagtgccgatcagttgcatgccaattctttttgagtagttttcattcatttccgagcgtttcgcactgccacgtaactgccaaatgatcagaggtaccaattcgtttctgcaaatttgcgactgaagtgagtgtttggcgaccgatcactgactccaatcggtccaaaatggcacagtgccgtccgatcatttgggggtccaatgcgcttaaaacgccaaacagagcgtccaaagggagaagcatcggttggcgtttgtccgctttttcttcgctttgttttccgcccgaaagtgcgtcgatcggctccgctacttctgcgacggctttgcccattctgttgatcaactcgcccaaaagtgccgccacgtccttggaagctccattttcctccgattcgctgttttcctgttcagttttttctgctatttttttctcccattttttgtttcatttgttttttggtacttttgcatttccctccaaaacgcttttacctcgatggcaattttattcagaacgtacgaattgagcatctgaaaagtgccaattcgcttcggacagatacagaaaattgcctgtgtaagcgctgcccgagcagccggacggacactcgcggaatccgcggccaattcaaatgttttcttgcaaatcttttaaatcgaaatttaattttattttattacataattattcattcaatatttttctcaaaattataataattattttcttttttttaattttgcacttcaaatgcggcgagcacttccgctgttcgaatgggaatttgtggggacgaaatcagctgaacgagcagagttaggcattggcactgcgtggcgggcatttcgcgccacgaaggaatgttggcgaacagtgagaggagttgcccggccaaacattcgcccggcggcgtttgcccttccgccgccgacgaagcgccgcctcggagaagaagctgaccaatgggaacagcagaatcaaaaccaaagtcattttagaaaggcacctgaaccccctcaaaggcaatcgctgcgaatttcggcttcgatgttccaaatgccataacaaaacattcaatgcatttgcgccgccgctcaaaagcatttgtttgatcgggcaaatctgatcagagcaaaatgaacacatgaatttcgactgatcgggacacaaacttttagccttttgaagtgcttcaaaaaggccgtccgttggctttaagtcgggctgaacttcgctttcgaccctttgatggcttttcccctttactcacctgattgcccaatttgtttagaatgccttccatttcggcttttctttcattgaaacatttcattcaccaaaaaagaaatccattcgaagaatgccaaaaggaaaagcacagaaaggagagagaaaaacaagaagaggggaggaaataatattgaggagagacggcggacaaaagcgccgctaagtgactgccgacgggaatccccccgtcccccgccgggcacagccacttcggtccctcgctttgggtgagtgccgcggcaatcgttcattgcttgtccat

SEQ ID NO: 12304 - DNA, 3078 bp, Heterodera glycines
taaagaaatttacaataaaaatatttaatagacttttcttttttaaatattacaatgtgaacaaaaaaaaattttgttaacagtttaagccaagaaatgagtttggggacccgacgagaaactgttaattaaattatccctgacaatggcacaaccggtactaagaaaacaaagtgatctttgcttaagctattcgattgattggcttcagcagcattaattcgacatcctccaaaaccaaaggctttcgtttgccatggaaatagtcgatgagagccacgatgtttttgaactcgccaactgtggtcagaatctgaaatgttggcttccggcgcgacaatttaagcgatcacagggggacgggacaaacggacattggacaaacggacaattgaaaatggacaattggcaaccatttaagtaccaaaaaaaccaaatgagacccgtcattctcgattggttttttggcttaattcaaagggcttatttgataggtcgtttcctaaatctgccaaggagtaaggaaaacaaaaagtaacacatataaattcctaacttcactcagtttcaaccaaataaattaaattaaatttggctcaatttcaaattaaataaattaaaattattaaatgactttaaaatacatgcatgaccctggcaaaaaagttatggacaataattttttatatttttgtaaaaaaaatttcttaattaatatttctgatagagaaaacctagagctattaaatagataccatgaaatattactttggctgaaactgagccaagttatgaattttatgtgttttacattttttttattttcatttatgaaacgacctagcactaattcaaagcataaatgtaaagttttataagcatgccaaggtcaaattcccatcattttgaagaaaaaaaagtaaaaaaatcatttgaaagatccgccggtaggggccaactgcgtctgagacaattttaataagccataactttttccgtaattgcttaaatcaaataaatttagtatcatttgaaaactttatatgtatcgaagatacttgtacgttttttctacgcgattaagcaacccgtaaaatttaaagcttgaaaatgcagaatgttaaggttttgaatggtaccaagtttgtttgatttgagaaacaaagaaaaaagttacggctccttaaagttgttttggcccgctccttcggccattttcttttttgcttcattatgtttttgaaatgggctgtgtttggccttttgtcctttcggttttgccgctccctcactttcccctcattgtccatcagataaacgtgccgccgttctccgtcgttcattcccaccaaaatgaattcgtcgttgttagggcttttcctgaccagaaagtgcccattctcgcggacaatcatttcggcttcttctcgtgtcattgtcccatggaaccaccggcacttttccaatccaaaagtgacctccctaaaacagctcaaagatgggcctgcgccagcatcgctgtctgccaaattgtgcattaattcgtcgggttttcctctgttcccaacttggccgtgccgtccgtttgggccgcggcggcacttccggcggaacgaccgaagagagcgaaggaaagggacggatttccaattcatttggcggttcgggaaaatcaaaggctatgttttgagagcacaaatcagtgcaaattggagttggaggctaaaagtgatgggaaaatgatggaaaattcaacgaaataaaaatgcaatttgtcccagggggaagcccttttgaaaaaaacagtaataattttgcttttgaaaattattgcggccaaatatgccaaaccatcgcaccgtcgaagatggcactggagttttcgcctcttccctcgcattgttggcattggcacttagacggaaggtaaagcaaatggcgtcccgaacctccaacagaacggaacggtcatttgccatgaacacaaaacacttgcgcactctttcacccttttctgacactttggcaacgaaacagaaaaaggaggccatttcttaattcgaaaatattacggggcaagcgaaggggggggggaattagaaattggggaatggggaaggagggaaatgaacaaatcgcctcaaaaaggaaaggacaaaaaagggaaaaaagaaggacaaaaaaggaaggacctgcctcggagccaagggacagcacagaaacatccgggatgagaaaacggtgcaaaacgcgggaggaggaggcgtcgatgagaagaatattgcgagtggacacattaagcataacatcggcattttgtacgcgcacggggccacgcaaatactaaaggaaacgagcggagaaagggaaggcacgggaagggccaactgagcaaatgccgtcaccagccaatttggcacggcttggccccgcctcgtcaacgaccagtcgaataaagtctctgaaaattgcatttgttgtgccattgttgcaattacgtgccttgtcacttcggtttgtcgttcgattggcagcgaattcagtgatttttcgaccacaacaaatccgacaaactgtcaaaaatcggagggattgaaaacgaaattgtttctgctgatcacccgaatgtaaaaagtgatgccacttttctgcagctctttctccgtctctcttaaacacttcgaatcgatcggaagagaatccatcggcggaagaacgcttttttgagctttgaaattagattttgcagtggcaaactcagcctttcatcacattaaatgtgcaaaaagagagaagggacgcaaagaaggaaaaggcaaattgattattaaataagtaataataataatatttagatagaaaagaagaagcttccccgagaggaagattaatggatcaattgaggcaacaattgatcctatatgatcgagcaaagtggggagctggggagggcaaggtcggtagttcagctggtagaacactggtccggaatggcagatacgccggttcaaagccagcccgccccatagttttcccacagaggcttcctcagctcgttcatatatttcaatataataa

SEQ ID NO: 12305 - DNA, 2293 bp, Heterodera glycines
tgcaggtcgcaaaaatcacacaaattttagggggggggggggggggggaaacgtaaaaattctttttgggggagagtgaagagtattagcgcaagaatgaaacaacaatgaatgaagagcatgaatgggagatccggttttgctggggtgggcccaaaattggggagggaattacaaaaaattacaaattgggggacaaagggacaaaaaggggagaaggggcgtttgatggggtgcgttaaacatgttaatttgaagaaatgtttgaaatggttttttaaaagggaaagtccaaagattatttaccggaatcaatgccataaaatgccaaattattaaatctttgtaatttcagcaatttttgcgatttgttgaaaaattatggcatatgtaagctccaatagctgattttattctttaaagaagcaatgaagatgccttcttcaattttgatctcattattaatgattaatttgtttaaatttcagttttcgtattttaattgtttaaaattattaaaaaacaaatataaatttttaaacatttttcctaatttaattttgcctacgaagaaaatgttcggattttaaagtgaaaaatgcatagcattttatttgttatttcaacattaaataatttgaatgaatcattattaattattacaaatgaagctcatcattttcatcggttgttgacaagaaaaacaaaaacaaaatttgcacaattttctccacaaaataattttcacatgtccgtacgaaacgaaattgtggtgcaccaaaactgaaaaattaatcatttaaaccattttttaattttaattttaccattattttgtttgtttttttttggtcattcgacgctaattagcggggcatcggaggcgacacttttcgaattgtgtgggatttggtcgtaaacgctcagaagacgcctgaattttgtaaaataaatattttttttttattttaaattcaactaactaaaattaaaattaattaaaattgttttccaccatttttcgtgcaatcggccgacaaattgccctttccgtgcgcttgagaggtccctaaaatcgcaaaaatatgtaattaaatatattttataaattaaaattccaagccttcgataagcgtaaatattccataaaatccacgccacggagagaaggccataaaaggcaatggcagtgataaaatagggccaaaatttgacccaaaaatcggcggtggtcgaatggaaatgctattaaatgatataataattaaacgtatttgaaatttaattttgtcaattttattaaaaaggtggcaatttgtgtgtcaaattacctccgcattttcggacgcattggtggcaagggacaaattttcgctaaaagaccaatttgaaaaaaacaattaattattttgattgaatttataaaagattgttgttttgttgcataattaagaaactttttacatttagtttaatatttaataacttttgaaataaataaatttaatctttaggctccaattctaattctaaaattgttattaccgaacaaattttgaattatttatatattctctcatcaatttatattttaaatatttctttaaaataattcttttaaatgattcactacttctatataaatttattaaaaaaatatttattatttttttaattatataataaaagtaaattcgtaaatttttaaatttttgttaattacacaaatattttaaattaatttaattatcatttattccaccttaatgtgtggtggtgcattggtcgttgcttccttttcttctgctgctgttcaaatgcttctccgattgtccgatggcaatggccaacccattaacaaatataaataaataaataaataattgcttctgattgatcaaatgttttccctttcggcgactcattcaaaaataaaaaatttgaagagcattttcaatttcatttttatttttggaaatttatttttaaccccccaaaattaaactaaattttgtggggactgtgtaaaacactttcaattatttgttcttcagcagagggaaaggagaaggaccggcaaagatcgacgagggatttgcagcgattgcgaaagaaaagcgaacgattttttgtccattttaaattggcgtggaacgacccccggggggaaatgggaaaagggggaaatgtgtggcttttgtttaccttttgacgagaatcgccggcggatatttgagggggcgagagagtgtggggaatggggcggaaaacaacgagggacagtttgagaatg

SEQ ID NO: 12306 - DNA, 1516 bp, Heterodera glycines
tttcagagctttggggcgccggtggaaaccaaaaattggggcggcggcggacgacattgtatgggcggtgccggcattaaaatgcccgttttgccgggcacccaatttgttaggggcgggtcgaattcattcgatttctataatttttctgtttttttttaattttaaagatcacaacgaaaatgaattcagagtttgctgatttcgacattcattttgtttgagtccggcgatgcctaaaagcgccaaggggaaaatttgaatttattatcaaaaaaatctaaaaaaaatttcctattccttcttcgaattccggaaattttttgggcccaaaggtacgcccttaacatttacaaatgtttgtattgaaacatcacatggaatcttctcaaatgtttctttatttcatcaaaatgctcgtttatttattcccttttttcccaataaatttttgattaatttttttttcatttttcgttttcgatgactcccatttttctattttaattcaaaaaattgatttcgaccccgtccctggcaccacggccgggaatcccgtgaaatgccggtggaccaatgccggccgagtccaaactcaacggggaaaaggttcaatcaaattggcactaattatttaataaggtcgatggaaaagaaattgattttccatctttttcaattatattttaaaataggcacataattcagaggaaaaataagggattttccgcttttttctgtttgatcaaaaatcggatccaatttttggcctccaatttatttgttttgtgtgtttattatgaatgaaagaaattcaattccaatttattttttgaattcaattccatttcattttaatttttaattgtttaaatttcattttccgttttaattttccattttttggtccctttgcctttgagcggcggcggcgcttcgctttccgccaaagtccccaaacaaaaaaaggcacttgaaaaacggagcattcatccacataattgtcgtcatcatcatcatccctattatatttcatgtataaaatgcaaaattaaacaaaaccaaaaattattgaaaatggaaattttaacgaggaaaattattactgtaacactgaaaaattattctaaaaattttaaatttttaaatgatcaatgatcacaatttccaaaaaatgcccggaaatatcctttgtctcgttaggttgggattctgtctggcccacccgaattcgaacttttccaattccgccgatcactaccaaaaatttccatttttatgtgcctaccctcgaaaagaaccgtcgtttgatcagagaaacacggtctgatcagaacagacgtgtcgcaaaagcacacagtttgatgggttccaaataatatataaattatttcaaattcaaattaataaaattattttctaccaaaaattcccttcccaaattacactcattaaaaacgataattattttactaataattaattgtccatccccaatttgtacagctttctttcg

SEQ ID NO: 12307 - DNA, 1708 bp, Heterodera glycines
tcccatttcccgtttttgtcagaaaaattctgtttattatttttaatatttcaataaataaattaattactttattgatcaactgcataattttggtccttcaaatgggaattatttccttttttcaaaaaaaaaatttgctaaaaaatggccccttaaattaaattatttcgaaaataattaaattatatattttaaagagaaatatatttattttttaaatttatctttttcaattttttatcaaaataatttttgcagttaaaaacgacaaaagatcattcccttctcctcaccttcgataataaatgctgtgaaaattaaataattatttttttgattttccatttataaatgcaaaaggtcaaagaattcaaaaattttaaataaatttatcggcaattaattcgcaaattccaatttttcctttttttcatatttttccctttttatgtcccataaaataaaatcgaatttattttaaaacgcgtgaaacgatacaaagaatcaattggcgccaaatcagcccataattcgatttattattttttattaacgcgttaaattgggcggcgccaaacaaaaattattaaaatatttttcatatttttggtgaaaattcataaattttcagaatttcggaaacgttacacagattatttttgaatgctgaccttaaaatttaattaaaattttgattttttacgaaataactaattatttatttttattagtcatcgcatttttctgccgaaaatacaaattacaaaacactcaaaaccaaccaaaaatatgacaaatttaatttttttttttaattaattaattagttaattattcgccatcccatttttacactgcctccgttttcttatcgtttttcgccgtaattttgtccatttttttattagcattgaaaaggaatttacagcgaaaagaatttgctggtgataaaagcgcccaattcgggcgaagaatttaaatttttttaaaagaggcttttggttgaaaattaaattttaaaacatcgtttttatgggttaatccgattttacttttcaattaaattataattaaaaaaacaacttataaattagtgggggggggggaaggccttaagaagctaaatcaaaaatatttaatctcataaatgaaatgtttcccaattttaccagacttattttggcttctcctcttaatccgctgacatttgccaatctttggcattttgccatatttttttggtttttgtacagttttttgccccatttttagtcacccccccccttttggctaacatttcgtttctttttattcaatttttcactatttaaggcttctcacattgccccctcccccaattgtcgcccatttttaatgtcacacaaattccgagcaaaacaaaacaaaactaaaaaagccccgcggtgttttcatttggccgttgcgaagccaaaaagggacggaaggacgaaaataaatcgaaaagagagcttattacataaacataggcttatgtatccctcaaccaataataataataataataatatgtacaatttgatgaagagatttgcctaattttgccacaagtagaaaattcaaaaaagaaaaatgccaatgccattttcaagaattttatgaggtgatttcgggttttttttagtaaagcagtgaatgagcctatcagaaaataaaatctaaaact

SEQ ID NO: 12308 - DNA, 2828 bp, Heterodera glycines
cgaccggtgccacggctgagcagcagcaacatgcgctgttggaaaagccacaaaatgcgaccgccgacgcttcgtcagggatcagcagacaggcggcactgatcacatcgctcgtccgcaaaaggcgagtggtgaaaatttggcagaattatttagtttgtggcggttttcgcaatcggatttaccaaaaaatttaattgctacagcaaggacttagccagacccttggattcgagtgggagggctgaattcaaaaatgcggtttttaaataatcccgaattaggggggggggtgtattttacaggacttgtaaccgtttttcgccaaaaatgaatagtttttgccgttttagtctacatttttcaaaaatattgtaaatgggaggccggcggtggcattaggcgccgcgggaaaaattttttgataagtttttatgcaatttattaagaaattgtttaaaatttataaatttgctgaaaaatttttatgggggctttagcccccctggctacgcccttgtcctacagaatggcagccaattcatcgtgccatttacattttcctccttttttagaccgctttcaactgacacggacaatgaaccaaattcggcccgtgttgaagtgccattaccgccctcgtcgtctgacagtgacaagcgcaatgccaatgagtcggcatcgaagacttcgggcggtccgccaccaaaacagcgacacgaatcgcattgccaaatcattggagtgcttcccggcttaccgaactacactgattcaagcgaaatcccgctcatatttgactaatttattaataaaagctttaaagtgatttccatgttttgcctttcgggcgaaatgactccttccaaactcgcaaattgttacgataccctatatgtaatgttaacgacgatcgtagaaatgccttgactctcattcgagttcaatagaaatgctaaaatccatttagaaagtcaaaatttttcgaaattgaataagccggcgattttcttgaaccgttcaccgctaggtcattagtctcaacagtttacggtcccattcaatttaattgtgtaaaactggcggatcgaattcttaaaccaatcagccatttgacgtccagataaaaacaatgttaaactcgatcaaaaaatgtacataaagtccttagggcgcgtaaattccccaatcctgaaaactatggtatgggatttcgtttttcggcgttcgctgccgtttttgtgccgcaatttccgctcatccattaaaaaaattttttgctccgtcccatttttcttttttgtgcttccatccgtccgcccaccaaatttttcgtcctttgggcgtggacagacggacgaccatttattttctttggtcgcatttatttttatcagccatggaaaaatgaaatgacttctctttctccgccccttccaattttcttctttcccttcgttttcttttgctgtttctccttccttattttctcctccctcgttgcctttttaattgtttgttgaaaagtcaattttggtgtttctcagccaatgattaatatgtacaaaggcggcaaaaaattgtggaaacgattgaagaatttgctaatcacacggcacaattatttaattacccaaattagaattctgaaattttttaggacgctttttttctgtttttattaatagaaattcccttttgattttccccaccaacggaaggacatttttatacaaaactattccaataattatttggcacagatggagggcactctgtccaaatggacaaatgttgtgcatggttggcaacaccgttattttgtgctcaatgacgatgctctttgctattacacgtttgttaatagcgttccattaatcaaaactatagggaataacaacaaatttcgcatcatttcatcaaataaattaaaatgtctctactttatggatggattttgattaaaaaacgttcaaaaggtccaaggaaaagatggctcgaggccaacagcgcgggtgcattcgcttgcgcggcgcggcgcttggcattgacgaggaaaacaatgcccaattcacaattgcagtggacggcaaagtgtttcatttgcaggttttcttatttatataaaaaaattactaaatctctcctttttgatcgttcgtttgaggtttaaaaagttctctttttccaatgaaaatccccattttaatggagttttttggcaccgtaaaatttgaatttgcattcatttaccctgtttcatccatactcattttctgaaatgtgtctaacattcagtttgacagtctcataaatattggccttttcgcaaaccgttgaaattaatatacaagcgtggaatcattttaaagtttgaaattttgcccatcacttcctgttttgctaacccaattgcaaattgagtttttattacctatctaatctggaaaccacgatgttttcagaattcctgaattttggcgaaatgcagtatcactggttagaaaccacggcataatgttttttttcagggcaaaaaccgggccgagcgtgacacatgggtgcgcgtgttggagcgcgtcattcacgagaagtgcggctactacaaaccgccccaagaggacccgttggaggaattgcgcaagcgagtgattatcgcggaaaaccagtcgcaaacgctgatggaacaggtgcaaatccaaccaaaatttgggtccctttttcattttcacctctaataataagagacaaccctttttgtattttgaatttttgcttttttagtgataaagtctgctccgcttggaaatgcaatgaaataccgaatt

SEQ ID NO: 12309 - DNA, 2135 bp, Heterodera glycines
  unsure (1)..(2135): unsure at all n locations
taggaanattnagatttctaattttaaattgcgttacgcttttgatcactagaagtgtcncctcttnaactcatttcaaagcatttgaacatgaaaaattgactttcagacgcgcaatttggagcaaatcaccgcccgcgagacggacaaaacggaccaaaagcgtaagaaaatgctgacggaaatcattgcgaccgccaagcgactgcagagcagcgtcgaccattcgtccgttctgttgcggcaagtgcaacgcgacattggcacatcgctgacaatgagcactgatcagcagcagaagagacggactgctgccgataaagcaattcgatcaccgacgacaatggcgacgacgacgggcacagcaaaagcggcaatgacggaggaggacaatttgaatgggaatgaggacggagagggcggcaaaatggggggcggtgctggtggaggaggaccaccacaattgcaacaacatcaacgggaacggcaggagtcggaggatgaagaaatgtgcccaattggcggcgggagcaacggcaaggaggtcggttagcggagcggatatgtacattgtttgggtcataatttcaataaaagtatagggaaatgggtgggacacctacagccccatttgatcgacatctcttgggtttccattgggattcgtttccacgctcttgagtcttggtcttgactcggtttggtattccgagtctcggaaatctttcattctcgagcagatcaatacctcttcatttcctttttctagcttttgattaaaaaattttcctttttcgtgtacagttctaggcataattacagtcatgttaaaaaactgctttaaaatccttcaaaattccatgtgctttgtctgcacgattttccgcatttccaaccaaaaatgtcctttttttttgtctggctaactctctgaagtctttattgtcgtgtcgttgtacaggacgtgttaaacctggacgaggtggtcagctactccagctcggatgacgaattctacgacgccgccgaggaggacgagcagcaacagttgcgccaccattgtcgttctattggctcggctgctgcccttggcctgagtggacaaaaggggggaggtgaacagcagcgcaaaacgtcgaccgactcgcccaccgtcagcggtcagagcaatgccgcacttcggcgcagcagcaaagacttatttaggtgaacggactgaacatggtttttgcagagagggggggcacaggcccgtagccagggggaagggctggggaatttcactttgtttggggggagaaactatataaaaatggatgcaaattcaaattttgggccttcggaccgccaaaaagtgatattttttccttgatttcatatttttccgggttctcacgggtcgatttttcagaacagcggcgcgctcccacggtggccctgcacaccttcggccctcctcgcttgttttacagcatcaacagcagtcggaactgtccgattggggccaattcgatgccaagggcaccgactacgacgcaatttacaacaacacgcatgacgaacaggacattggggacatcaacaagcaacatggcagtgtgctcatgcatttgttgtcccaggtgagagaattttttgtgaatttttgggccgaattttcaaaaaagtcccggaaattttcaatatatatccatccatttttaaaaaaattttacatttcgcatgtatgggaaattttctcctcctcattggttacaatatgaaatttatctttagtattgggaatcccgaatttactaggtttttggtctattgtaggttgtacaacaagactacaaaaaccttatttatttgacattgtcttcatttcccttcgctttttaggtcagtgtcggcatggacttgacaaaagtgacgctgccaactttcattttggagcggcgctctctgctcgaaatgtacgccgactttttcggtaagtatttgaattttctgttggcttttcatttctaagcctttttatcgaaaaataaaaatttagcgcatccggacgattttatcagcgcggtggacgaggattctcccgaaattaggcgataaatttgtttttatataatttttctggactaaactga

SEQ ID NO: 12310 - DNA, 1064 bp, Heterodera glycines
attttcctatcgtatttcattaaattttccaaaaatttttcccggcgtcgcctatcggcaccgccgggccccaattgaaccattattttttgaaaattagagccaaaatggataaatttgtgatttttcggcgcaatgccgctattaattcctgctttttggttccggcgctgaaggtttcaaaaataacacaggtgccacaaaatttttttggcccggagcaaaaaaaaacttcgggtgccctcacgaaatttttttctgtatacgggcctgaactcactcgaccacccagaaaagtgtgttcattgtcagatggatgttgcgttgcttttggcacgttccggggccagcatcgaaaagaagaatcgccagaacaaaacgccgattgatttggtcgacggcaaagaacagaaactgaaactgatcaaagcgagtgaatcggtgaagccaactgccggaacatagccgaattcctttgttaaatcaattctattgtttttcaatgtaattgtaatgaatcttttgatttcacttgaccaattaaaaattctgaattattgttgagttgcatttttcgctgacattaaataacgccaaataaattcggaaaaatatgatgcttcagttttattcccgaactgctgtttaaaataataaaacgcttgaaagacaaaacaaagcaaaacataatcattctatacatttgaagtgattctgtcgcataaatgtgaaatttggtgaaaaatgaattttcgaattttggttcgaatccgggttcggtgttcgaaataggtcgatggatatcagattcgaattctgcgaccattaaaacccctaaaacaactttatctcaaaaaaaaaaattgaaaattttttccaaaaaggggggggggaccatcggtagtattaccaaaattcgtactttttgaaaattacttaatgtttttaagcataaatttaagtgtttattattttgtttcatttttgggttggtttgtgcatttacctaattaaaacctttaaggtaaaatttgttttcatctctttttgttgcctcgtcatcc

SEQ ID NO: 12311 - DNA, 1713 bp, Heterodera glycines
  unsure (1)..(1713): unsure at all n locations
agttcagacagtgcgcggcctttgttcggtcgattntcggagagtggccgttgcgatgtcattgttgctcaagcaaaggcattcattcgattttattcgtaaaaaataagtcatcagaagagcgagaaccacttactctgacgacaataggtaaatgtgcgacatgaggcggagattatgcgtcaaattgagcgattggaggaggaaatcatccatctgagggccattcttcagacttagcgatattggaatatttttaaatattcattatatggatccactctttaaaatggtctctaaatggaaatgacaatccaaatatatttccgcttttgccaatttcctttcatttatcttttcaaattgcataatgtctcctttccctccgagtgccaccgatatcttcagtcttctggatgccattgacaaattaaaacatttaaagcggactggtttgtttgatttgtattgcattcatctcttaaacgttttgcctagccttggattttgtgacatgcccctaaagtaaaaaagtgccaatttttagaaaacgctcacattaatcatttcaaacaaaaatggcaatttaaattttcatcatttaaaagttttaagaaaactgcctttgtaccaaatcatttctcatttgttaaaggttgggttctcgtcggcatttcggagcccgagacagtcgcttcccatatgtatcggatggcaactttgggtttgaaaaattatcgtcgatcaaccaaacggaaaagatacgttaagcaatgactttgtcggcgcaccgaactgatttggacgtcaacaaatgcattcgaatggcattggtccacgacataggcgaagcgattattgggggttattcagtccattttcattttttgaccttcgccccccccccacagatattaccccccactgcggcgtatcgaatgaagaaaaattcaaaattgaaaaagaggtatgtgcagcaattgtaacaacaacattatttaacagatccctaatttgaggctgttgagactatttcgaattggttgcccgaaacggtgggcgacgaatggaaaaacctatggagagaatacgacgagggaaaaagtgcggaagcaaaggcagtgaaacaattggacaaattggtaaatggtgcgcgaatgcgacgaattcaatctgaaaataaaatatattttgaaaacaaatccaccaaaataaaatcattttcccgggtgatggcaattaacaccgttgcgtcctgacaaattagcctaaaattgaaaatgtagcgaaaaagctgcgacgggttgccggataaattttgagcattttcatctgcgaacccatttcggagagaataatcatttcaagtatttctgaattttgattttgaggatatgttggcccaagccttttcctacgaaaaaaggctctccatcgatttgactgagttttttgatgcgacttcgaatgccttctccgaagagccctttgcgagttgggcagctcaaattaggctgggacgcgaacaaaaaacgatgacaaattagaataattgacggggaaatataaaaggattattttcccaatgacattttgtgttgtaataaattcctccttttgtttgcttaattttattccacttttttaataataaatgatgaaaaggcaattgcattcaaaagagaaaaaatcgaagaggtttgaggagcacat

SEQ ID NO: 12312 - DNA, 1537 bp, Heterodera glycines
cccccccgtccctttgctgctgggcgaaatggtcgcgcattgcgtgatgcaacagctcaatttggacacgcatttcctcttgggccagcgcaaggcgctgagtgtgcgaatgcatttcggtcattagctgaagaaaaagcatcgcaattctcgggaaggacgagaggaagcaaagggacatactttttaaatcaaattcctttttttgtgtacgttttgccaagccccgttttgtgccattgcccacccgactgagttgctgcaccgttgccgaaccgttctccccgaaagagcgtattttgtttttgatgcgtctgaactgatggatggcgttgagaaacttccgctggtgccgtctcagctgatggtcggccgcgtcactgctcctcaaacagcggtaaatgtgccacgtcttctgcaaaacgcgtgccgccgcgtgtttatgtgccaatgtcagtcgagaatcgttcatgaaattgttgacattcttttggccttgggaaagaaggattttgcgcgaaatcactgcgatcagaatggacgaaatgacggcaccctaaagaggacgaggaaaatgatggcactgtaagaaacggtagccggaacaaacacatacagtatccatcccggaaggaaaggaatgtttgttgctctcattagaactgatacggtaaggtatttaattagcaaataagtatttcgaccgaaaggaagggaaattatgctgccactttaaatccgatacagtatgagagtgtctaacattaataaagtatccctgacaacagagaggaaaaatgtgccacttacactaatgccgacgagaatggcgatgagtcgaccggccaatgactttggcacaatgtcgccatatccgttgccgttgaaagtgatggcgatgaaccacagggcgttggtgtacagaatgaaagggtcgtccacgtcacggccaaagcgttcgcattgggcgaaggaccaagcagtgatcagccaaaagacgaacagaaaaatggacaggaaaaacatcggacgctggtcgagcactacgaaatttggggaatgaccaggggaaaaggcaacggacgaacggagacggaccggttttgaggacgaacgcgaagttgacttggatacggttcagggcagccaaagtccgtgtggaggcatcctgaaaaagatggacgaaatgtcaaagcaaaaggataaaatgccaaaagcaaagggatggaatgccaaagagcctaatttgggacacaacggcacctgaaactgtttgctgtgcagcacttgccaacggcagacaaggtaaacgcgcgagagcatcagcagggacaataccacatcaaccggaacctttcgcacattataaacacttcgctcgtcggcctgcgaccacacgcgggagggctcaaaaaaggcccaacggatggtgccggtgccgggcaaagggctgagaaatgagaaacgatgaaaggaatacagggagaggtggaggggggaagggtcacagtaagggagaaagggggggggggggggg

SEQ ID NO: 12313 - DNA, 4508 bp, Heterodera glycines
gtgaaaaggcggcccaaccattgttcattattgttgttgttgttgttgttattgttgttgttgtcatcaatcaggtcaagaagctccattgggtagtagcgattctcacctcctcccccaaagtgttcaacaatgcacggtaaatagggaaagtgaagccttatgcggtgtcgcgcatagaaatgcgctgctacattgatgttaaatggactgcgcagctgcccatatgctggaagaaatgccgcctctttagtcgaaatgccgccgacgaaaaatgttttggtcattccgttcctgtcgttgtaggtcgtgcgcactttacgaccaataagatgcttcagaacaagactccgatcctcgggatgatttaaccgatcgcgcagcgacttgggctgacagttcagcagtttagagcaaaatacagtgacaagaatcattttagagggattacataaagttgcaaattggacactcattttatactcaaaaacttggccacgcccatccaaattcaaatttgactccacccatttttcaagcaaatttaaattaccatcccgaatcccaattcatttttgccaaaatgaagaaatccgttaccgtcgctgttcccgaacaaaaagaaatcaatcaaccaaacgcggaagtggagccaccaaaatcagacactacaaagaagcgcaaggtggaggaccaggaactgtggaaattggcaaaagggaaattcatgctcgcgacgtacttatgcgcaggttaaattgaaatattaaatttaaattttattaatttaataaaatttatttagacgactgggaccgactgttccataatcaacagaaagtcgcgcgcttggaagatggccgttttgcggtgtgctttgagctctgtgaagaatgcgtgtggcgcaattgtcgcgcaaacgatctcattgcctctatgaagaaaaaacagaacaatgcatgagaggcgagtgatgggatgagtcgctgcaacatcattaattattaaggagtgatgacaggcacaagaaaaaccatattgttcatttttgccgtttacttattcattcgttcattcatgctctgttgattttatttttaatatttttagcataaatggattctgctctccgctccaatcaatgttcagcaaagtgccgcttccttcgctaccaattgagtgatctcaaaaatctaacactcaactatggcgctagaacagaaatgttagaaaagtgggtggccagtgaagttaaaataatttaattaaattatttttagtgattatcattttagcacttttcgccttatccgttcgacacgacttcgtcgatttcactagcagttctgcgcaaatggttcgatttgctgaaacaacaagaaaaagtgcacgacgtcatggccgatcggattctacgccacggcatgtagaggtggctggctgttgtggaaactgccctccaatcattaaaacggaccatttcatcatcatcatcattatcatcatcatcatcaccactacctgataattcaccatcaaacaagcggaaattgttgtcatcttctgtgccaaacggcttatcggaagtggacagaggtactgtaatgctcatttattattatttataaataaacatttgttcatttttgttatgtaatgattgatcgtatacatgccgcatctttgacaaatgcatccaacatctcctcggctctcttgtttttcagcggtacaacaaacaaacgtttggataggacgtcaaccgcaacgagcaggtagcggtgaccccgattgtgacgcgaaagagcttgaaaatcggctaaatccacctggacatcggtcatgaatcccactgctacagtttttgcccttggaaagcgtaccctccggggccgcatcagagtgtatgtacggtgaccctccaaataattctgcacgtcccttttccgtaagtgtttcaacttttttcgcgcctctttccacaacgctgtaacgcctgcgaacgccgccggggaagatggactattgtacagcttgtcaagagtggtgttgatcagctccattttttcggacgaaattccttcttgattttcggtgccgtcctggtggtcgtgctctttgacggtctctttgacggagccgtccatgaatacaaaattgggtcctgcctaagcctctcctccaaaatggccgctccaggtggtctaatggtggggcggcccgctctccggtcaattatatacctgatggccattcgcaaattgctatgcgccaacggcttaccgtttgcagtgttaattgtatttccccgaacacccatacgatccgcgtaacggttgcatttgatgtacagtcgttccgaacgctgaggcatggtcagctgatttgatggaatggcaaacagttcacgttgttgttgttgctgttgttcatcactttgtgcagatgttgatggacccggttcgggcgagtactgtactcttaccctcctcggttgcctaactcgttttcttacgcgcacctcatcatcaccatttacagggtagtggcgtttggtccccctcctaggcggaggaacatagggcatttcttcgacgacagcagcaggaggaggctgctgctgctgcgtctgtggtggcttttctttactttttggctcttttttcgggatacggtaaggcatgggcctctttgtcggttcatgttttggctcgattttgtatgtcgcgggagggaagtaaccggcttctctagatgtggatggtcgagggtcgagcccggacattggctctcgattcgcccgaggcgctggagtagggtggtcggcttgctttaacgtagaaggcttaacttccatcaactttggttcttttttttctaacttgacggaaggacgtcgtggagatggaggagggggtgcaggccttggtccagcttttgttttcaaacgaggaggaagtgggagtcgaggaggtgaagggcgatagatcctttgtcttttaccttgtaaatcggcataatctgtctcgtccttttttaattttcttctggtagcaatcctgcgctgagcagtgtccatctcctcaatttcgtccgcgttgtcgggcagcgcaggcaaatcgccataatactgtgatggcgctggcagcgcccactctcaagcatataatcatattcatcatcactttcgggcaatggagcagcagctgcttccgcaagaaggtcccgcacaattggccgttgtcgttgtatatcagatcgccttttatgccattgctccaaacgactatctcctctccgagaaggcgcagcagctctactcggtctgggaggacgttctggacgaggtggaggacttggtgggtacggagcgggagctggaggaatgggtgggggccgagaacgtctcccagccggcggtggtggtggaggaggagcgggaggactaggaccacgtcgaggacgtctcccaggcggtggtggcggtggagcgggaggtcgtggtggtatgtccacaacctctccattttcatcttcgccgcctttccttagcagtacacttattcctttcgtcagctcaactttggctggcctatcttcaagttccctcctcattttcaagtatcgcctaagctgttgattgtaatggacattttttgtactgggatgtgttcgctcggcccttgcacggtctaaatcatgtcgaacagcatccagatttaggtcacccgtgttggacatggaagtgagaccacgataaatttcttgtgggacaagtaaaaatttatttgccatctctgttaaatgaataatggaattcacaaaattcaacaatgatgagaggtatttatgcgtttttgttcacaaaggattttgccacttccattagaacgggtgtcaatagggcagcgaacaatccgccaaatcctgcgcctttctggacaagcactcgcttggcaccccgttcattcctcgctctgctgattcggcgtacagtatccacataaggcattagtcgcttcttctgtctggttgtcagttggaagcgcgaagcgacgagattcaaacaaatttcgaccagcgatagtagttgttcactgtttgcatttcgtataagtttcctgcattttttcccggattttgtcctggccaaagcacacaaccagtcgcgattctgttttatcagctctccaatctttacttgttgctgcttatgccgctccatttttgggaatgaatacaactgttccttcgtcttcgccctcctgctcatccttaaatatgttggttcgcagccgtaacgacggatctgatgcagcgtgcatatcaatccagcaatagccatagggacgggcggtcgctttgcgataagcatcaaggaaaaagtcgagttgactcggaaagagttggacgcccaatgttgggaatggacaaaggggaatacgggcccgcatcaccccaggaactgagcggacagggggggccactttgaattttacgttcaaaca

SEQ ID NO: 12314 - DNA, 1543 bp, Heterodera glycines
cttcctcttctcttcatttcttctcttccctgctcttcctcctcattcgcttccgtttctcctctttcctcctcttcctcattctcttccatttcttgtgtttcctcctcttcctcattctcttccatttcttctcttccctgctcttcctcctcattcgcttccatttctcctctttcctcctcttcctcattctcttccatttcttgtgattcctcctcatcctcattctcttccatttcttctcttccctgctcttcctcctcattcgcttccatttctcctctttcctcctcttcctcattctcttccatttgatgtgttccctcctcttcctcattctcttccatttctcgtcttctctcttcttcatgattagcttttaagcgcattaagagaagaaaagcggcgatggccaatccaattacataatatatggctgttttgatttttgcatcaatcgcttcgctgataatcgcctgaaaatttttttgtgataaccggaattcccatttttagaaaaagcaagctatttttcaaaatttgaaagcctcatataggctaattttagaaaactttattgaaatgcatttaatttttctaataaaaatattttaattttcaagaaacaactgtacctcaatttcacggaaattctcattcactttgggctggcgttcgctgatcagctgaatcagaaatttaaaattaatataaatattttgtaaacaaaaaaaaattaagactaactttctgttccaatttgtcgagcattgccaattggaatttgttcattttgtcactcataaactgaaatttttttttacaatttttagacgaaaatctctctttttaagtaggcatttccccaaaagtgtgttcagacattcgcacctatgccaaaaatcgaatttaattattttcaatcccaaattgtaaacggtatcattgactaataccgtttttaatatgtgagattgaaaataaataaaattgaaacggacatggcgcaaatgtaataaactaataattagtgataatattttaggtgctaaaaactgccaaaataggtatattttaggtcctaaaaaccccaaaaacaggttagaaaatgggaaaaaattctttacattcactaaatttagccaaatatggtatgcaaaataattttagaaaaaagaaaacaaaataaagctaaaaatttattatttttgaagaaaatgagtaaaagttcaaaaatttatatgcattttattaaacaaataattaaaattcaaaaccaaccaaaaaatggagcccaatcgctaggacacaaacgaaaacgagcgcaatgagccataagtgttgtattttttccggcttttgttggtggtcatcgtcggcggcattttcctcatcccatactataatttgtaaattaattcattaattatattacaacaagatcaggtgcttttttacatgtgtcatccaaatacatgtcgtgttgagcaaattcgggattatggaaaataggcattttaaatgaaacctaaatttaaat

SEQ ID NO: 12315 - DNA, 2708 bp, Heterodera glycines
  unsure (1)..(2708): unsure at all n locations
ttttgaataagaaatattagagtaaatgttaaaaagtgagagatggaagaatgaagagagagggagacaaaggagagggtggaagagagaggaaaaaaaatttaatatatttttaaattaattattggataacattcctaggatcttccaattttatattctatattgtgtaaaatccgctaatttaagttttgattagtctcgaaaatgacgaggaccaacttcactattaccgatttcttattctttatgtgcgttttgcattgaatatttattttttagcgaatcaatgatcagtgattggtaaatcatggttttttcttttaaaataataaatatcaaaatataaaatacattttattaaaattctgccatttattttctgccaaataattcaaaggtgttgtccgcacattggcaagaactataattaaatgattttaaaataatcaatttttttacgaaaatgcattttcctggccggttaaagaatgttaaatgctcggacaaagccgttgataaagccttgaccctccagccaacgcaacacttctactgcatagttggctttagcaaatttaaaattgtatttaagtttaaaattaaatccattttttgtgcctccggcgggtctctgaccaattcaacactgtcactggatatttaactcaattaataaattggaaatattatttaaaaaattaatcacaaatcccaaactaaagaataataaaaataattttgtatacctaattaaaagtgtaaaaaataattcaaaaactttaattaatttttgtgaaaattaccaaaattcataaaaatatactgtaattgaattattgtaagtttccaagtaatttgatgaactgacgcatttttcgatggcctaatatttaaaaataaaacattttaatggcctgctggacataaacgtttgtcccccgcaaaaaatgattaaaaattaaaattagaaaattaaaatccaatcaggaaatcattcccattcttaggaatttctcgtataatatgaatacaattttttcaaatgagtcaaggcaaagaaatttgatcattgattttgcacattcgttggaatttcatttaattttaattaaaaattatttttataattttaattaattttcactcggttgcgcgggtggtggcgttgcgtcctcacgcgagtttggaatagcttttaaaaattttacttaaatttttaaaaacttttgcaagctcagatggcagcagacatctcgtccctcactttgtacgatatgttgtcaaaacgccccccccccaaaattggcaattcaatgcttttggtaaggttttttgcggatttttaaaaaaaatttgtgttattataatgtcccaattaatatttgtttaaatgctcgaatgttaaataacaaatcgtgtatcctaatttaacataaaatgaaaattatttcaatattttacttatcgcataaatattatatagtgataattttgaatatctgttttcgttcaaaataaaaattctattaaaatattttaagaagtttatcgtttgtgtggttaaaattaatctgccaaaattaatactcgctacaaaattctattttttggtatttcccttaaaatgagaaatttaaatttttttatgaaagtcttgaaaaatccgtaatacataaataaatacaaaaaatagcatttttacatttctcttaaataagcacacgctcactctgatcaaaacttattttttttttaatatttatctattaaaattttaaacaatttttttgtatgtataaaacccaaacaatccaaaaaaaatactttcatttattcactaaaattgtatgatcagcacatttcaccatgataaagattgaacaaaaagagcgaaatgagaactcacatcagcagtttatcaaacgggtgaagaaattgggacaaatccaactggataaatgagcgtatattcaaatcaaaatattatcaaaaatgatcaaaataccaaagaacaaataaatgatcaacaaaaaagaaaaacagttcaaaaatttgaagcaattaaagaaaaattgaatcaaaatagaaaatataatcggagaaacagtgtcaaaattgagagaaaaatttaaacgcggcatatgaaaaagatgcatttatttttattaaaataataaaaagaaaatccattaattgcaggaaattggtcggatatatttgccaaccaaaaaattattgactttttaaagaataatttttttcaaaagcctcattatttaaaaattttaatttcctttttattatagaaaagaaatgtattttttattaaaataaatatagttttatatttttatttttatatttgaaatgcattatttttttacattttatttcatggttgttctttttcaacggattgatgcaattgcgcgtcccgcgacattcaatcgaaatattttgaagaataacagttttgagggtataataatttcaaaattcaaaaattattttaaataattatttaattttaaattttttaataatttaataaattattttttattttatagcaaaattgtcatccattctccacaatcatccagataaggaaggaacattgagtaaaaaagaagtcttttcaaacggtgttatcagaaaatgcctgaatatttttccgatttttntattcattttttaattaattt

SEQ ID NO: 12316 - DNA, 5198 bp, Heterodera glycines
cccgcctcggattgctgttgaggggccaatgtccattgtgatcggcgaaggccaatcctttgaggagaatgtgaccatttatgcgaatccgcgcgtcaatgcgtttgcgtggcgcaagaacggaattaccattgatcggacagtgggaaccatttttgtgcgccaatcggtgatcggaggcgagtgaccgtaacccaaatttagggcaccttttcatttatgataccgtacttgaagtaaaataccatattcaacatcattttacattgaataacacagcttccaccataattaaggtgccggggtgaccaaggacgactccggcatttacacactgttcgtctctaacggtgttggcaccgcaaatgcaacgattaaggtccattaggcgaccgattgtctctgcctattgggctacagtacccccagttttgcctacttttactttttaggtggttgttgagtacgctgcccggatcacttacatcacaacaccggtgatcgcaaggtgaatcactcgccgccgttgattttttgaatctttggctttaagtttattggtttaaattgatctcaatgtcgttaaaatggcctactgtattagatctaaaagactgcaaaacgataattttatgcaacatccttttcctaattacccgtattaattctattttagtattttaattggctaattatcagagaacggacatttaaacagaaacgtttacggattcgcgctgttaattttttgccataagttttttgaaagttaacaagttttttgaacttttgcaggataatagagaacatttagagctatcgaatgatactaataattaaaaatttggttgctttagagcaaagttataagcaaaaaaaaaaaattttttttatggtttttttaaataacccacattatgatggtttttaaataacgacataacaccattttttaaaacactggattaatttaaaagaatggcacgctgaaaatttcccgctgtttaagtgtcggtgaagatgtcgtgttggagtgtgaagctgacggaatgccgatgaaggcggggatgatcaaatggtttcgaggtcagtgttaatgcactttttaatttataaaaccttctacggtatgcttttttcaaattttcatactgtagcattaaaaatgtatttaaaggccacaccgaagtgcgttccctggtgcaggaccaacggcgtgccgtcatccgaatgaatgcgtcgcatgataacagtcaattagcacaataattgatcctttttaatttaattacttttgtcttttgaaggtggcgcttacacatgcactgttgacaatggaatagggcaggtgataagacagaagagtgataatagagctcgcatttttttggcattttgccgttttggtgcctttttggcgtttttccgaaaaattccattaaagcaataaaatcgggaaaatacacccctaagaaatgacctgaaaaatttcagaatatatacccctaagaattgaaaagttttctcgaaaattgatcgccaaaatttcattttttttcttgataaaaaattttagctttaaaattttccttattctaaaaaaactatttaataatcatttaaatgaccaaaattaatttacctggttaagtttacgtgttttgctccttaaaatccttaataaaaaattttgaatgccttttttgggattttcgtgccttttcatgccttttttcaattttttgtgcctattatagtgcctttttcgcgatttttggtgcttttttgcgagctctagtgataagaaatctaaaattttaaattaaattttccaaaaatttcacagcccaaccacacaacggcctatcttttggtacgacgagcgccggtgattgtgaagaatgcggcattcagtcgcgcagcgggaccaatcggtggcaaggcggttttgcggtaaaaataaatttacaaaaatgccaccgcctcgggtggtagttgaacctacgaacctttcaccacttgaccgtttacaaaattgtgcttgtgctttcagctgtcgtgccactgctgtgccaaacgcggagttcacgtggggcattgagggcgaagggaatatgatcggtgccgtcatttatttgcagccatttttatcaaataatttttaataattaatttttgattaactttctattgacaagacaaaacattatttgtattggcacgaaattaaattttttaaagcattggaaacagaaatttcgaggtttacgcggtccattgtttccaaaaaatcacgggccaaaatgccatggaaaatatttttcgaatttcgccgatctcatcaattctctgctatttattaataagcgcttaattaaaattactaacaaaataattttaaaaacattttacatatcgcattaattattttttcaaatatttttgccattttagtccattacaacaccaccaaataccgcttctttgacacccaattggactacacaacatttcaaagcacattgaccattctgaacctggaagaacatgactatgcccgacgctatcggtgccgagtcagtgtaagtggtggacaaattgaaatttaaatgattaaaatggtatttttgcgagattataattgatttttatacggcaatatgcttatgtaactcccccatcatattcattcattattgacccccttctgtttttgcataaatacgctccgcccgttcattctgttcgggccaatggcaattcgtacaaaaggcaactcgtattaagcctaggctcaagcaagccttggcctagcctagcctaaagcataggcttaagcctaaagcctaggtctaacctaagcaattgtacgagttatcatgattcattccgttcattctgtcaattttgtcatttccaccatatttcccctctccgcttctgtgacccaaattgtcgtcggcttaacagaattgttctgctctttttacctctaatttagtattagatttaaaaaaattaattattaatagtaatataattgcactaatttaattttaattcccaatttaaataataaaggcccaatttttaattttgtcaattaccctccccattttgctcagaatcggcttggccttgtccaatcgttcatttccgttggtccgcccgcccctcctgaactgcccacggagctcgaaattgtgaacgtgaccaactccaccgcgtccatctcgtggactgccggctttgacgggggcgcagagcaaatgttcgagcttttgtaccaggacatggacagcaatgaaatacggtcgctgaacacatcggaaacggtgggtgacggaaggcgagagacgcgtggttggtcacttcacaaaaaagtgcaaaaatcaaaaatctgaataaatttaattaaattaatgcttaaaatacacattcttctcaaaattttgttggatatcgaataaaagaataattaaaatttttaatattaaataaaatcattagccagattacattgaattttttaaatattttaagttaatttcaaatggactgaaatttaaaaataaactcaaattatagaaaaaattgaaatatttatatggaaatgtatccgcttcaacccaagctaaattgcttgggctaggccaatgcttaggctttattttgaaaaatttatagacgccatttaaattaggagaatatgtatttttggcataaatttaattaaattttaacacatttataattttaaaaaattgataaaaaatcataacaaaaatctcatttttgatttttacacttttttgtgaagcgcccaaatttctattgattttgaacttttggaatgctttgaaaattttgctgagaaaatttctcgaaaatttattttgtttattagttaaattatttaaaatatttaatattaaaaatcataattcccaacggtttcctcatttttagcaagtgttgctgaaggggctcgacgctgaccatggctaccaactccaaatccgctcaattaatgcccgtggcgacatctccgatttgacgagggtaagtgccgcacacacacaaaatgccatgccatttgcattaaatgatgaaagcaaatcccttttcagcctttgctcttccgcacaatggacgaaaactcgcagagcgccggggttggcttcagcataattacaaaggtgagttttgcttaacgatgccgccctatttaattgccatttgctaattatgccgttttgtattattttttgccgcttcttcaaggacggccccttctcccattctgcaattgtcgccctttgcgttgcactgcttgcgctgcttctgctcaactgtttgctcatttgctatttgaatcgacggaacaaacggcgcaaaatgcggggtaaatgtcgggaaaatttgaattctcgtaaacaattcggctattgtgtaaggcatagttcgtggtaataattttttggttcccccccttttttggcagaaaaaattttgttttaaaaagccgtggaaatgtttctaaggggtttttgggtcgctgatcagaatatggcatccattttggcctaactcgaaccccggatccgaattcgaatcaaaagtggggaaacccaatttttaaaaattcgttttttttgttctaaactatgtatgtagattaaaacaagcaactaatcacaaatcactgcaacacagaaaaatataatcattcggcacagaacgtgctgagtcgaagcacgaaaaagtgcaaagtgatcaaattaaagcaaaataattattaataatcaaattaaaagcaaaataattattttaaataataataataatctacttaattaatgcgtttattttataatatttttaaatctcaataaaactaacatttatagttttctcattttttattataaacaaaaaatcaataagagactttcagatggatggggtcatttcagtacagaaaattatattaataaataaatttaatttttaaaatgtattttttaaatattttccatattggttcgaggcaataaaatccatcaatatattttttgcccattaagtggattgcacttttatttttattcacaattgtatttttatataagcttttttgccatgccagccgaccactttttaacgagacgtaggaaaagccgacggaaggaaagcaa

SEQ ID NO: 12317 - DNA, 1679 bp, Heterodera glycines
  unsure (1)..(1679): unsure at all n locations
agttattttaataattctttttttattttgtttgttagaaagtcttctttcatttcatgccattgtttcattttttatttgcttaggcaattttttagtatttgctttcccgaccatgcaaaaattgaaaattagcccactaatttttctcgatttttttatggtcaaaaaagtaacctgatataacaaaaaagaaggttttctgtacaaattagaccagtagactccgaatatggccttaaatctgacctatcttttaaccctgagcttgtactgctctacaggtttgttgagaacccagagaccaaatctaaagccatattcggactcagcgtggtcaatttacttagtttaattaaattcggaatttccaaaaccacttttaaaacattttgttatttgatggtcttgaaaaatgccgtttttggagaccatttttagactcggccctccaataattcatttttgaagtaataaaatttttttcttataattttttatagtcctaactttgctctatttactcactttttctctgcctctgtatctcttttcattttctttaaatcagccatcaaaaatacatacctcgaaaatgaccatttttacattatcaactctaactccttaaatacttttctaatgggatttatcccttgcccgataaatagcaaactcattctcaataataatgtcagatatttcggatcatgattgtggttttttaaatttatattcataaaaaaattctttaaaaaaagttgtgcggaaacttatgttaaccctaagtattactgacctattcaggatttcattagactctggttctcttccagatatctggaaggaatcaatagtttttcctcttttcaaaaaaggggacaaatttaatcctgaaaattataggcctatttctataacctgctcactttgcagggttatggaaagaattcttagccaaaatatttacaactttctcctaaaaacaataaaatttcggaataccaatttggttttgttagaaataggtctacgacaagtcaactaataacagttgtggaagattggtacgaggcaattataaatggaaaaaatgttgactgtatttatattgattttcaaaaagcatttgactcagtgccccataatttacttttatacaaattggaaaaaattggtataaagggcaaacttttaatgtgtataaagggctttttgagtaataggactttttgagttaaaattggggattctttatcctcaagtaaaaaagttacctctggcgtcccccagggctctgtcctgggccctttattatttttgatttatattaacgatcttcctgatgccttgccatcaggagtgaaaataaaattatatgctgatgatgttaaattatatatttgttataaagcaaaagccgacacagaaattatgcataatgcattgcataatttattcgaatgggcaaataaatggcaaataaaagtttcaattcaaaaaacttttgtatatatttgggttcaaaaaacccaaaagaaacatataaatttgatggaaatacaataaatgctgtggatacanattagggatttaggagtagacattgataacaaattacaattttccgatcatattaaccaaataacaaggaatgcgtatttacgtatgcgttcctt

SEQ ID NO: 12318 - DNA, 1897 bp, Heterodera glycines
ggggcgacagaggcaaggcttctgacaattggaattccaccaaaaattctttcctttctctttctctctctctcttacatgttttttcctcctccttttttctatggctctttccacgaaattattttctgtacatctgctttatctgctattttccccatctttaagcgtctgatccgctcacattttgaaatgacaaacactattcttctctctccctctctctaactttttctctctctctctctacccctctctctctctcgctcactctctctctctctacccctctctctctcactctctctctctctacctctctctctctctctctctcactcccatctcatttctctttcacctttctcttatgttttctcaccttctctttctttttctcctttcctcttcacctttatttctcttttctctcttctctatctgttctctcccctcatctcgtctctctttttccctctctctctctctcttcactcttttatttgcgtctttccgtcccctccggcgccgggggcagcgccggctgtcactttgtgtcaattttcacccgcttcacaattttacttttcgttcttatcgcttcccccatcgttaatctctcgttccaaattactttcccattttttgccatttaatcttttcgctcgccgcgggcaaataaataatttttagggaaagaggggaaattaaaatgatctttggtttaaaagctttttaaaaaatataaaaaatatcaaagaaatttcataatatgtaacatttttttctaagaaaattcaattgataattattaaataaaagaaataaaatagttttgtcataatgttttaattaatttaacaatatatttaaatgaatttttaaatttttttatgatttattaataaataactcaatttgcaacatttaatattcatttctgacttttttttttgtaataaatgatattgtaaatatctacattgcaaatgtttggaaatttctcgagccgcttatttatttgtaaaattttcttttgtgcggaaattaaattgatgacttttctgctgtaatatggaaataacatatgtagatattttgtagtactaaaaaatcattttaattatttttattttccttttttttctttttcttttttttcattcaaattaatccatttttatttatttaaatttaacccaatattgtattaattaaaattttttagttctctatttaatttcagcaaaataataatccaaaattcccaaaaacacaattttcgcataaaatgcactctctcccgtcgatctttaattatatttttaatattacattccattgccatatttatttaactcaatttaccatcactgcacccattattatcattaatcatttgataattaccaaattaaaagctaactgataaaataaaataataatttgccattatcatacaaaaaactctcgggtgaactatagtgaacgccccgtgaaaaaatgggtcaaatgatataccagtcaattcgtctcaaggagctaagcatggaaaaatatgtctcgagttgcggaaatgccaaaaaaccgatttttgaaccggttcaaaacttgaaaaattgagtgaaaaggggggcctattaacctttaaaacggtcaaattcggacaaatttggtaccatttgaaagctcttgatcagctaattataggtataaattcgaaccgatgccatctaggcattgggagaactgagtcccagtgaaaatggacacttcagtaccaaaagaaataaccatttaaaagcaaaaatttcaaagaagggagcatgcgaagacggagcaagtagtggggctagtaaggagggcggaggaagacgtctgacgagcgccacaggcg

SEQ ID NO: 12319 - DNA, 3653 bp, Heterodera glycines
tattattatcctacctattttatttgagtagtattagatccctttttgaatttggttttagatacatcttattgcatgctccgagagtaactaatattttatttccatagagctaaataaaaaaacaccagacaaactagaattagatgtaatattttttactattactctgaacgggtgggacccgaaccctctataaaaggcagggacactaaccacttgaccactgggcggcttgccaccatgcatgttaatgcccttttcccttcctttcttttattgcaaaaagctcgaccaaaagcgcataattttatttttctttataaaatatttagattttattttattttaatgttatttttgtatttatttaatattcaagttattttaaatttaattttaaaaaattattattttataaattaaaaaaaattattattttattttaataaatttaattaattaaaaaaacaaaaaataaatctaaaaaaaaaagatgaagtatttaaactaaatattgaatagaaaacaaacatcagcaatgggactcgaaccctcagccatcacagaaccaaagtcaggcacactaaccaattcttctgtctcatcattcaaaatttcatttagcgcccctgcattgtttccatttacgtcgaaaaattgttcagtaggcgtagacgcatttaatggcaatccgagtaattcttgaaagaccacattgtggatatagcagttatcgcccatgcaggtattcggtgaaaaaacacgaatgccttccatttgcgtaacccttgacatggcgacgtaaacttgaccatgtgtaaaacattgcttcccactaagcacaagacccatcttttgaagtgtctgcccttgcgacttaaatacgaaaattaatgagaaagtcttgtatgtagtcaaccgtcttacgtttattggtaaacactaattatgcatttttctacctaaaaacgacaagttcgtttttaactttttaaaaattgtatcttccattccttaattatttgcaaattgtgtcttcttgctcttaattatgcatttttctacctaaaaatgacgttcccaaatgcttaataatttacaaattgtgtcttccattgcttaattatgcatgtattttcactccttaattatgcacttttctacctaaaaatgacgttcccaaatgcttaataatttacaaattgtgtcttcctttgcttaattatgcatgtattttttattaaaaacgtgaataaaacgacaaaataacacaattttaggtataaaatagagaaaaacaaaggggtacatgcgtgggtatggcggtgtatgagggtgcgtgtgtgtgtgtgtgtgtgagatacaatgaatgatgaacgaaatgaaaaacaattacaaagtgtgtccaaaattgagaacatcataattagggcccactatccctttacctacatatgggcgataacatttttggagggggcctgaagtgacgtgtccgccactcctaatgtcgggtttcaaaaagttgaggtacatcacatttattggctcatactctccggtttgggcataccgcaacacttctttgaatgtgtcgtagcagagggattggttctgcatcacgtcgtgttcagtgtgatgcccctcagcttcagtacaaattcgtcctgcccattacgccggagtttgagtccatactgaaatgataaagtgtaaattatgaattattaaaggtgaaaacctgcttcgctccgccactacaatactccacaatttcatgctttgggtattcatcggtgaattgtcccaagtgtggtcctgtctccaacggattcatgccgattgggtggacaaagatcagcgaggctggttaaacaaatcggcgtcaattttggcaatgaattgtgctgttctgctgcctacaaacaggttgcgtcgtgcagtgcatccgtctcccacctcaagcacaccaccagtgtcacggtaataacctgcagcattcaaatgcgagtctcgcggtcgtggaatggagagttcgtgtgaaaaatacgatttgtaggccatcagagaatttgcgttgaacacttcacggccattgatgctcattttgatgttacggatgaatgtgtgtccaatcagttgaatcggagcaacctcatcagctgcaaggtcaaccagttggccatttgcattttctttacgaattcgaaactcagacagcaaatagcatttggagagatcaatgtaattttggctggagtgaagtttgaagtggtagggggtgtcggtcaaagggttacttgggagcagttcaaacactttggaggatgagacgctgatgttggttggcgggatgcggaaaaagtccaaggcgttggtgatggagttcacactgtcattgtaaattttatggaatgccatttagtaaagaccaaatgcgtcagatcgaacacgttttctcgctagtttgctttaattgaattttttcaaaatttccaaaatcccgcacgggatcccgcaaattttaaatgcgggattaatcccgcgggatcccgtcccgaaaaaaattttggattccgaacccgcagcgggatccgcaaatttgaaatttccggtctttaatcactactgactaaactaaaaactcattttttcaagttttggttttttatcacccatccggcacgagaagcggtcattatcggtgttgctccttcgctgtcccgagattggcgttggcgccactctccacgagaagggtgactgaaaatgggaaaaactgctgatgtagaaattattgcggatgattgcttcaccgattcatgtgagtcagcggcgtcaatcggttcccaagtcaacgtcgtcaccgtgagcgacaacaaatgcacatctccaaatggagcaactgacagcaaaccacaagggcgtaacggctgcaaattgggtgaaaatgcgtgaattaggaaaccgcagaattcggtccgcaaaacgcattcttaccaaaggttgacatggcgaatagtgttctgatgcgggtccgcacctttgtccaactgaaaaatgggcaaattttcgttgttagttttttttcatgggtcattgatctgcagccatcggcgctaaacaaatcgatcagcgcacccaatcagtcgatgtttctctcgtggataaagtcgaagaattggccgctgcgctgcgaaaagtctaacataatcagtcttaattaattaaaggaaagcgaatgaaagtcaaaatcaattaattcacaagaaaatgaaccgaaaaaaggtaccaccggatgcaattaatggataacgaatgtctttgtgtactagactcatagtataaaagcattgcattatgcaattttaaaacactctctcattttctcggatgcctttatttcactctcgaagcgcgccgtttgttttttctaactcttgcaatttccctaatatattatttcctgttttgaggtcgcacaccaagattttaaaaaacaacaaaaagcgccaaattcattcactcatattctcaagcttatccatacatttgaaaatgtgttcgatcagaccgaggtggaggatttgtgtactgaacaccaattggaaacaattaggatcggtgagtgcggtaaacatgaaaattaa

SEQ ID NO: 12320 - DNA, 711 bp, Heterodera glycines
ggtcaatcaattgactcagagcatgcagatgcatgtaagttgtaggggaataatacagcatcatttttattggtttttaattcaattttgtaaatttaaatgatttagagcccaggttccgcttccaaatcaataaccccaggctcctcctatttgagtcattgcggacagtgccgctcacccgtgttgttatatgccatttccagcgtgatcttttgcgtgtagtcgaccgcgtcgcgaatggcaatcgcctccggcgagtcgctgaacggagccgggccggccatagccaacatttgcatgtgtttgttcggttggtttccattggccttggtgccattgctgacgctaaccgtcccagcggaagcggatggcatttgctgaaattgacagtcttcaaattgagggaaactttgaactctaaaattctctaaacaaggaatatctctctccccccccccccaaatattcattagcgtgcaaaaattcttgggaggctaaacttttggacggaattccatcacgttcattccccaccaaaatgttcgccccaaaatttgaccataatttatgtgctttcgtgcataattttctccacttatcaaactgcgacaaatttaaaaaatggaaaaaaatttgaatgagtggtgttgggttttatattccattttaaatttcccaatgaataaagaaactgttgtggaggaatgg

SEQ ID NO: 12321 - DNA, 2149 bp, Heterodera glycines
ctttcagccggattttggcagagaaaatttgccagatcaaaaaattttgcaagaattgataataaatatcatactttgatatgctgtgggatgctggcccagttctgtttgactgtgttcttcagcagcaaaccgctcagcgaacgatgggccacctggaaagtgaaaaataaaattttgtaccctaaaattgagcccgtaattttgaaataccggaaccgatgtgtcgcccggtgaaaaatgtcattttaccgggcggtcgttcctggtggtttgtccaaaaaaatgggaccgagatcgtggggccggtaaaagcccgccgggctctactctacttaaaaccttttatgtttacaaaattacgcatttaggttgtctgattttggcaccctcccccgtttaaatttaaaattcattaatttccttctccggattttgttccccggacttttaaccataaatttttttgtaaagaaattaaatccaatgaattacgtcttgttcggtgagttcgctgagaatgtagagcaaatagcaacagaactcggggtgtgcattcatttggtccaaatgctaaaattaaaaatgacaaaatcaaagaccaaacgacacacaaaaccagcagaacccacttgttggactcgttgttgcatttggttgtcaggagactgagaatgttgcaaaagtgagacaatctgaaaaatggggaaaaatcgcgataatgagtataaaatcacaataattaggggccgaaaattgagtttttttgttgcaaaacaaaaagggtggcccttttgatttgcaaaaagaaaattttccgcgaaaaaaacaaaaagaatcaaataaataccaccttcataattaacaactaaatcgtttttttttgtatgggttttgtggtccccaagttaaaaaaataacctgattgagctcttcctgagatggctgccaatttgtggcgtccattttcactgatttgatatgaaaataaaataatttatttctttttcgctggttttgatttaaataaaagccaaacatggcacaaaattacgacgaggaacataatggggaggaaaagcacaaaattgtgctaacttaattaagtgagaaaattctgcatgaaaatggaaccaaagagaaggaatggaatgggatgatcaatcattgaaaaaacaaaaaagggggaaagtgagtgagtctagtttcttataaatttttctaaaatttttaaaaaatttatttttggggtggcaattttgccctctctccttcacctaaaacaccattctagctaattccgtttttttaaagttcttaagccttttccactgatgaacacacaagcagtcaaccaaagcgtgcatggcaaacaacaaataagaaatggcttcgctcaacaaattttttggcgtaaaagaaacgccaaagttttaaaaagcatacagaatgccttcgtggacgaaccgctattcgtttttgacatgactctttttttggggctgaaatgcgaaaatcgaggccgaatcaattaaattttaataaattatatatggatataaaatcgcaaaatttggccatataatatggaccaaaaagcatgaaatatgcacataaaattgcaaaaatatggacataattttctaagtttcttataattaattgaaatttagcgcgccgaaagaaaagtggttgaaaagcaaaacaaaaaaggtcgtcaatttacagggccggcggaccccttcgcaaaatttgcttaccccccccccccacccctacagacaccttcgaaaaattttggttgaccccctgtattaactgactagaaccattaaatgtgagttttattcgaatgaaagagtcaacaaaagcatttctgagagcatcaaatcaaatttcaattggtgtgatcgaccatttctcagatataattaattcacttccgcgccagacgccatttcgttgctttgacgcgcttctttttcttcttccgctgctggtgacaaggcctacaattaaatacagtttgaattgggtgtgaattatctttacacttacgcagcagcagtccattttctaccaccccacaaagtaaattggacactggtcaaattgtcgtcccaatttccgtcgtcttcccattgatccg

SEQ ID NO: 12322 - DNA, 2449 bp, Heterodera glycines
tatgttaattggttggactcataaagtgcaatagagcctaattttttgcttttctgaagtcatacttctctggcggctgctctagcgtcggctaggtcatcagcatggccagtgctaacaccgaccaatttgatttccacggccttgccggccatcgttgccattaatgctgctctcaattgcgctggcgtgcagtcttcattcggcctccgtgttgacaatgtttggccatcaagaccattctggccaatgatggtggtgctgatgaagctctccgcaatgtcctcattcaatttgaccactattgaatgtgccgcttcgtgcgcagcgaccaatgcgggtgtcgtttcacctgttctgcgggcttcttcaataccctttttaaaattgctccatttcctccaacgccttttctgcgcttttcctgctttggatcgtttcggcatttactaaattctaccgtagttggggttgtatgtgatcgattttcagccgaaaagtgtcattttccttcaaaaatcctagagaacgaagtacgataagaattccctcgatcacatacaaccctgattgccgatcattaggtttagaaaacagaaatgggtagggattagtacagagtcagactatggtgctaatgcactttaattaaaatgctgtaggttcgaatgcactcaatcgggttcgacttcttctgatgcgatgaaatattttagaaaaattttcgacttcttctgatgcgatgaaatattttagaaaaattttcgacttcttcgtgcgtttaatactttagaaaaaaattttctatttctccggatgtgtttaaatacttaagaaaaaaaatttcgacttcatcggacgcgtttaaataatagaaaaattttttcgactaattaaatgcgaatgtattcttcaaagcagtaatggtgcaattaccgtctcttaataaaagtaattcaattacagtcagttcgtttaatccatctttctgcataaaaatgatcagctaatttgacaaaatcacaacttttgagtttttctcatgtcatttttgttatctgaacagttacaattacgctatcaataagcaaaatttcaattgtccgattcgcgcgggatggaatcccgcactgatttgcgtgatcccagtccgtaattttggaaaatgagggatttacgggataaatacagcggcatcccttcccgcaaaaactttgaatcccaatagcgcaccggcatccgcattgggttttttgaactttgaaaggacagaatgccaaaattttctgaaggtgctaggtcatttcgcgaaaagtgtaaaaatgatgcagtcacacaaaggccgtttcgcgaaataatttttaattattttaaattctcaaaaacaattcaaatgcacgtagacaaggaaagagaattcaaataatctttatttacttttctggctccctttctcctctctctcttgctctctctctctcctctccctttcttttctctctctcctctctttctctctctctcgtggtccctggattctcgcttgatttcgttacaatttagggaccggggttctgtgcttttcctctctcattgccaaattcgaatgtagctctacatatcctctactaaattataatttttttaaaatctagcaacaattcacaaaaagttgtaatgaaaaacttccggaaaatttagactgaacaattttgaccctaactttttttaaaactgtgattaagttttcgatcgtctgttgttgctttttcgttgttcataacaataaattcgttccaagactgttcagtttaatgatcagaagtacaaattagttcgaactcaattaacaaaagatctgccaaagttgggattcgttgtcttctttaaattattttttaacgctgcatttcatcttttggcacgatatgattgtcaattaaattaaacatacgaattgattccgccgtgaaaatttatgctttttgacaaatctcaagaaaaatgcgttcaacgataatttcaaatggtgacttgctcgagatccacggttcgggctttcttttctgtctcgacttttacgcactctcggtcttccactttcgagatcgagcgactttttatgcctttaagattgactcttggcaaattcaaaaataatttcgttgccaaccatccattttttctggtctatgtaaaatctgtcgacctgctattgaattaataaaattttccaatttttttttaatttgaaagattcttcacattgttctcatgagcagcaaaatatgtagtggggaggaggaggaggaggaaaaaatcaaaaatcggaatggacaaagtttaatttaaaccaaaaatgaggcccaaaaagcaacaaatttttgggacacaaaattcacacaaaaaatggggaaaaaataaaaaaacgaatacaggaaaacagata

SEQ ID NO: 12323 - DNA, 1633 bp, Heterodera glycines
tgattagggatgccaattctattggaaatccatatttttttcccggactgcggggggcctgaaacgcacgaaaaacatgtttttaacttggtttgaagctgctaggatgggtttttatatccatattttccatattttgcgatttatgtccatatttttccatattttggcatttttatccatattttatgtccatattttggcatttttcaaaaaaacctctattagaacggcccccagcagcttaattagcctttttgagcccaaaaaccgaaaaatttttcaaaaaaatcattttttcgcaaaatttctcgagaatattgaataaatttaaattttcttaaaaattaataaatttatgtcaaaaataagcaaaaaagcgaaaatttcgcttttgtggttgattttgcgctaaaaaattaataaattttatttcatttttttgccaaattccattttataaattgcaaattttgtttctttttcaaaggctttcaaagcttttcgattggatgagcggttgccaatgcgttgggttgcgttccgctgcccgagctgacaccaaaaaacaaccaccgccgccaccatcattttcatcatcaaaattacataattttcatcaccaccatcaccaaaaccatcaccatcagacccaacaccatcatcgaggagaccgagaatttgttgttgtttttgttgtccattcctcaccgaacaccgcggccaaaacatcgttgacggcaaatagtcatcataattatcatcattcatcgccatttccttcaccacctccgacgccttcgtcctcctcctcctcttcctgctgctgttgttgtccttgtcctcctcgtctcttaaatggtcggtctgtcggcgtttgtttgtttgtttttgttgttcaccgggccaccgaccgaccaaccgactgactgggcttgggctggtcgtgtttgtttgtttttgtgtgcaattggccagcaatattattatgattatttggtttggctgagatgggccggtgcctcgtctgtcatagcaaaaaaccaaaaaaaaaccatttgaaatttctgccaattttccaattatttttcgtaaatttttgccaattttccaattattttcgtcccaaattcacaataccgaggccagcagagcatcgaaaatgtgatttctttttttttaattgcccaaaaatctcaacgacaaaacccataaataccaatgtttgtctgtcggcggtcggtcccatcttgaaaaattaaatttttcaatatttggttcaaaatttgtatttttatccgaaaattctgcacattttatcaacaaaaatttttaatttttcctaatcattttgtacaatttttatttttaattttttttagaggacattgttggtgaccattcgtcgtccgaccgagtccctccgccttttatcgttgacggacactccgccatttgtggtgacaaaacccaggcaacaacccatgccctgcgctcaacagttgtgccaagcgcatgcaaaaccggtgacacaaaattcggtattattcaggaaattatgcataaatctaatcgaattttagagaaaatcctttttaatacaatattagtagagatcgacattttgaaaaaa

SEQ ID NO: 12324 - DNA, 1391 bp, Heterodera glycines
atatagtcaattttataaaaaaaatggcacagtagtaaattctcaaattggcaaatttctcggcattatttatttttattttttttttacataatcgcccgtcgaatccttttcttaattcattgccaaaattttaagaggcaccaagcgccgcagtgccaccacaaagtgccaacgccgacggcgcattggcggtgccatcgaccgccaaacggcggcagcgacacggcgccggccaattttctgttccgtcgtccccctcggcgtcgctgtcgtcgttcaccgaatgccgtcggcggcggcgtcccgcgctttccatgccgttcatgttaaccatgtggtggacatgtttgttgctgttgttcgccttgccaacccatgtacattgccagactggcacaagtgccatcgaaggttttttttttggtttgattttcagaaatttcgcactgtaaactttttggaatttttcaaaaaaaaaaatcccaaatttcagtgcaaattgaaagaaaaaattgcaaaaattttaaacccaattaaagttttcgttttggaaatttaatggattttgatgaaaaaatcggcaaaaaattaaccaatttctttatgctcattcataaaaactattctttgctctaataaaatgtgaactttagcgaaatttgtcaccactcctcggttttttatacaattttttatggcttggaaaaattttcttaaaatttttttttttttagatttttcgttgcatcccgcgcctcggcaaccgcgccgtgtgttcaccaaccaatgggccgttcgcattgagggcggtctgccggcccaagcggatgccatcgcctccaaatacgggtttcgcaatttgggaccggtaattttttggctaaaatttggggccccatttttggtactaaacttttgttgataaaaattggcaaatacctattccctttgaacattggcaaaaataaaacatcgaaattttaatttagggaaaatttttttaccgtttttaaataaaaaaaaattgccaaaaagtattgcgcgccattccccaaggttatccccggcggtgattacttcctttttgaaagccgtgtggtcagaaagcgatctctgcgcaaagttcggcgccatttgcaccatccgaccatcggaagagagcaaaatgtgagtgaattgcccaaaatttataatatagttggaagtctgatttcgggcataattaccccctcatacattaaaaagggagggggggggtcagcggccaattttgcgaaatggtcccggccatgtaaatcgacgaccttttttttttgcttttcaaaaccccatttttcatttttgttgcggcgcactttttccaaaaattttctggtgaaccggggggg
